United States Patent Application Publication US 2015/0315605 A1 - sequence listing, part 17

SEQ ID NO: 26553 - DNA, 2767 bp, Zea Mays
attgataaaataaatattacactttatcttagccaaaagctcgaaaatgtatgtgttaaaaacgagtccgaccctctttttttacagctcaattgattgttcgtcctctttagctaacaaggtgatattatataggagcgttatgctacatgtggtttggtgtcgtatagaaattatgtggtttatcacggtccatatttggtttaacggcctatatatagtataacggcatattagtagatgagaagtagggaaaatgaacagactatacgttttgcatgtggtgtatgatttcgcatatggtgtatctctactactccttaagaaaggagcgtaggcgtgcacaccaacccgttctgcctccgcttcgatcatggggtggtcgcgctttcgtcgccgccatcaacggtgtcgctatctcctccctatccggcgtccgcgatgctcgccacccctcctcccccacgcgtcggacgctcgccatgctcgcctccctcccctccggtccgcctcgctccccttccgcccttccgtcgcgtgcgcttggaaaaaggtccagcagccccaaactccccagcggggccatctcgcccacctctccctgcacgccggatccccgccgtccccaccatcgcctgtgttgggtccgacccagtccgctcatgcctcgacgcgcagttctcgcacaccgtccgcggcggcgtccgcctcgcgccggtctcgcacaccgtcccgcagcggatccaatcacgcctcctcaccctccgctgcctcctcccatcccctctcccatcgaatccgcgattccgcgtccacagtggataccgtgagctcgcccccgcctccatggctccatcctccgctcgcgattcccccgtgcccgttggaagggggtcacggatcctcacacggttcctgctgcactacctccgcgctgccacgcgcaggccgccgacgcttgagcgggagggcaccgcgctcgctggcctcgcggacacggccgtccacggcatggcgctcgtcgagggcacgacgttctcgtgccggggcctcttctgagtgctccggatcgtgtcggcggtggggctgagcagggagtgccgtcacaagctggagcggctcatggggctgatgctggtccaggccacgctcgacgacctccttgtctccagcgacgacggcggcgacgtgtacattgtcaacctggtcatgaggctggtcagggtgttcgtggcctccaaagaggaggcagacgcgccgtcggagaggatgcggaaggtggggcgcctggtcgacaagtacctcgacgaaatctcgcaggaccaggggctgaaggtgtccaagttcctcaccgtctccgagagcctgccggactcggccagggactgctacgacggcgtgtaccgggtgctggacatctacctcaagatggcatatcccaaaaccgctctacttacaaggatggcaaacatgctcatccaaatgagtcttcagaacccccttactttggctcatccgtgagcattttacagaagcaaccagccaaggaaccccatatggatggggacaatccgaatggctctgctaacagagatgattagcggcaaggtatcattgcatcaatttgtgtattatcttgagtatacatggatgtgcatagcctgtgtggattttgttcgccaaagctttggccccagtacgtgtttgttacctccaccaatattctgtatgcattcatcatattgaagctaaaaagtcattgtgcttttgtagacctgtgtttttgtagaacacttctctattttatccattcagaacattgttttatatttatccattcagaacttgtgtttttgccaaacacttttctattttgcagtgagcttaactgtcagacttttgatagacacttatccaatatactaatgccccaactactcttgaagttaaaaagtcattggatggagtaagcatccccaagtaatgcattttacgaatttactaattgctattgtggattatcaagcctgtgatatgaaattacttatgcgacttactctccttcatatatttccttcccgaacataacgacgcctgccacatgtccatagcctttttgcacataaagatttgaatatcaaattttagtcgcaccacaacaggtactagaaagtggtataggcagagtcttaccacttcatgttgataagtgtcatatgctacattttgcggcttcctattgataatgcttcgaagataatattaactaagtatcccttgtgaattgtgacactgttttgttgctttaaaagggattacaccaatcctgacctttttgtcaaccaaataataattgaggggattgtgcagcccacgataggccggagcctaagagcagcgtgcttttaggattagttgagatttgagaacatgcaatatgctgtgacggtggatgttctgcaaactgtgttttctgtttttggcgctgttaaaaaaatcaccatgtttgagaagaacagtggattgcaggctctaatataatattcagcttgagaaggacctcaaggaacaacaagttgtgcaaggtgcagtggaaaacactttaggggctggttctatcaatttgctattagagaatccaataccaaaggcaaattctctttccaacacaccaaatccatatgaacaaggcatctcgattattgggcgaacactatcgaaattcgatgaagatgatctgattccatgtttcggatttggagatggt

SEQ ID NO: 26554 - DNA, 2328 bp, Zea Mays
tctactcttaggaactgcttacattttttggtctataattgcaccatttagagctttcttttgttagattaatgctatgttatctaagtttctacagattgtgcagaagatctgattcgggtgggatattttaagttacatgcatgtgtgttttcagctctattttaaccatgggaacgggactatttggtttcaataaatgtctggatttgaaatgtgggggtgaaaatttctctgatatattcactttattttggcactggctcctgactcctgatttctgaccatgtaaccacacagaggtttagtactaaacatgactaaaccttgattcctacagtcagactgctaatctgctgtattgggctgagactctaagcctgaaaaagcttcacttgcatgggtatttgtgttatctttatagctaatatatctttaatctgttttcaaatttatgtatgcccatagttgattagttagttggtgatttggatggttctggagtatttggcttgtagcatatctgtttttttaatgaaagagaaggtatggtggtgtgtttgggacaattacctgcctttcatgggtgaggattagtttgattcgcaaaattgggtctcttacaaccctatgcaagtgggggtctacattagtgattaaattggacaaaggtgagctgcaaaagtgaaattaaggttaagtaggtggattaatgcaggttaaattctaatgtcataaccttgtaaagcacacatcatggaaaccagacggcatcttgtattcttagttcatcctgcattcctgcatcacacacagctgaccaaacagaacactgacttgtatcttctcttgttcaaaccagtttgggttgaggctgtattttactggagtcactgctacaagtagaaattgaaagatagctattttatatagaagaacaggataggaaaccagaggtgcttgtaccaaataggaaatactactgatattaccgaagttacaattcacttgagtaatacataaattatccatgaagttatatcccaaaacctgatctagcccttcaaatgcatatatggttcaacatgagcattgcacacctaatctgagtcctcacatataaaagaaaaagatttgtcatgggacttgcaggccgggagcacactgccaaacaacttctacattgatttgtgaagaagaaaaaaaaaccaagactgagatatgaagatcttaatcctttttctctgatattacaggcatcaccatattgaatgaaattgccaccatgaagcgctttctagaaaatgattttgcttttatttatgttggcacttgtagtggatcagaaccatatattctttgctgtagctgtatttaatgctctttcatagagggttaacaactattcaatcgcctagtcggtagggatcccctgtatcacttcctggattagggagcacaagatcctatattttaactgacacagtgttctaaaaaagggctaagtgggctcctggtgctgtctaccaccagattgtgtttctgttatccttttttggtcttttgctgtgaagcctacatgtataatcggatagctccacttttctattttctttaatgtttcaggtaaaggtttggttatgatgaaggggattaaaggatcatttgctgatgctgcgtcatctgctaagatatttgctgttcttgctggtgttcaaagtttagtagcctgctctttgagaaaactacgtggaaaagatgatggagtcgcaggctgttgcactggccttgctctgagctttccaggtgcaccacaaactctgattcagagctgcttgacctttgggactttctcttacatcattgagaagctaaacaagcagcaacctgcgctggcgctcctgcctgcgacaggtgtgatggatccgaaggctggacaaagcgttcttccttccttcacacttcctcctctggataccatggacgaattttctaagttccaaaactttttgtcatccaaatttcggggaaactgagttatcctggtggagtgacgcctagttatctactctggaacgtgtccttgtaaatgcgtcaatggtcaatctgagttttttttccccttgtttattcttcgccaatgtatgtttccaaattccaaggtagtgttttggtagtgttgatgattctaccttgacatatcgaacacaatttgtaaataaggcgagcagcttgtcctttgttcaactgattggatcttcggagttttacccacagaccgtgccccgtaagaaggaagaacatgcaccttgattcttacgagtgtgt

SEQ ID NO: 26555 - DNA, 1295 bp, Zea Mays
gttgaacatactcaacaaatcgtgcaggaaggagattcagctgacagagaaaaggcgcacacaattaataagaaatctatcccctgccgactgccgaccgccggccgtttgccgacgagccgagacccgcgagggcgcgcgcgcaggaacatgcaggatcagacgacgacgagctcgctgctctccagcagcgagcgctcctccagctcggcgccggagacgggggagaccagggaagaagcgatggagagcgacgaggagatcaggagggtgccggaggttggcctggagctgctgaccagcccgtcgacgtccggcagggaggcgaccgctgccgcggccgctgccgggacgtcgtccgcgtcgcaggcggccagcgccagccgccgcggccgcagcccggccgacaaggagcaccgccgcctcaaaagccataaagcccaccgcgaacagattaaagaggccccgcactcatcatcaggttgcttcggaaccgggtgtcggcgcagcaggcacgggaaaggaagaaggcgtacctgagcgagctggaggtgagggtgaaggagctggagaagaggaactcggagctggaggagaagctgtccacgctgcagaacgagaaccagatgcttagacagatactgaagaacaccactgtcaacaacagaagaggcccaggtagcagcagtgctggtggagacagccaatagctgtcgtctatacaactcctcctagaacccggttgcacttcgaagaaactaattaattaaagcaaggaaataccgcttgagagagctagtagaaagattgaactggtcatgcaagctcgttatttagttacaatcatatatagccagcctcccttcacagggaccctgtgctgcatatatacgcacgtgttcagtgattcagtccgttctgcaactttgtctagctgtatgcatgcaatcgcgttgccaacttgtaattcgattcgccttcgtgtgtagactgtacgcaaggcggagtggacgcagtgcacaagtccgtggtgcaacaactgtaatgtaataactaggcttgtctgaattctgaatttgtgtgtcttctgtactgtacggttgtgcaaacgtgcagattcgctgatgacacattttatttagcttgaccaatacatcgacatgtcctctcccatatgctagaattttagaagatataaatattagttactatttagtaacccattcattttaaactatgagatgtttttttttgtttttttaagatgtacattgtttggggagccttcgcgccga

SEQ ID NO: 26556 - DNA, 1738 bp, Zea Mays
ctcacctaacccactcagcctaagatccccacaggtgtcaggtctcatccggagtcgtcgccaagaaccacagccaccgcgatggcgcagatcatcgatggcaaggccatcgccgccgacgtccgccgcgaggtcgccgccgatgtggccgcgctctcgtcggcccacggactcgtgccggggctggccgtggtcatcgtggggagcaggaaggactcgcagacgtacgtgaacatgaagcgcaaggcgtgcgccgaggtcggcatctgctccatcgacgtcgacctcccggaggacatctccgagaccgcgctcgtcgccgaggttcatcgcctcaacgctgaccccgccgtgcacgtatctgcaggcctccaggcttgcggtccagtggatttggtctgatcctgtctccatcaagcgtacatttctgtttgatgtttgggatttgaatccttgagcgctttctcatagcaggatctgaaaatgcaactagtcaataaaattggcatccgctctgtacagtatgtcttatctgttaaccaaggggatttcatgtcatatcccaatgtcgcttctggtttggctgcgctaatagtgctttcggagctgttgcatactatgaactccccccagtagcaaattcgcacagataagtaaatggagctcaaacatagcattgttttgatcgtaaataagaatccatagctaaaaaatctgggcacgatcaatctaagctcaatgtcctccacaaaatttgaactttttagctctgtttgtctttacataactatgtagacgagtgccatgccatatggaggggttctaaaatggacttgtctacctccccactggattcatagaaaggcagcaagttcagttttctgacgcttgtgtgagacagttcggtttcatttgattcatgccctgttctagcttcttgaaatactgactatttgatcatactggtttcatagagcccaaaaatccttgttccaaattatgaagagaagctaagtttgctttcagggatccttgtccagcttccacttcctaagcatatcaacgaagagaagatactgagcgagatttccatcgagaaagatgtggatggcttccatcctctcaacattggcaagcttgcaatgaaaggcagagagccactgttcgtaccatgtacgccaaaggggtgcatggagctcttgtcaaggagcggagtcactgttaaaggtaagcgggcagttgtggttggtcgcagcaacatcgtcgggctacctgtatccctgctccttctgaaggcagatgcgaccgtatctgttgtgcactcgcggacccctgatcctgaaagcattgtacgcgaagccgacatagtcatcgcggcagctgggcaggctatgatgatcaaaggtgactggatcaagccaggtgctgcggtcatcgatgtcgggacgaactccgtcgacgaccctacccggaagtccgggtaccggctcgtcggcgatgtggatttcgcagcggcgagcaaggttgctgggtacctgactccggttcccggaggcgttggcccaatgacggtggcaatgctgctgaagaacacggtggatggggcaaagcggggaagaagaatgagaaagaaaaaaagcaatccaagcgcaagagctcaaatgaacactgccatcagctcaaaaaagtggaagtgagttcaccggaggtgggcgccaatgttggggacttgttctca

SEQ ID NO: 26557 - DNA, 4116 bp, Zea Mays
actaaaaaaaagtaaccgtccccgaagcccaaagccaaaaaaaaaacctcctgcagcctgctcgaaaccctccttcctcctcctgaattcgtcaaccggtctcccaaatcggagcggcaatcggattgttgggtacttgggtctcgagactgagctgtgctccagtccgtgagctattcgttgatttttccagcgtgaaggcgccgatttttgggccgttggctgtggtggcgggttcggcggctctggatccggctgtcttccggcgatagatcgggctattggagcagaacaatacttcggattcttgaggtgtccgtagctgcactcgcgatgacctttttttaggtttgtgttggaggataagagggttacatgcaatggcccttgaggcaaaacaagctgctctgtgtttcaaggaagttttgaggttatccattagaaaaagctatagatttgtttcagaacaccctatccttttcggtttgggtgtttttctctatctattctacagatcttcaccaaggctctttgtgttcctgctttcttcttcacctgtaaatatatgcactgctcttcttcttggaatcctactgagttatggagaagttaatcttcctgaggccagtaaagatcacagggacactacagaagtttcaacttccatggttggaaattcgtccagtgatgtccactttgaagcaaatcagagaccttctgtacttgaatttagggagaatgcatcaaacttcaaagagagagaaaccaaacagaaagtttccttcagggagagggctagcgagcatgttgaccttgatgattatatccctcttctgaagagagctggtgaagaagatgagagaggtgatcggggtaacatatctagaacacttacaccatttccttctatggtcaatattcgccaagagtctgtgataggggaggacttgaccttcaccaagaaaagacaatcggaaggttcttttttcatgcaggatagggccgactgtcagactagcctatttgatgaggcctgtctgtgtggtctgaatgacaaagatataccttttggtttgttttcttctagtgagaatgttaataagaatgatgagatggaggaaaaatttaatcaacagagagtatttgcagattcaacagctaccaaagagagagatagttctgaagcgatgccaaccgaagagcttgctggaactagcaaacaagctgcttctgtccctattgaccaatgggaaaacaatggcagacttaatgttgatactagcaatgtttttgaggacaacttgcttgattcctctcttggctcaccatgggcaagagttagcagtcatgatggttcatctggttttgattctgatcaggctgagagttctcctgatgcttccatgactgacattgctcccgttcttgatgagattgatccacttttgcgtgctgattccaatcaccccgatcctgttcctaatgatgattcagacacagattctcatgtctcagaggatcatcaaattgacgatgatagtaatgatgagggtgatgacattgatgctaaagataatgtggagggggagaaggaaaatgatgggaaggaagctgcatttctttggacagcagatgatgaaaagaatctgatggatcttggatattctgagatagaaaggaaccgcaggttggaaattttgatggctagacgaagatcctggaagaacatggcatttgaaatcgataacaacttgatagatgttcatagttctggctctggtacaagtttagatgatttgtcacgcttccgtgcacaggtacctcctattgcagtgcccaggaggaacccttttgaccttccatatgattctgaagaagcagcaattcctggctcagctccttcaatactgcatgcacggaagaacccgtttgaccttccccttgaacagtcaaatgacagtgttgttgtccatgcacatgatattttaaactctggagaacctgcgacttctcgtcgtgacatgatctttagaaggcatgaaagcttcaactttggaaggatggatgtgatccaggagaagcgtttttctagactcaagccatattttgttcctgaaactgtggaatggaatgcaagcaatttcgaaagacagttcaatgataagtctgagtctaagatgagctctgttactaaatctgatattgcttcttcagttgctgatcaggaggatcataaggaccaagatgaaaaggaccttgcagatgttggaagtgaatgctcagatggtatcaactccatagatgttgaactagaccacagtgacatcgatgaccgtgagattgctctacagcaatttgtctttgaaagagcacaagaaagggaagcacatcttgtttcaactaaaggaaaaggacgtgaagaagattatgcaccagaatcagctgggagttcaacgatgccatttcatgcagtccctgacctgcttagctgggaagatggagatggtgacaacagccttggtgctaaaccttctttccagcttaacacagaagttaaatgctcagaatgggtttcttcttccaggccacccgtggagggagaatctgattctggggatcttccagagtaccttgatactgaagttgcatcaagctcaaacacagccatacttggtgcaaacaatgcagctgagaaaggtggaaatgttgatcgcatgtcatattcaaacgatgaaatgcctttagataacctgattcatcggtctatggagctgccttctgaatttttcactgaaacattgccagtcatatctagggacctacaccctatcccagaggagagagttgttgagaacttcaacgtgcaagaaaatcatgaagcagcaatttttactgattcagttgttgccttgactgggttgcatgtaattgaagagcactttgatgatggaactgacagaactctaagctctgaagttgtttcctcatatcctcgagctaatggtgtcacccaatctccatcaagtgagcatgcagaaatcttgaatccatttgttttgatggctgctgaacataataaggtggatataagcgacatgcatggtgaagcaactgccggatatctacttgattctgatgatgaggctggtaaaatctatcctgagcctatggaaggcagtggaattgatgaaagtttcctgtctgaattggatgtggtgggagactttggagttgaaccgatgagactggaccagcaggtgacagatcaggcttctcatggtgataacactaccgatagtgttactgcagattctgttattagtcctcagacatctgacgatgtctccttgatcatgtcggaagttggtgctgaagaatccagggagcagtctccattggttgatgacctaaatggctccgaattatattaagaagaaaaaaatgtttggaatcataaacacacacaaaaacattcacacagcaaactcagattacatgcacaccttgactaagtttagaacagtaaaaaaggaactcggactagacctctgatctccatttgatatgctgtattggtttaatcacaaatacatgatcttcatatgactcccctaagaatgagcacttacaacttctcgtgatgctataaggacgcacttacagatttttgcgtaaacaacgagcatcctagttgtgttttttaccagcaggcgctgctactcctgtcatacttcaaccatttgtattcacatggtcttaatggtttgatgacagctatcctgttgttttgttcttatctaaaacacagtcacgcttctgtcttgcattgtaatcgtatttttctgacacttgtgaacttggttgctcaggttcatgttgtctctgctaaatatgtagtgaagtgcgataatgatacttttgtgagacttgattcagtagtcattgaaattaagaaggtaccaggtgggagaaagactttacatggggagtatgaatatacaacacaagccacgacgccatgggaaacaggctgtaacctatgaggtcaagcttatggaatgtttgccatagcagttattacatttcattcttcaaacaccaccttaacatttctta

SEQ ID NO: 26558 - DNA, 1254 bp, Zea Mays
gcgcttttgtggacgacgccgtcgtcgccaggcagcttgcatgtggctctgcgctgcgcccttgtcttcctcttcctccccactccgcatctccagaaaattccgttattttactcccagtatttagcctcgacgattgctcgggactctctttacaggtcctatttcgcggtttcctcatcctcctaatcctaacctccttccctgttttattcttcctcgtcgagcctgattcccctgccgccaccgcggccagcgccgccctcgccgccggtcgccaccgccgccgccaccgtccactcctcgccctcacctaatctcactcggagggagaaaaaaaaaacctcgccctcgccgccgggttgagttgaatctgtggtcgctgggttgaattgaatcgatttagatccgtttatccctagttcgggtgcccgtgttctggaaggtggaagctttggttgggttttctcttccagagcattaatgtttctgagggcctaagatgctctatttgaagcagcccacgaggagctgagtctttgtgttttttttatcgttctctctcgtcgtctgttgatctgatcggatggaggctatgacgggtggcaaattccttcaaaagtttcgactctacgaaaccagatcgaaattttatcttattggaagagacaagagcaggattcactggagggtgctaaaaattgatcggttggagtccactgagctgggtgtcgatgaggatccaactatttacacggaaagtgaatgtcaagaactgctttggcggatccatgaggggaacatgttgactggtggactgaaatttgtcacaaaatgttacggaatagttggttttgtaaagtttcttggtccttattacatggttataataaccagtagaaggaaaatcggcacaatatgcggccatgaaatttattccgtcggcaagagtgaaatgattgcaatttcaagtgttacagtctggcccaacgtggcttattctagggacgagaacagatataagcgccttctttgctcagttgacctttcgaaggatttcttcttcagctactcttacaacatcatgcgcagccttcagaagaacataacccagaagaatactgggcaggctgtttatgaaccaatgtgtgtatggaatgaatttctgacacgagcaattcggaatcatctcaagaatacatgttggactgttgccttagtccatggattttttaaacaggcctggtgcagtgg

SEQ ID NO: 26559 - DNA, 4988 bp, Zea Mays
ctcgaactcgcctttcttctgcctcgcaaatcaaatcaaaacgggctagcacctctgtctgtcagcagcaccatcggtctcctctacgacaaaaacagatcttctatcaccagcaatcagcaacaccatccgctattcctgcattccctgcccgacggagctgcttccctccttgctgtgctgttctgggctgtgcttgttctagagtctactccaccactgcggcgacctcgcgctcgttgtcgattccagctccatgcgcccttgatttattttacttgtgttttctccagtccgtagcgtctttatcagttgcttgccttctgcagaggaaaaaagaaaaaaaaagagtcagctttgttactgcatcttcagcttgttcatttcgctctagtctggaaatattcatccaagatctctccatcttctccactcacaaagtaagaggaagcacaaaccactgcaatttcatggcagactttgctctcactggcttaaggtggacagcagctccgattgtcaaagagcttcttactaaagcttcagcttacctcagtgtggacatggtgcgcgagatccaacaactggaagccactgtcctgccacagttcgagctgataattcaagcggcccagaagagcccccacaggggcatgctggaggcatggctccggcgtctcaaagaagcctattatgatgccgaggatctgctggacgagcatgagtactatgtccttaaggccaaggccaagagctcctcccctgcaagtactgttatgaagccctttcataatgctatgagcagggcacgcaactttctccctcagaagagaaggctaattagcaagatgagcgagcttaaagctatcctgacagaagcccagcagcttcgagatcttcttagtttgccacatggcaataccgtcgagtggccaactgtagcagctaccgttgttcccacaacaacatcatatcccacttcaaaggttttcggccgtgatcgagatcgtgaccgtatagttgatttccttctcggcaagacaacaactgctgaggcaagctcagccaagtactcgggtttggccattgttggaattggaggaatggggaagtccaccatagcacagtatgtctataatgacgagaggattgaaaaatgctttgatgtcaggatgtggatctgcatctcacgcaaacttgatgtgcatcgtcacacaagagagatcatcgagtccgcaaaaaatggggagtgcccacgtgttgataatctcaatactctccagcgcaaattaagtgacatactacaacagtcacagaaattcctgcttgtcttggatgatgtttggtttgaaaaatctgatagtgagactgagtgggcggaattccttgctccattagtctctaaacagtcagggagcaaagttttggtgacttctcgatgtgaaacacttccggctgctgtttgctgtgaacaagtcgttcatttggaaaacatggatgatactgagtttttgaatctctttaaacaccatgctttctctggagcagaaatcaaggaccaactgttacgcacgaagctggaacacactgcagaggagattgctaaaaggcttggacaatgtcctttagcagcaaaagttatgggttcccgattgtgcaggaaaaaggatattgctgaatggaaagctgctctaaagcttggagatttgagtcatcccttcacatctctgttgtggagttatgagaagttagatccacgtttgcagagatgcttcttgtattgcagtttgtttccaaaaggtcatagatatcaatctgatgaattggttcacctctgggtggcagaaggatttgttggttcatgcaattggagtaggagaacattggaagagattgggatggattacttcaatgatatggtctctgggtctttcttccaattggtttctaaaggatgttattcgtactataccatgcacgacatccttcatgatttggcagagtcactctctagagaagactgcttcagattagaagatgataatgtgacagaaataccatgcactgttcgacatctatctgttcgtgttgaaagtatgcaaaagcataagcaaattatctacaagctacatcatttacgcactgttatctgcattgatcgactaatggataatgcaagtattattttttatcagatgctatggaacatgaagaagttgcgtgtattgtctttgtcatttgccaacagcaggaagttgccagaatctattggtgagctgaagcaccttcggtatttggacctcgccagaacatcagtttctgaattgcctagatcattatgtactctctaccacttacaattactttcgttaaactacatggcggagaggttgcctgacaaactttgcaatttaagtaagctacgacatctaagagtgaacaacaatcaaattcccaacattggcaagcttacttcattacaacgaatagagatattttccgtgcaaaagaagcaaggatatgagttgcaacaactgaagtacttgaatgagcttggtggcagtttaagcgtacaaaatcttgagaatgtcatcggaaaggatgaagccttagagtcgaagctatatctgaaaagtcgccttaaagagttgacacttgtgtggagttctgataatggcatggatgcaatggatattctgcatttggatattctagaaggtctgagaccgccaccccaattgagtaaactcacaatcgaaggctacaaatctagcacatatcctgggtggttacttgagcgatcctattttgagaatttagaaagttttgagctcaataattgcagtttgctagcagtcctaccaccagatacagagctccttcggcattgctctaggctgcatataaaaaatgttccaaaattgaaggaactaccgtatcttccagcaggccttacagagttgtcaatttgtaggtgtccattacttatgtttatcaccaacaaggagctaggacaacatgacttgagggaaaatataatgaaggcagacgacctgtcgtctaaacttgcatcgatgtgggaggtggattcaagatcacatgttacgagcgtactgtcggaagactattcatttctgaagcagttgatgacattgatgatggatgatgatatatcaaagcatcttcaaattattgaaagtggtctagaggaaggaggagatgaagtatggatgaaagaaaacatcatcaaggcatggctcttttgccatgagcagaggataagattcatttatggaaggaccatggagatgtcactggttctaccgtcaggactctataaactttctctttcttcatgcattattacagatgaagctttagctatttgcctcagtggcctcacttcactgagaactttggaattgaaatataatatgacattaactacacttccgtcagaagaggcgtttcaacaaatgacaaagctgaagtgcttcgctataagtggttgttggtgtctcaaatcactggggggattacatgctgctccatctctttcggctcttgattgttgggattgtccttctttagagctagcacgtggagccgaactaatgccattgaaccttgctagctaccttgacatccagggctgcattcttgcagccgattcattcactaattatgtgccagacctgaaacaacttaccattattaactgcagatgctccccatccttatcgattggccacctgacctcccttgaatcattacaactaattggtctccctgatctttactttgttgaaggcttgtcttccctgcaccttaagcgcctaaagttaggagatgttgcaaaccttactgccaagtgcttctcacagtttcgtgtcatggaatcgctcaccgttagtagctccgtattgctcaaccagatgctcatggctgaagggtttatggtcccaccaaatcttgaattcttatattgcaaggagccgtcgattttatttgaagagcctgcaaatctctcatctgtcaagtgcctgaatttttcgttatgtgaaaccgagtccctgccaagaaatctaaaatctctatcaagtctggagagtctcgagatagggttttgccccaacatagcatctttaccagatctgccgtcctccctcgagcgcataactatatgggagtgccctgtcttgaagaagaactgccaagaacctgatggagaaagctggccaaagatttcacgcatccgtcggaaggacataggcttccaatattttatttaggaaacatttcatgttgtaaacaggcacctcgagctcaaggtcaccccgtcaccactcgccgccctcatcttctacagagtcggcaccgaactaggtacttagcacccaggccagctacctgcgtccataataggctctgcatttatgggggccctacattgtttatgccgcccacttctgctgcagaaacagtctgaatatgggcttttccaaccagccaatccagagaacagggctagcccaagacagctgtatgggctgagcagaattctgccgagtttatcaccaagaatgatcaatcccttgtcgctgaatgaatcaagttcatttttccgagaattaattttggtatccaaatctaagttcatggaattcataccagtgatatattgtaaaggtagcaccctcactgtcgacggtggccttgtactgcattgaatttgggtgtttatgccacattttcatagttgtgacaatagtgtagaacaggttggtagcaggccttaaaaactgattagcataatcaaatgaatatggttatagatggggtttgacctgagctcaaaaatatattgttgaccctaattagggtttctactgcgtcattagttttactcctcttgcaagactacgttctgtaaacattccatattatagtgaaggtttcgcttggttggtgcctatgtttttcctttt

SEQ ID NO: 26560 - DNA, 3052 bp, Zea Mays
cccaaaataaataccgtcactagtagatggtgctcatcttcgtgcgcctgatcgcgttcacgctgttcgtgatctggcgcatctcgcaccgcaacccggacgcgctgtggctgtgggtgacgtcgatcgcgggcgagttctggttcggcttctcgtggctgctggaccagctgccgaagctgaacccgatcaaccgcgtgccggacctgggggcgctgcggcagcggttcgaccgcgccgacgggacgtcgcggctgccggggctggacatcttcgtgaccacggcggacccgttcaaggagccgatcctgagcacggccaactccatcctctccatcctggccgccgactaccccgtggagcgcaacacgtgctacctctccgacgactcgggcatgctgctcacgtacgaggccatggcggaggccgccaagttcgccaccgtctgggtgcccttctgccgcaagcacggcatcgagccgcgcggccccgagagctacttcgagctcaagtcccacccctacatgggccgctcccaggaggacttcgtcaacgaccgccgccgcgtgcgcagggactacgacgagttcaaggcgcgcatcaacgggctggagaacgacatcaggcagcgctccgacgcctacaacgccgccagggggctcaaggacggcgagcccagggctacgtggatggccgacggcacacagtgggagggcacctgggttgagccgtccgagaaccaccgcaagggcgaccatgccggcatcgtcctggtgcttctgaaccacccgagccacagccgtcagctcgggccgccggcgagcgcggacaacccgctggacttgagcatggtggacgtgcggctccccatgctggtgtacgtctcccgcgagaagcggcccgggcacaaccaccagaagaaggccggcgccatgaacgcgctgacccggtgctccgccgtgctctccaactcgcccttcatcctgaacctggactgcgaccactacatcaacaactcgcaggcgctgcgcgcgggcatctgcttcatgctcgggcgggacagcgacacggtggcgttcgtccagttcccgcagcgcttcgagggcgtggaccccacggacctgtacgccaaccacaaccgcatcttcttcgacggcacgctccgggcgctggacggcatgcagggccccatctacgtcggcacgggctgcctgttccgccgcatcacgctctacggcttcgacccgccgcggatcaacgtgggcgggccgtgcttcccgtcgctgggcggcatgttcgccaagaccaagtacgagaagcctgggctggagctcaccaccaaggccgccgtggccaagggcaagcacggcttcctgcccatgcccaagaagtcgtacggcaagtcggacgcgttcgcggacaccatcccgatggcgtcgcacccgtcgccgttcgcggccgcggccgccgtcgtggcggaagaggcgaccatcgccgaggcagtggcggtgtgcgcggcggcgtacgagaagaagaccgggtggggcagcgacatcgggtgggtgtacggcacggtgacggaggacgtggtgacggggtaccggatgcacatcaaggggtggcgctcccgctactgctccatctacccgcacgccttcatcggcaccgcccccatcaacctgacggagcggctgttccaggtgctccgctggtccacgggctccctggagatcttcttctcccggaacaacccgctgttcgggagcacgttcctgcacccgctgcagcgcgtggcgtacatcaacatcaccacgtacccgttcacggcgatcttcctcatcttctacaccacggtgccggcgctgtcgttcgtgacggggcacttcatcgtgcagcggcccaccaccatgttctacgtgtacctggccatcgtgctgggcacgctgctgatcctggccgtcctggaggtgaagtgggcgggcgtgaccgtgttcgagtggttccggaacgggcagttctggatgacggccagctgctccgcgtacctggccgccgtgtgccaggtgctggtgaaggtggtgttccggcgggacatctcgttcaagctgacgtcgaagcagcccgcgggggacgagaagaaggacccctacgccgacctgtacgtggtgcgctggacctggctcatggtgacgcccatcatcatcatcctcgtcaacatcatcggctccgccgtggccttcgccaaggtgctggacggcgagtggacgcactggctaaaggtggccggcggcgtcttcttcaacttctgggtgctgttccacctctaccccttcgccaagggcatcctggggaggcacggcaagacccccgtggtggtgctcgtctggtgggccttcaccttcgtcatcaccgccgtgctgtacatcaacataccccacatccacggccccggcggcaagcacggcggcgcgatcggaaagcacggcgccgcccaccatggcaagaagttcgacggctactacctctggccgtgaaggatcgatcgatcggagcagccaacccagcatcgtcatgcatgcacatacctgccctgatgatgatatggtgagccgcgaaggtgaagagagtacgttcccgttcatccatcgtccttagtgatgcccggtgattagttgatgatgaagagtgaagaagactacacaccaacccacacacatttgatcgacccagcgacgtacccgccaattttttttcttcttctttcctttttgcccgcccccttttcttcattctttttcttctagttttgtccagaaattgaaagatgtgttaagatgtgttgatttgatttagttttttaattaccgtacccgtggtaattaaattatgtacctacttatatatacattacgccgaagaggaaggatcactttgtataagaaaagagagaaatgggggatgtaggagggggggctaggggcccggctttggggtggtattcttttagcatatggaacacaataaatttaatttcattcttggaaaaaaagaa

SEQ ID NO: 26561 - DNA, 219 bp, Zea Mays
gaaagcgcgggctatggagagatggattcggcgagctggagcaaggcgcggtccgatggagaccatgtcgggcgagcgcacggctgctgcttgctgctgggaaaacggcgcacacaggaaagctccacggcgcgcgaccatggtgagctggagctgggcacacggcgctgggggttggagcagggacgccgagctgggaagaagacgaggcaaggccga

SEQ ID NO: 26562 - DNA, 1761 bp, Zea Mays
aattcaccctcaccccttcggctattcctcgcccccttcccttctcgaggattcgcgtaatcgtcaccatgcgccgcccgtggaggcactcgggcccagggtccgccgtcgcggcgcgccacggcgccgcggacctctgcctccgcgaggtcggggacctcctgccgcgacgcttcgcccgccgcgcggccggttccgaggaccttgtaatgcggctccagattcaccggaagcttgacaggcacacgggctgcgtcaacacagtgggcttcaatgaggtcggtgacaccctcatatcggggtctgatgatcagaaggcacggttcatgccctgctcagacgatcggaccattgtcacttgtgctgctgatggcgaggtgaggcttgccaagatacaggatgctggagacgtgtccacaacattgcttggtgaacatgagggaagggctcacaatttggctatagagcctggtagtccttacattttctacagctgtggtgaggaaggctttgttcaacattttgatctcagaacaaacacagcctcaaaactatttctttgcagaaactccactaaatcagtatactcatctcttgttcacctaaatgcgcttgcaatagatccgaggaacccaaatctttttgttgttggaggaagcgatgcatatgctcgtgtgtatgacattcgcaagtgcaagtgggatggatcatctgattttagtcacgcatctgactgctattgcccaccacatcttgttgacaataagagtgttggaataacagggattgcattctctcacctgagtgagttgcttgtatcttacaatgaagagaatatttacctattctctaaggatggagggctgggacctgaccccaaaaaatctgttaggattggagcaattgaagggtgcaaatcaacaatgctagcatctggacatgatgtttctcaacctgcacctcagacatacgtcggtcatgttaatcgtgaaacggtgaagcgtgtgtctttcattgggccaaatgatgaatatgttgccagtgggtcagactgtggccggatctttatttggagaaagggagatgggaagtttctacgagccatggagggtgatgagtgcattgtgaattgcattgagcctcatcctcatgctatggcaatcgcgagctgtggaattgataatgatgtaaaagtttggactccctctgcgattgagcgggcacctatgatacatgttgatgagctccagttgagacctcgcaagagaagagccaagctctggcgctttggcatacgagacctgttgatccaacagatactggtatcggaaaataggcaacagtcagctgaagaaggctcatcagaggaccatgaggacaacatagaattacttgatctagtgctacaggctgcagttgaaggtgtatcatcatcatcagacgaggaggaggaggacgacgacgacggcgataatgaggaggcggcggcctctgatggctctgaatagtagtcaaccgatctttcagggttgtttcaaattgtaaatatacaataataagccatcactcttctcatgtattatataatagaactatgatttattagcttgtcatttctatgttataaatctgcttttagtatgctactttaatgaaaaaattgggctaaccaaattgtgtgctatgttatgaaaatctgaaatggtgttgcgtcatatatttaattgtctgaccaaaaaaactttgtggttcatccctggg

SEQ ID NO: 26563 - DNA, 3104 bp, Zea Mays
aaggaggagaaagcggcgaggtgggggagagataacctaccaattaggtcattcgtatccacaaccttcaacgatctcgatccatccatggaggatgtggcgcaatctgttgaaaccgagctcacgggctaggccaactggactcccgacaccgccgacgcaacccaaggatcacccaaaacttccacctcagaccccaaccccctccatggccccataactagagaaacaacaacactacgtccctacgaaacgcaagcaagccatagaaaggatggaacttgcttttctctttttttgaaacatgggattcctgcagtctgctctttaccgtgtccacggcaccatcctccgccgtcgggtgtagccgtctagcctatgcttacctttcagctgagtgaccaaacactgcaccctttcgatcatgcttccttccaaggcacagcccgactgtcagctgtccgctgcccaccgcgtgcgctgcgctcccgtgcggcactgccggcggcgcgaccccgcgcccattggacgagcttccgccccgccccgatcgatcccgccgccatgtcgtcggcggccgtgtcgtcctcttcctccaccttcttcctcgcgctcgcctccgcctcccccgggggccgcaggcgggctagggtcggctcctcgccgttccacaccggcgccagcctgagtttcgcgttctgggcgccaccgtcgccgccgcgcgcgccccgggacgcagcgctggtgcgcgctgaggctgaggccgggggcaaggacgcgccgccggagaggagcggcgacgccgccaggttgccccgcgctcggcgcaatgcggtctccaaacggagggatcctcttcagccggtcggccggtacggctccgcgacgggaaacacggccaggaccggcgccgcgtcctgccagaacgccgcattggcggacgttgagatcaagtccatcgtcgccgcgccgccgacgagcatagtgaagttcccagcgccgggctacaggatgatccttccctctggggacatagcgccggagactgtcctcccagccccgaagccactgcatgaatcgcctgcggtaaactccgtgccgccggtttccattcccaatcctgacaccgatggtattgctgcgcttgctgaaaagaaatatgcacaggttgacggagattcaaatggaattgcacctcctacagttgagccattagtacaggaggccacttgggatttcaagaaatacatcggttttgacgagcctgacgaagcgaaggatgattccagggttggtgcagatgatgctggttcttttgaacattatggggacaatgattctgggcctttggccggggagaatgttatgaacgtgatcgtggtggctgctgaatgttctccatggtgcaaaacaggtggtcttggagatgttgtgggagctttacccaaggctttagcgagaagaggacatcgtgttatggttgtggtaccaaggtatggggactatgtggaagcctttgatatgggaatccggaaatactacaaagctgcaggacaggacctagaagtgaactatttccatgcatttattgatggagtcgactttgtgttcattgatgcccctcttttccggcaccgtcaagatgacatatatgggggaagtaggcaggaaatcatgaagcgcatgattttgttttgcaaggttgctgttgagggccgtggtcctgtagatgaattcccgtacatggacttgcctgaacactaccttcaacatttcgagctgtacgatcccgtcggtggcgagcacgccaacatctttgccgcgggtctgaagatggcagaccgggtggtgactgtcagccgcggctacctgtgggagctgaagacagtggaaggcggctggggcctccacgacatcatccgttctaacgactggaagatcaatggcatcgtgaacggcatcgaccaccaggagtggaaccccaaggtggacgtgcacctgcggtcggacggctacaccaactactccctcgagacactcgacgctggaaagcggcagtgcaaggcggccctgcagcgggagctgggcctggaagtgcgcgacgacgtgccgctgctcggcttcatcgggcgtctggatggacagaagggcgtggacatcatcggggacgcgatgccgtggatcgcggggcaggacgtgcagctggtgatgctgggcaccgggcgcgccgacctggaacgaatgctgcagcacttggagcgggagcatcccaacaaggtgcgcgggtgggtcgggttctcggtgcctatggcgcatcgcatcacggcgggcgccgacgtgctggtgatgccctcccgcttcgagccctgcgggctgaaccagctctacgcgatggcatacggcaccgtccctgtggtgcacgccgtgggcgggctcagggacaccgtggcgccgttcgacccgttcagcgacgccgggctcgggtggacttttgaccgcgccgaggccaacaagctgatcgaggcgctcaggcactgcctcgacacgtaccggaactacgaggagagctggaagagtctccaggcgcgcggcatgtcgcaggacctcagctgggaccacgcggctgagctctacgaggacgtccttgtcaaggccaagtaccagtggtgaaccctccgccctccgcatcaatatcttcggtttgatcccattgtacatcgcgcgtttgacggtctcggtgaagaacttcatatgcagtgacgcgccgctggggtcggtagcagtactatgggattgcattgagctgtgtcactatgtgctttcgacaggacagtagtgaaggttgtatgcaagtttattttttttttcattactgatatttggaatgtcaacacaataaatgaagctactatgtgtttcgtaagtataatgttacttatttaggtgatacttcattcaagttcagagatttttttattgttagatcaaattacagcagtgaaggttgtatgcaagtttagttttttttttcattactgatatttggaatgtcaacacaataaatgaagttactatgtcttttgtaagtataatgttacttattt

SEQ ID NO: 26564 - DNA, 3830 bp, Zea Mays
ccaacaacgaagaagccaacaccacggtgataatgaacttcgtttatcttgccattggagccgggcttgcttcaacatttcaggtatcatgttggataattaccggagaaagacaagcagcacgaatcagagccttgtatctcaaggcaattctaagacaggatattgcattctttgacatggaaatgagcactgggcaagtggttgagaggatggcaggggatacattcctaattcaagatgccatcggagaaaaggttgggaagtccatacaacttctttctacttttattggtggctttattattgcatttgtaaaaggatggctcttggcccttgttatgctctcaagcattcctccaatcgccatcgctggtgcgattgtgtcaaggctgatgacaagactctccactcgcatgcaagcaaaatatggtgatgctgggaatgttgtcgaacagatgcttggagctattagaacggttgtgtcgttcaatggtgagaagcaggctataagaacatataacaagttcatacgaaaagcatatgaatctgctctacaagaaggtgctgtaaatggacttggactaggttccgtaatggcagtcttgttttgcagctatggcttggccgtttggtatggatctagactgatagttgagcgaggatacaatggtggcatggttatctctgtcataatggctgtcatgattggcgcaatgtccttaggtcaggcaacaccatcagtaacagcttttgctgaaggtcaaggagcagcatatagaatgttcaagacaattgaacggaaaccagatattgatatatatgataccacaggtgtcatattggaggacataaagggtgacattgaactgaaggatgtgtacttcagctatcctactaggtctgaacatttggtatttgatggattctcgctgcaagtaccaaatggcacaactatggccctagtgggggagagtggcagtgggaagtccaccgtgatcagtttggtggagagattctacgacccacgggctggacaagttttgatcgacggagttgacattagaaggatgcaccttggatggataagaggaaaaattggtctcgtcagtcaagaaccagtgttgttctcaactacaatcagggaaaacattgcctatggaatggaaaattcaacacttgaagagatcaagagagcaactgagcttgcaaatgctgctaaattcatcgataagttaccaaatggtcttgacacattggttggggaacgtggaactcaactgtctggaggacagaagcagagaatagcaattgctagagcaatcgtaaagaaccctaggatcttactacttgatgaagcaactagcgcattggatatggaatctgagagggtggttcaagaagctctgaatagggtcatgctagaaaggactacgattatcgttgctcatcgcctaagcacagtgaaaaatgctgatgtgatatctgtcctacaacacgggaaggtggttgaacaaggctcacatgtagaactgatgaagaagatacctgaaggtgcttactctcagctgatacatctacaagagacacgccaaggggcagaattttcaagcgttgaccctgatattgtactaacaaatggtattggctctaggtctattaatagcaaaccaagaagccaaagtatctccaggagatcaactagtaaaggatcttcctcgtttgggcacagtggtaggcactccttccctgctccacttggtctacctgatcctatggaactcaatggatctccagatgtggaagagactgttgacaaaacgagcagagctccaaagaaagctccacttggcagactcttgtatctaaacaaaccagaagctcttgtccttgcacttggttctataactgctgcgatgcatggcgttattttcccaatatatggcacattgatctccaccgcaataaaggtgttctatgagccacctgcagaactactgaaggactcgaggttctgggcaagcatgttcgttgcgttgggtgcttgtgcatttgttctgattccagtagagtatttcctattcggattagctggtgggaagcttgtggagcgcgtacgatcactgacattccaaagtttaatgcgccaagagattagctggtttgatgaacctgaacactcaagtggatcaattggtgcaagactatcaaccgatgccatgaacgttaagcggcttgttggggacaatttagcactcaatgtgcagactttatcaactgtcatatcaggcttcacaatagcaacagttgcaaactggaagctggcactgatcatcactgtggtggttccctttgtgggtttccaaggctatgctcagatgaagttccttaaaggtctcaacagaaacgcgaagctcaagtatgaggaagcaagccaagtggccactgacgcggtcggcggcatcagaaccgtagcgtcgttttctggcgagaagaaagcggtggacgcctacgagaggaaatgtgagtctccgataaagcaagggatcagggaaggtgtcgttggtggcctggggttcgggttctcgttcctggcattctacctcacgtatgctctgtgcttctatgtcggtgccaagttcgttgagcaagggacggcgacgtttcctcaggtgttcagggtcttctttgtattggttctagccaccagtgggatctcgcgaacaagcgcagttggcgcggatagcaccaaggccaatgatgcggccgcgtctgtcttggaaatcctcgatcgaaagtctaagatcgactacagctgcgaggagggcatcaccatcgcaggcgtgagcgtcaggggggagatcgacttccagaacgtgtgcttcaagtatccgctacggccaaatgttcagatcttcaaggatctgtcactaagcattccttctggaaagactgttgcactggtcggggagagcggcagcgggaagtccaccgcgatcgcactgctcgaaaggttctacgatccagactcgggtaaggtcctcttcgacggcgtggagctccgagccctcagagtcagctggctccggcagcaggtcgggctggtctcgcaagagccagtgctgttcaacgacaccatccgcgccaacatagcctacgggaagcagggggaggcgtcggaagaggagatcgtcgccgctgccggagcagccaacgcgcaccagttcgtatcggctctgcccgacgggtacagcacccttgtcggcgagagaggcatccagctgtccggtggccagaagcagcgcgtcgccatcgccagggccgtcgtcaaggaccccaaggtgctcctgctggacgaggcgaccagcgcgctggatgccgagtcggagcgggtcgtgcaggaggcgctggaccaggcggtggtcggtaggaccacggtggtggtagcgcatcgcctgtccaccgtcagaggcgcggacgtcatcgctgtcctcaagaacggggcagtcgccgagaaaggcaggcatgaagacctgatgcgggtgaagggtggaacctatgcttcgcttgttgagctaagctctacttcttcgtgatccccaaataattaattaataaggttagatgatcctcacatggattgggaaaagaattaataaggttgctactcaaagttctacttcttagcctttaatatcaattgggcaattaccaagcttcgcttgttgatatactgaaagttcggtcatcattcaaaagttagaaaatcctcacgtggattggttacgatgtagaaaggttgctactcgaagttatacttttaagttaat

SEQ ID NO: 26565 - DNA, 812 bp, Zea Mays
atgactcgaaccttaagctcactaggataagggacacatcagcagctgaagcaagggcaggaaaggatatacaaggtataccatgggagaggatacacatagccaggcaagactaccgaaaagctaggttggaacagtataagaactatgaaaatttccctcaatcaggagagctcatggataagttgtgcaagcaagtggagaagagcagcaagtattatgagtttcagcataacactagatcagtgaagccatcaattctccattttcagtaacccattggtcatcattgtctcacaaattatcagaggttcttgacttctctgggcacattgctccggtggagaagcatcctggcagtttgctagaaggtttctctggggttcaagttagcacacttgctgtgaatgagggtttgttggtagctggtggttttcaaggagaactgattggcaaggatttggaaggatgtaatataaaattctgtgcaaggacaactttgagtgacaatgctataacaaatgccatagatatacacagatcgacaagtggaagcttgcgcattacggtatctaataacgattgcggtgttcgtgaatacgatatggagagatttcagctcttgaaccactaccgatataactggccagttaatgcctgatggagcctccacgtgagggggagtattggagtataaatgagttgcccacctttccataatcagcttaagaatttgggttgaaatgatcagtgcatgcaacttaataatatatttaatgctttgacattcattatttgcttctataacaaca

SEQ ID NO: 26566 - DNA, 135 bp, Zea Mays
tggaagaaggccctcgggccgttggattcacaaacgacgatcgggattaggcggaacataccccttcgcctatctcgaatccggaccgtggatgattgatcctgcgaccacgattgcgtatcggtccggttaagt

SEQ ID NO: 26567 - DNA, 3766 bp, Zea Mays
gtgaagcggaagcagcagcagaagcactgcgcggcattgcagcgatcgagcgggaggaatttggggcatggtggtcgccaacgccgctcggatctagaggcccgcacgggccgattggtctccgcccgcctcgtcggtgttggtgtcgttggcgtgtggagccgtctcggtgggagcagcggggagggagcggagatggcggccaacaaggggatggtggcgggctcgcacaaccgcaacgagttcgtcatgatccgccacgacggcgatgcgccgggctcggctaagcccacaaagagtgcgaatgggcaggtctgccagatttgtggtgactctgtgggtgtttcagccactggtgatgtctttgttgcctgcaatgagtgtgccttccctgtctgccgcccatgctatgagtatgagcgcaaggaggggaaccaatgctgcccccagtgcaagactagatacaagagacagaaaggtagccctcgagttcatggtgatgaggatgaggaagatgttgatgacctagacaatgaattcaactacaagcaaggcaatgggaaaggcccagagtggcaactgcaaggagatgatgctgatctgtcttcatctgctcgccatgagccacatcatcggattccacgcctgacaagcggtcaacagatatctggagagattcctgatgcttcccctgaccgtcattctatccgcagtccaacatcgagctatgttgatccaagcgtcccagttcctgtgaggattgtggacccctcgaaggacttgaattcctatgggcttaatagtgttgactggaaggaaagagttgagagctggagggttaaacaggacaaaaatatgatgcaagtgactaataaatatccagaggctagaggaggagacatggaggggactggctcaaatggagaagatatgcaaatggttgatgatgcacggctacctttgagccgtatcgtgccaatttcctcaaaccagctcaacctttaccgggtatgatagagagggagagccatcacagctggctcccattgatgtcttcgtcagtacagtggatccattgaaggaacctccactgatcacagccaacactgttttgtccattctttctgtggattaccctgttgacaaagtgtcatgctatgtttctgatgatggttcagctatgctgacttttgagtctctctcagaaaccgcagaatttgctagaaagtgggttcccttttgtaagaagcacaatattgaaccaagagctccagaattttactttgctcaaaaaatagattacctgaaggacaaaattcaaccttcatttgttaaggaaagacgcgcaatgaagagggagtatgaagaattcaaagtaagaatcaatgcccttgttgccaaagcacagaaagtgcctgaagaggggtggaccatggctgatggaactgcatggcctgggaataatcctagggaccatcctggcatgattcaggttttcttggggcacagtggtgggctcgacactgatggaaatgagttaccacgtcttgtctatgtctctcgtgaaaagagaccaggctttcagcatcacaagaaggctggtgcaatgaatgcgctgattcgtgtatctgctgtgctgacaaatggtgcctatcttctcaatgtggattgcgaccattacttcaatagcagcaaagctcttagagaagcaatgtgcttcatgatggatccggctctaggaaggaaaacttgttatgtacaatttccacagagatttgatggcattgacttgcacgatcgatatgctaatcggaacatagttttctttgatatcaacatgaaaggtctggatggcattcagggtccagtttacgtgggaacaggatgctgtttcaatagacaggctttgtatggatacgatcctgttttgactgaagctgatctggagccaaacattgttattaagagctgctgtggtagaaggaagaaaaagaacaagagttatatggatagtcaaagccgtattatgaagagaacagaatcttcagctcccatcttcaatatggaagacatcgaagagggtattgaaggttatgaggatgaaaggtcagtgcttatgtcccagaggaaattggagaaacgctttggtcagtctcctattttcattgcatccacctttatgacacaaggtggcataccaccttcaacaaacccagcttctctactaaaggaagctatccatgtcatcagttgtggatatgaggacaaaactgaatggggaaaagagattggctggatctatggttcagtaacggaggatattctgactgggtttaaaatgcatgcaaggggctggcaatcaatctactgcatgccaccacgaccttgtttcaagggttctgcaccaatcaatctttccgatcgtcttaatcaggtgctccgttgggctcttgggtcagtggaaattctgcttagtagacattgtcctatctggtatggttacaatggacgattgaagcttttggagaggctggcttacatcaacactattgtatatccaatcacatccattccgcttattgcctattgtgtgcttcccgctatctgcctccttaccaataaatttatcattcctgagattagcaattatgctgggatgttcttcattcttcttttcgcctccatttttgccactggtatattggagcttagatggagtggtgttggcattgaagattggtggagaaatgagcagttttgggttattggtggcacctctgcccatctcttcgcagtgttccagggtctgctgaaagtgttggctgggattgataccaacttcacagttacctcaaaggcatctgatgaggatggcgactttgctgagctatatgtgttcaagtggaccagtttgctcattcctccgaccactgttcttgtcattaacctggtcggaatggtggctggaatttcttatgccattaacagtggctaccaatcctggggtccgctctttggaaagctgttcttctcgatctgggtgatcctccatctctaccccttcctcaagggtctcatgggaaggcagaaccgcacaccaacaatcgtcattgtctggtccatccttcttgcatctatcttctccttgctgtgggtgaagatcgatcctttcatctccccgacacagaaagctgctgccttggggcaatgtggcgtcaactgctgatcgagacagtgactcttatttgaagaggctcaatcaagatctgccccctcgtgtaaatacctgtcacctgaggaggctagatgggaattccttttgttgtaggtgaggatggatttgcatctaagttatgcctctgttcattagcttcttccgtgccggtgctgcagcggactaagaatcacggagcctttctaccttgcatgtagcgctagccagcagcgtaagatgtgaattttgaagttttgttatgcgtgcagtttattgttttagagtaaattatcatttgtttgtgggaactgttcacacgagcttatattggcaatgctgttatttatacacaaagactacattctttggaatgtgtgcagacagtcagaacactgtaatctattagcacaactatataaggcagctgttgtatcatctctattgtttctgatgggccctggggatatgtaattgcgaatgactagcaacattatattgttggctgattatcagctgttacatgtaattcctgaaaagcatggaggattggag

SEQ ID NO: 26568 - DNA, 1722 bp, Zea Mays
aagaaagagagtcgccgaattctctgaatcggcatctgagagagttgcaggggcgccgctgtccgcgctggacggcgtgctggtgggcgtgaaggacgagatcgactgcctgccgtacccgaccacgggcgggacgcggtggctgggcgcggcgcggcgctgcgaggccgacgccgcgtgcgtcgcgcagctgcgcgcctgcggggccgtcctcgccggcaaggccaacatgcacgagctcggcgccggcaccagcggcatcaacccgcaccatgggtcgacgaggaacccgtacaacgccagcacgatcgccgggggctcctccagcggctccgccgccatcgtgtgcgccggcctctgccccgtcgcgctcggcgtcgacggaggcggctccgtccggatgccggcggcgctgtgcggcgtcgtcgggttcaagcccaccgccgggcgcctctccaacgccggcgtcctcccgctcaactggacggtcgggatgccggggatcctggcggggacggtcgaggacgcgctcatcgcgtcagtcattctcattgatcgccacgcgcgcctcgtttctttctttctttcttcagctgttattaccgaatctcatcgtttccatctgaaattctgatccatccttctcgtcttccagctactcggcgatcgtcgaccagtcccagccgtcctacttgcggccggaactgaatcttcctcagctcggctccacactctccatcggcaacatcaagctcgccagatacggaaagtggttcaatgacagcgccgaggacatcaggagctgctgcgacaaggcgctgcaggcgctgcgcgcgaactacggctggcagaccgtggacgtgaccatcccggaggtggaggagatgcggctggcgcactacgtcaccatcggctccgagtgcacgacgtcgctcgccaacaagaggtccgagatcggctgggacgcgagggtggcgctcagcgtctacggctccttcagcagcagggcgtacctgaacgcgcagcggctccggaaccgccagatgtacttccacaagcagatcttcaaggccgcggacgtcatcgtctcgccgatgaccggtgtgactgcgtacccgctgcaagacgacgcgctcagcaccggggagctcgactacataaacggagccgcgctggtccggtactccatagccggcaacttcctcggcctgccggccatcaccgtcacggtcggctacgacaggggcggcctccccatcggcctccagttcatcggcaggccgtgggccgaggccaccctcctccacgtggccttcgccacgcagcaggcgtgcgccaaggggtacaagaagccgccggtgttctacgacctcctcggcaagcaacaggactgaggtcagcgacgcgccgccgccgccggcggcgagcgagcgaggatccaccgtatatgtatccgtgggggtcgatcggaggagaagagacgtatagcagcaggacaattgttgtcatgtataccttcattctcgaatcattatcgagtatttgtcgttgactactagttcattcttgaactaaaacacggtaaataaaaaataattgaggtcgttcataatctgagaagagagaaagaaatttcactcactagcggtacatcatcagactcggcggcacaaaatcctgtccggatacatattgttgtaacaattacgcagtaaagcttct

SEQ ID NO: 26569 - DNA, 6106 bp, Zea Mays
ttcgggccgagcagcaggcggaggaggagttgcatccgtggcctcccgtgttgctcctcctcgcgcccgcgtccctattacttctccgcgtccgtgctggggcgcggcgcgcccaccgatcctgttctacctcgcgtctgcgctgcgacgttacctgctgctgtcgcccgtcggtggtggaattcgtcgcgcggatcgagccgcgggctcgattcgggcttggcgcctctgtatatatgtcggaattcgccgtagcgtgtgattaggttttgttgttcttctgtgtcggcctggtcttcgcgtgttgtgttttgttgtctggcggaggcgaatctagggtaacggtcagtcgggaatggagtcctccgacgacgggggctccgggccggcggcagggagtcccggccctccgtcggcccccgcagccgttggcggtgcgagtagcgctcctggcgcgtctggatccggcgggaagccgccggtgaagcgcgtcatgaagacgccctaccagctggaggtcctcgagaggacgtacgcagaggactcgtatcccaacgagacgaagcgggcggagctgtcggtgcagttgaacctcacagacaggcagcttcagatgtggttctgccaccgccggctcaaggaccggaaaccgccggccaagaggcagctaagggacgaggaggttagcgtcccagtcatagggccgccgccacctgtgcttccgcctccattgcctcccagcgagatgatggtggggactgtcggaacctatggtgagcagctgctgccctattccaggagagggtctggccggttatcggctgcacctaggttatctgtgccggagattgggaggaggtactatgaaccgccacaagtcatgctgcctcatatggcaccagtgcaccttatgcaagcagagcaccgggtgatcgattctgtggaagcacttataggggaacctttgagggacgatggaccagtgcttggtattgaatttgatccacttcctcctggtgcatttggagcacctatcgtccctgagcaaccgaggcagccctttcgatcatatgagaccaagatgttttctggtcccaaaaccatgaaggcagtacatgaataccagtttcttcctgagcagccaagtgatacatatgagagggcaagccagtcacacttctatgattcttcagcagaagcgtcaaacttgagggtagctccgctgtctacaggatcacgctttctccatggagttgagcaggcacctagctatacatttcacagtcaatcatctggttctagccatttgactcaacgtggcagtggcaggtcacctattgcatcggcattgacagatcatgagggggctttgtcaaatattaatgctagcacaactccaatccacggccaacttggcatccctcaagttgccggattcgaaagccccctggcatcccctgaaagattgggttatcatgatgaagatacatatcacatggacagaaagcgcaagcataatgaggaagctaagattgctagggaggttgaggctcatgaaaagagaatcagaaaggagcttgagaagcaagatctgctgaacagaaagagagaagaacaaatgcggagagaaatggagagacatgatcgtgagagacgtaaggaagaggagaggttgatgcgtgaaaggcagagggaagaagagaaattccaaagggaacaaagacgcgaacacaagcgcatggagaagtttatgcagaaacaatctatacgagctgaaaaactgagacaaagagaggagcttcgacgagagaaagaagctgcgaggcagaaggctgctaatgagagggctacagctcgtagaattgcgcgagagagtatggaactgatggaagatgagcgcttggaactattagagttggcctctcgtagtaaagggctgccctcaatggtttctcttgatagtgacacattacagcagcttgattcattcagaggaatgctggggaagttccctcctgaaactgtgagactgaaggtgcctttttcaataaaaccatgggcagcttccgaggatattattggaaaccttttgatggcttggaagttttttgttaccttcggtgatgttcttgggcttccgtcatttacgttggatgaatttgtgcaggctcttcatgattatgattcaaggcttttaggtgaattgcatgtttctctgctgaaatctgttataaaagatattgaggatgttgcccggactccttcagttgctttaggtgtaaatcagagcagttctgctaatcctggaggtggtcacccacaaattgttgaaggggcctatgcttggggcatcaacatactcaactggcagagacacttgaactttcttacatggcctgaaatattgcgccaatttggtttatgtgctggttttgggcctcagttaaagaaaagtgatgctgaaattgtccatcaccgcgatgataacgagatgtcatttccattctgcgaaatggttcagccgctgtgaaggctgctgctttaatgaaagaaagagggtatactaatcgtcgtaggtctcgacaccgtctgacacctggaacagtaaagtttgctgctttccatgtactgtcacttgaagggagcaaaggtctcacaatattggaagttgcagaaaagatccagaaatctggacttagagaccttacaacaagtaagacaccagaggcatctatatctgcggcattgtcgagagacactaagctttttgaaagaacggcaccttcgacatattgtgttaaaactccttacagaaaggacccagatgattctgaggctgtgttggcagcggcacgtgaaaaaatcagggcgtttcagaatgcgcttccggagtgtgaagaagtcgagaaggatgtggatgaggctgagagggatgatgattctgaatgtgatgatgccgatgatgatgctgatggtgatgatgtgaatattgaagacaaggatgccaagtcgccccttgttggagctcaatatggtgcacaaattacagtagttggtgacataaagaaagaatcaaacatcgtgatgaacacatcagtgccaccaagcattcagattaaatctagtgcaagtgtaccatttcatactttagacagtaaagcaagtagttcaactgatccagaggttggagatgatgctaaagacattgagatagacgaaagtaatcaaggggagtcctgggtacaggggctagctgagggtgactactgtgatcttagtgtagacgaacgcctcaatgctttggttgcacttattgccgttgctaacgagggaaattctatccgtgcaattctggaggaacgcctagaagcagcgagtgctttgaaaaaacaattgtgggctgaggcacaacttgataagaggcgtataagggatgactttactagtaagatgcagtatgattcttatgtgagtatgaaggttgatacagatcaagaaaataatgctgctgaaattacccttacaccagtgcatgaccctattaaaaacaataacggaaatgccaatttgatgaacaatggtttgcttgttgataagcagaaccagcttactactggtgatgtatatcatcagcggaatggtgcaagccgagaatcgagtactaacgcagaaagcttgtctgttcagcaatatgcttcatctgagaaaactcgatctcagttgaaatccttcataggtcacaaggcagaacagctttatgtgtacaggtctctaccacttggacaagaccggagacggaaccggtattggcagttctctgcatcttcatcatcctatgaccctggttcgggaagaatcttttttgaatctagagatggatactggagggtcattgatacatcagaggcatttgaagctttggtagcttcccttgatactcgtggcatccgcgagtcacatttgcactcaattttgcaaagtatcgagccaaccttcaaggaagctgttgagaggaaaaggtgtgctaatttagaacacccaactggacggacttcggaaaatggaagtaatgaaagtccaaattgcaacaatgaatttggaagtccatgcagtaccctttctggtgttgcttctgataatcttatggcacattcagatattttcaagatagaggttgggcgcaatgaagctgagaagaattctatctcgaaaagggcttccgtgtttctgaaatggatctggagagagtgctacagtcaccaatctacatacgccatgagatatggaaagaagcggtgtcctgagttgattcactcttgtgattattgctaccagatatacttagctgaagaaaggcactgttcttgccacaaaacattcaaacacattcacaatttcttggaacactcatcacaatgtgaagaaaaacaaagaacagatcccaattggaagatgcaaactgtggacctttctgtacccgtaggattgagattgctaaggctgctcttagctaccattgaggccttagtaccggcagaagctcttctacctttttggacggatgggtatcggaaatcttggggtgcgaagttgtattctgcatcatctgccgaagaagtcttgcagatgcttagtgtgctggaaagtgcaataaagcgagactacttatcatctaactttgaaacgacaactgagttgcttaattcaagcacacaagattttgctactcagaattcggctggaggttctggatctgccactgcacttccatgggttcctgacactactgctgctgtagccttgagattgttagacttggatgcttccatctcatacacccttcatccaaagttgggttcaaataaggagcaagaatctggagatttcatgaaacttccaccgagatatccttctatgaataagggcaaacaagaaatagaacagttcaggcctattggttttgatcaacaggatggaacgttgctacctaacagcaatggtcgtagaggtcggggaaggggaggtagaggaggcagcaggggaggtagatctcgtggtcatggtggtagggttcccagaggtattggcagctcttccaggattcagttcagggatgacaatagtatgctctatgggagagccccacgaaagaatgcacgtggtggccgcggccgtggacgtggacgtggacgtggacttcgaactgttagacctcggcaaccatccgagctcagtgccagatcaattccaaaggcaaacctattgggcagttttagcatgttaagtaagacaaatcacactggcactacgcattctcccgagagctcaggtgcagaagagtgggcctttgagaggagggaatatgtgaaggatgatgagaacaatttggtctctcaatccgatgagtctgaggaaaatgtcgaacctatgaatgaggaatatggtgagcatatttcaggctatccaagagacaattccgactccagacccgtacagatgatgggtgatgggagcgacgataatgatgaggatgctgaaggagatgagggtgaggaagatggagaggactatgaagctgaagatcctggtgatgaggatgatgacgttgagatggatggggatgatgatgtcgaggtggatgaggatgatgacattgagatggatggggatgatgacattgaagatgatgatgacgacgacggtggagatggagcagccaacggagatgaggatggaggtggtacatcatcatattcttcagagtatagtgaatgatgagtgattgaagttgtgcaggcttgtggtaaatgatgtaacagaggctttggtgggctcaccaacgctaatgctgacttgaaaaactatttaggaggttgccagttctaaactgtcttgtgtggcttgttattagatagaagccactcaacattagaagatcggccttgtgtgtatacatacataccaattatcaaaagttgaaaatgagggtcgatcagctgtctgttttatgttcagctacttttttcattgttatatattgggagcgttctctttaagacggttgacatatttctaaactcactctcaattttgattttgtagcaag

SEQ ID NO: 26570 - DNA, 1452 bp, Zea Mays
gttttcttgcgcgaaagcagccgtgcctgttttgtgttttctctaatcaacaagtttcctgggcgttacgtctcatgcgcttgtggccttttacataagcaacccccccgacctcttttccctaccctctctttcgttacctacaggctacagctcccgtctctccgccgcttgcttggaaaacgaagaaaccctcctccaccaacccaatccagctacatccgtctgggtgaactccagggccaggagcagttcgccgccttcgttcgcatcacctacgcggttcgatccaactggcaggaaggaacgtgatggccaagacgagctcgttcaagctggagcacccccttggttgtgattataatggaagtatggtgctgttgttgattggatagtaatgcgtggctgcaattatgtgcttcgactgagtgttcttccacaagtttatgttagacagtgatattcagtagttgtacatgatacaagtggctagtcaatctgtaaatccaaactgatcattggagaagaggcagtctgaggctaatcggatcagagagaagtaccctgacagaattccagtgattgttgagaaggctgagaggagtgacattcctgacatcgacaagaaaaagtacctcgtccctgctgatcttacggttggacaattcgtgtatgttgttaggaagagaatcaagctcagtgctgagaaagctatcttcatctttgtgaagaacacccttccaccaacagctgctctgatgtcttcaatctatgaagagaacaaggatgaggatggattcctctacatgacctacagtggtgagaacaccttcgggctcctctagatggctcaccacaatcgggtctgccttgcccttgcttccctactgatgccctgcctcgtgtaaataagacctgccaagcaattgtgtatattctggtttcctcgctcaactgctggaagtctaaaacctaccttatcatggacaccgtttaaattaagtaattgactggacctgaatctggggggtcctatgacctatgtcgtttacggttactggtccttgtaaatgctgtaacgaggtcaattggattcgcagtatgctattgaatccgattgctgttgccgttttattgcttgactggtgcctgcagcctgctgcttggtgtctgctgccgacagcagcagctagtggaacggctcaccgtcaggcacgagggccttatgtcgccggtgccattactgcgtttgggctctgttgctgatggcggcagagtctggatggtgatgggcgtgtcaggatgaatgcatggaatcctggttcttgcgttggcgctatatgggctggtctgttgctgctagtctgctactagcatttagtttcggctgttgttattgttctggaattttgattttggccgtatggtttgttggctgattgccaatggttg

SEQ ID NO: 26571 - DNA, 2784 bp, Zea Mays
ccgcagccatggttcgccgactcttcctccaccacgcacgccggcgcctccactctggcaccgcctcctccattcccctttctaccccaatcttcgccatttttggtgccaacaccggcgtcggcaagaccctcgtgtccgcgggcctagccactgcgctcctctcctccccctcccctgccgtctcgtccgtcgcctacctcaagccgctccagactggctaccccgttgactccgacgcgagcttcgtcttcagcaggacccccgcgctgctccgcgccttccctccctgccgagccacccgcctcatcgcctcatgccgcaccttcttccaatcacctgccgtggaggccaaggcggaatcccttcacgagagccaggagaaggtggtgacctacggagcgggtgccgcggagcagacgaaggtgctcgcgtgctgcacggcgtacgcgtggcgggagccggtgtcgccgcacctggcagcagagagggaaggaatggcggcgggggatgatgaggtcaagggttgcgtcgaacagtggctgctggaggaaggcattggggagggtggggaggtgtggaagatactggaaactgctggtggcgttgccagccccagtgcctcgggtacgctgcagtgcgacctctaccggccttttaggttacctgctattcttgttggagatggccgtcttggtggtatttcatccactttgtctgcgtatgaaactttgttgctaagagggtatgatgtgagcgcagttattttggaagatcgtgagttatcaaatgacaaattcttgctttcttacttgagaaacagggtacatgtgcttattttgccacaaattcctgaagatcctttagatgacctgactgattggttttctgagtcatcctcaatttttatttttcttaaagatgagctgcaatcatttcattctagaagaatagagaggttaaacagcatgcaaagaaaatcaaaggctttactgtggtggccttttactcagcacaatcttgtccctcaagattctgttacagtaatcgattcacgttatgattaaagacaaaatgctcatccctcaatttgatgcatgcgcaagttggtggactcaagggcctgattctaacttgcagattgaacttgcaagagatatgggctatgctgccgcaagatatggtcatgtgatgtttccagagaatgttcatgagcctgctcttcattctgcggaagttttacttggaggagttggtaaaggatgggcttctcgagtctattattcagacaatggatccactgcaattgaaattgctctgaagatggcatttcgtaaattttctcttgatcatggaattatggccagcagtgaaaatagtacaagaaatgaaagaaacattcagttgaaggtacttgctctaaatggttcctatcatggtgatactctgggtgctatggaagctcaagctccatcggcttatacatcttttcttcagcagccatggtattcaggtcggggactttttctagatcctccaactgtgtatattaaaagtgaggtctacaatatttctttgccccaatcaatgcagcatgatcctcagacatatggtgatacatgctttttttcacaagctgaagtcttttgcaagaccagggacaaaacttttgctgctgatttgtattcgtcctatataaaacagaaactatctgaattttctctatcaagtagttctgaacatcttgcagcactaattatagaaccagtaatacaaggtgcaggtggaatgctcatgatagatcctcttttccagcgagtacttgtcagtgagtgtagaagccgaaaaatacctgtcatatttgatgaggtatttacaggattctggcgtcttggtgtggagtctgcttctgagttacttggttgtttacctgatatcgcctgctatgcaaaattgatgactgggggaattataccattagctgcaaccttagcaacagaggaagtttttgaatccttcgaaagtgactctaagcttacggcgctcttacatggccattcctacactgctcatgctatgggctgtactgcagcactcaaggctatgcagtggtaccggggtccatccaccaattcaaaccttgatactgaccacatgaagctcaaggagttgtgggatggcacacttgttaagcagttgtcgtcactaccgaatgtgaaaagggtggtgtcattaggaactctgtgtgcaattgagctcaaggctgagggagctgatgctgggtacgcttcactctacgcaagttccttggtgcaacagctccgtaaagaggacgatatttacattaggcccctgggtaacgtgatatacctcatgtgcggtccatgcacaccccgagatagctgcactcgacaactcctcaaggtacaccgcaggctttgtgcgcttaattgagccggctgggaatatagttgagggcagtctgtcggagttgaacagccttgtggcaacttaagtttcaggccgtcaattgaccttcagatgttatacaatgttcattaccatcgaatctgagacgtcagacttattctgatgcagagggcgccgttcctaagctctatggtaggatgacagattagttttagacatcattagtgatgataaactatgctttgctgtgtttccaatcgatccgattgtatgtatggctccgtatgtaattttgtaggtgtatattgccgaaggttttgcgacgtttttttgcaacgaaagtttagagttgat

SEQ ID NO: 26572 - DNA, 1276 bp, Zea Mays
gcggtactacacagtttcatcacatagttgctggcggctggccggcctctttctctttctcgtttctgccccctctgcttgcccccctttcatctcaggcgtcgaagagagagagagagagagagaggagttgcaagttggtgagatggatctgttggagcggaatattaagacggagacggaggagacgcgcaaggaacaggagcgtaaggaggaggaggcggaggcggaggcggaggcgggggagaggaagacccaggagccgccgcagcaaggccagggcctcagcctctcactcgccaacggcagtggcaggtctggaatgttgccgatgtcgaacgtgtccgctaatccttcacagcttacaattttctatggcggatcagtatgtgtgtatgactcagtgccaccggaaaaggctcaagcaatcatgcttatagctgcagctgcagcggcagcggcagctaccaaaagcagtgctgcccctactagcacttctgtagcaactgggcaacctcaggttgttgctgaacctagctcgatatgcaaacttcaggctgatctccccattgccaggaggcactctcttcagcgtttccttgagaaacgccgtgacagggtcgtgagcaaagctccatacagcaccgccaagtcgtccgatggcatggagtcaccgaggattgaggtgacagcggagggcaaggcccagtaacttgaaaggtccccgcggagtcccatcggtgaaggctgacgttgtgggaaggggcagggacgcgctgttgttgccttatgttatgtggcggcggcagcgtggaaccgcactaataatgtggaccggaacctctgttaccgtcgtttgtgctgtcgcgtgctaggtttatgctgaagtggattcctttactccgcacaccgaactgtgtctgttgtacatcacgccgtgacgccggtggtctcgtctgtctgacttcgttacatggatcgtctagtagtaacggaatgcagtaccacgtgtggacatgtgtttagtgtgaaagatgatggggctttgcttgcttgtttccactaccatttcccattttggcacttaacgtttgttcttctcttcgctaccttgttctcagctcaaatggtcccacgcagatgcatgtgtagggaggttgaaaatgatagaaatacgctcagatcaccttcgttccttgcttctcttgccgtttctgttggaccaaaaataaaataaaatttcgatgtcgtcccacgcagatgcatgcggaacccc

SEQ ID NO: 26573 - DNA, 3139 bp, Zea Mays
ccaaatccgttgctctttcccccttgcccccttcccagtctccactctgagcactctcctccgctctgctcctttgctccccacggcaaaccgtaaaccctagcctgaggggcacccctgtcgcagccatgggcgccagccggaagctgcagggcgagatcgaccgcgtcctgaagaaggtccaggagggcgtcgatgtctttgacagcatctggaataaggtctacgacactgagaatgccaaccagaaggagaagttcgaggcggacctcaagaaggagatcaagaagctgcagcggtacagggaccagatcaagacgtggattcagtccagcgagatcaaggacaagaaggctctgatggatgctcgaaagcagattgaacgagagatggaacgatttaaagtatgtgagaaggaaacaaaaactaaggccttctcaaaagaagggttaggtcagcaaccaaaaacagatcccaaagaaaaggccaaagctgaaacaagagactggcttaataatgtggttagcgatttggaaagccagattgataacttcgaagcagagattgaagggctttcaattaaaaagggaaagcaaagaccgcctcgattggtacatttagagacgtctattacgagacataaagctcatataaagaaattggagtcaatcttgcggcttttggataatgatgagttgagtcctgagcaagtcaatgatgttaaagattttcttgatgactatgttgaacgtaatcaggaagactttgatgaattcagtgatgttgaggacctctatagcacattgcccatggagaaggttgaagcacttgaagacatggtttcacttgctccttctagtcttgtgaagggtgttgctcctgtttcgactactgcagttttgagcacaaagagttctgttgcaacttcacctactcagcctacagtatcaacagcttcttcacaaagtacatcacaggatcaaacagaggagacagcttcccaagaaagcaatcctgaacctacgccacaaacaccacctccaaaaggtggaaaccctggaccttcagtaccagctgtgcccattgttgtcagtactggtagtgcggctgtttctgtacctgcagaaacaattagttcccctgtgcgactaactgtacccgccacagcagccacagtgctttcttctgctattccacgaagtgctcctgagaatacacttgctgttacctcaattcctgcaaacttatctaccactttgaaggatgatgaaagcatgagtgttcctccacgacgaccatctcctgctactgaaattggaattggcaggggcataactcgaggaacaactagtcaggcattaggtacagctcccataactattggtccagtttcaggaaatggatcggttagtgcacttcctgcaataaatgacttgtccaaaataaatatattgaacactgacgagaagattaacagtgatggtctttctcagcagttggttatgcctcttggtagtaaagttcaaccccagcaggttcccaggactaatgatgcaatcggctctgattctgctaacacaaatgaaaaccctattcttggtggaagagtattttctcctccagttgtttctggggttcaatggagacctcaagctgctgctgcatttcaaaatcaaattgaaactaatcagtaccgtggaaggcctgagatttctgctgatcacagggagaagtacatacagagactgcagcaagtacagcagcaaggtggcagccttctgaatgtttcccatataactggcataaatcagaagcaatttccaacaccacagccaaatccccttctacaacagagttcctctatatcttcccaagtgaatcttgggcttggagttcaaggatcagacgcggggcatataaaaagtgaagatcaacaaattttggctgaagatgttggtgtggaatcttccgcaacaacaggagcaaataaacaaacaagtgaagatgacacaaagattccatattcgaatccttcagcacctgcagcagaaaacactcagctgcctagggatactgatctatcacctggacagcctttgcaacctggaatgccatcatctggtgttggtgttatcggccgaagaagtgtatctgatcttggtacaatcggagataaccttactggaacttctggtagttctggtcatgatcagaattattatctgcaaatgcttgaagctgcattccacaagcttccacagcccaaggactctgagcgtgctaaaacttacattccgcggcaccctgcagttacccctgctagctacccccaagttcaggcatcaattgtatcgaatcccaccttttgggaaagaattggtagcgacacattagctaccgacatgctgttctttgcgttctactaccaacagaacacatatcaacaatacttggctgctagagaactgaagaagcaatcatggagatttcaccggaggtacaatacctggttccagcggcatgtggagccacaggtcacgactgatgagtatgagcggggatcatatgtatactttgatttccatgtcactgaggatggctcaggatggtgccaaagaatcaagaatgacttcacatttgagtacaactacctggaggatgagctatcagtacaaacaaactaaagtgccatggcagtaggtctggtcaaacctttatgtccaatttgaattttgtagttctcataagagcttgttcggttgcttctggatcaaagaaggttggaggggattaaattccttctagtcaaaattgaatagaaattgatttaacccccctcaatctcctttatccagacgcaaccgaacaatgcctaaggtgactgactgactgttataatctggacccttgacaaaatctccagctgtaaactaatgtgtgaagttggatgcaccgaacatgctgaaattataatcgtgttatgccagccgaatctgtttgacgcagctgtacattgtcgttattatctggatgcgcctgaaaaatattttggatctttcttggcgcctacctgtttatttttagctaactcctggctggcgctttcgatctttctggttcgtttttttatcaaaaaaaa

SEQ ID NO: 26574 - DNA, 932 bp, Zea Mays
cgcgcacccactcgagacgacagacgaccccggaaccggcagcccgcgcgaggtcagtcaggccactccatcccgatcccgaaaccggcggcgatgcatttcttctccggcagcggcggggcccgctccggcgcactactccccaccacctccaagccgaaggcgcaccaccacctccgttccaagtcctccctctctgcgcccgcctcctcccgccgccgcgggagcctccactccgcgtccactccctactcccgccgcgccctctgcctcgccacgactgccttcgcggtgctgtttatcctggcctttctccgtctcggcttcccctcatcccgctccgccgcgctgtctgcgcccgtccgttcccgcgcgcgcctcagccgcaggcccgccttccgcctccgggactcggccgcggccgaggccgcagcggccgctgtggcgaaccggatcggacgtgaggcgcccgtggatattacgacgagggacctttacgaccggatcgagttcagcgacgtcgacggcggtgcgtggaagcaggggtgggaggtcaagtacaggggcgacgagtgggataccgagaagctcaaggtcttcgtcgcgccgcactcgcacaacgaccccgggtggatccgcaccgtcgaggagtactaccagcgccagtcgcgccacatcctcgataccatcgtcgagtccctctccaaggattcgcggaggaagttcatatgggaggagatgtcatacctggagagatggtggcgcgacgcgccgcccaaaaagcaagaggcactggctaagcttgtccgtgataggcagctcgaaatcgtgagtggtggatgggtcatgaacgatgaggcaaactcccactactttgccatcatagaacaggaagagaacacatccttttgccacaatggaggggaaagtgg

SEQ ID NO: 26575 - DNA, 214 bp, Zea Mays
gtcacagggaggaccggacttcggaggaacgaccagggcacgtgatattgggctaagtgggccaattggctattgggctgactgatgactgctgtctgttcggttttttttgtctattcgggttatgtaatataaaaaccgaaccctaacccgataaccgaatagatatgatctgtgaaccgaacccgaaaaccgaaacccgaaaaaccgacca

SEQ ID NO: 26576 - DNA, 1875 bp, Zea Mays
cagatgtggaatggttggactcacgtctgccgtggatggattcactctttatgcagatgtgctagggatatgccttctgtcttatcttctttgtaacagagatcacaacaagttaaagcctcaaggaatgctgaaagatgtgctttcctagaagatatttctgttgcgacatcaaggaccttgctgctccccgagggctgctgatctgctcaactcttgatgacctgatctgcatcgattctacaacgttcagactgcgccacgaccaagccataagaagagagaagatatggagtcgacaggaaagattttgatggagcggtatgaggtggggaggctactggggaaaggcacatttggcaaggtgcactacgcaaagaatcttgagtccaacgagagtgttgccattaagatgatggacaaggacaaagtgctcaaggccgggctttcggagcagataaggcgggagatcacaacgatgcggttggtggctcataagaacattgttgagcttcatgaggtcatggcgacgcggaacaacatctactttgtcatggagtatgtgaaaggcggagagctctttgacaagattggcaagagtggcaagctcacagaggccgctgcacacaagtacttccagcagctcattggtgcggtggattactgccacagccgaggtgtgtatcaccgggacttgaagcctgagaaccttctgttggatgagaatgagaacctcaaggtctcagattttggactgagtgcactttcagaatccaaggggcaagatggcttactccacaccacctgtgggactccagcatatgtagctccagaggtgatcagcaagacaggctatgatggggcaaagtcagacatctggtcctgtggtgttgttctatttgtactagttgctggttatcttcctttccgggccccaaacatgatggagatgtatcgcaagatacagaatggtgatttcaggtgccctagttggttttcacacaaactcaagaagctcttgtacaagatcctcgaccccagcccagacacaagaatttcagtgcagaagataaaagagtctacctggtttcgaaaaggccctgtggagacccgtacagtaaaggagaaaattctgagtgagaatgacaccacaaatgctgctccagccgttgctatgaggcgcaagaagaatgttcatgaagacgtgaagcccccgactgtcacaagcttaaacgcctttgaaattatatctttctccacaggattggacctctctggcctatttatcagaaaggagtgtaagaaggagacgcggttcacttctgataagggtgccgtgtccatcatctcgaagcttgaagatgttgcaaaagcactgaatctcagggtaaggaagaaggacaatggtgttgtcaagattcaggggaggaaggtggggaggaagggtgtcctggagttcgacactgaaatatttgagatcacggcatcctaccacctcatcgagatgaaacaaacgggcggtgattcacttgagtacaagaaactgttggaagaggacatccggccagcactgaaggacatagtctgggcctggcatggagatgaccagcaacaaaagtagtagctttggatctctcttttttgttccataaaattgttagatctttcacttcagattgattttgttcgacatgtgcgtgttcttcttactagttacattctttctgtttctgtggaccattggactgtattctgtcgtgcaataattgttgggaggcctgagtttgttagtcgttccattctgaaaactggtatctgttctgtaatggttgtccctatcaataatgaaataattgcgtttgatccttgaaaaaa

SEQ ID NO: 26577 - DNA, 1014 bp, Zea Mays
accaaacactaccttaagagtttgtgaacacttatttgctttcaatataagaggcttggtgtttagtgaatatttgttaagtggacaagttccatcggtcaaagaagttaatgatgaagaacctcttttcttcaatttgtcacttggtgcttcacgtcaaagtaagattttgtcagcggaagcaaaagatgctgcagatagaatatgccggcggttacaaatgggttctaagcttagtgagataattgagagtaaagaagatgcttgtgcattgtttgatctttacaaaaatgagcaatatctgcttatggattacaaaggaaaattttgtattgtacttaaagagggatcttctcccgaagacatgctcaaatctttgttccatgttaactatctatattggttggaaaggtatatgggtttcaaaccaagtaatgttgcttcagaatgtagacctggtggaaggcttgaagtatccctggattatgcgcagagggaattcagccatgtcaaacatgatggttctgatggtggctgggttatggatggtctgattgcaaggcccttgcccgttagaatacgaataggagatggtacttcttaggtctttgctctattaactattctcagagctacatctacatccgttgtacagttttgcttattaagttgctgatgtggttcgacaccatattcgaaaggctctcgcctgcagtttttaccctgatattaggatggaagtggttacatctctggtatattttttatcttttgacttttgaagcctgtgatagtgcagtagtgctcacaagattaagggcactcgggctgttatagagattcgagacagcagagcagatgaaggatttctaggtttgtcaatgctcagtatgcgcaccttgtgtgctcgagatcaattttactggcaatacttgtctggttagcatcgtttcgataaaattagcattacataatgttaatgcaacatgtgcgagaatgtaaaacctgtaattt

SEQ ID NO: 26578 - DNA, 216 bp, Zea Mays
ctcacccttgctgtctcacacccccacaggtcaagaacaggtaccactggatgaggcgcatggtggatgttgtgctgtgttcgtgagaggtctaggtcggcgtctcccagttgactttctggcaccaaggatggattttagtttgatccatgtttatattttaatttgtaagacttcctctatgtaataaatactctgattattgtgacattaatc

SEQ ID NO: 26579 - DNA, 1526 bp, Zea Mays
cggtacgacagttctgccaccctgcactcgcgtccgaagcaggaaaaacagggcaaggagctactttgagcccgagactgaactgaagaagatgatgatggccgaggtggccaaccacagcaagaggaaccacacggacagctacttcagtggcaaggccgtcgccgtccccgccgccgcggccaccagctcggaggagttcggcagcatgtcgtcgaagaagccgaggaatgccagccccagactcgcgcccgtatcaccaaaggagaagaaggacaagatcggcgagagggtcgcagcgctccagcagctcgtgtcaccgttcggaaagaccgacacggcttctgtcctgcaggaggcgtcggggtacatcaagttcctgcaccagcagctggaggtcctgagctccccttacatgcgcgctcctccggccgctggcgctgcgcctgaggtgagcttccgccgtccctcgtcttcgtctccactgatgagttcttgacgcaagcctgtagaaccctaaacctcgtctccatacatacatactaacatacaccatctgctatttggtgcaagaaagaaacctagtagcagcacgagatcgttgtgtaacacatgcatgtgatccaggacccccagcgctacagcctccggagccgcgggctgtgcctggtgccggtggacctgacgctgcagctgacccagagcaacggggccgacctgtgggcgccggcgcacacggccaggcgaaggtgaggactgaggaggagccggtctgtctgtccggagggaaccgcgcaagtgctgccgcgtctgcgtgcgcgccgtggagttgagtttccaggcgcctgactgacccgattcgacctcctagcaagaaactaaagcaagcgtgcgtgtccgtatcagccgccttgtattatactcctagtagtactctcgtgacctgcctggtcaggtctctctctcctagcttgttgtccgccgtttatgtgttgagcggcatgtggattagaagcctgtgtggctggctgtcagcaagcagagcggcagtttgatgcctgttccttgagatggatagtgttatcgagttcagaagaataccatgcgcgtgtgcctgatgtatgctctctctctctcgctcactgtctctctcagctgtgatggaactgaaaccgcacgttcaggcaaggcaaaacctaagtgttacaggctcgttcgccctcacatccgcaggacgaagcaacgcaggcccacactttttgaccggcagcggcaggcccctcgggccaacagagactgttccggggtccaaagaatctaactcatcatgattcatgaaccaaaatgaacaggtacaccggacgaaccttgcggatggaaaaaaacaactcccacgcgtctctctctctctctagtacagtagtaccttcttctcttctgtttcttcgatgaacttcgcacgttctcgaatgaataatagaggagcagggtgaagcaaaacccaaatcctcattcaactaggtctg

SEQ ID NO: 26580 - DNA, 428 bp, Zea Mays
agcaaatctcgtgggcgtgtagcgtacgccacctgcgtccgcgccttttccatttccaccccgatcgcattttaccctactccccgccgcctgtccctgcgctagtcgacactcgacaggctcggtttccgccctcctctcccaccgccgcgcaccgagaagatggggaagcggtggatcccgctggaggccaacccggacgtcctgaaccagttcatatgggggctgggagtccacgaggaggatgtgcagttctgcgacgtctacggccttgacgatgagctgctcgctatggtgccccagcccgttctcgccgtcctcttcctctacccgctcacctccctggacgaggagaaagaagaatcaagtgtttctgctgccacatcgacctcagcgggcaagatgccagaaattggaaagaaagtaac

SEQ ID NO: 26581 - DNA, 5028 bp, Zea Mays
ccgaaccgtcgagctcgatttttttcccgccctactctggcgcctccctcgcgctctagggtttttcaccgctctcccgttccccgctactcgcgttttgccgcaacgcgaccatggcgtggggagaggacgaggctatcggccccgacgtggcctcggcgggtcttcacgtctcggagcggatcggccgcgacgccgccgcgcagcccgacctggaggaggcccttgaagcctcgcgctacgcgtctcacccctactcctcgcaccccaaggaatggcctcctttggtggaagttgcagaaattcgtcaactccctcctatgttgattgaaagatataacacagctgctggtgaaggaacagctctttgtgggattttttctgacatacatcgggcctgggcaacagttgacaattcatttttcgtctggcattttgataaatgggatgggcagtgccaagagcataatgtcgatgagcaagcaatttgtgctgttggccttgctagggcaaagtctgggattttcattgaagccattcaataccttttagttttagcaacacctgttgagctgatacttgttggagcttgctgttctgctagtgctgatggaacagacccatacgctgagctttcattacaacctttacctgagtacatgattgccactgatggtgtcacaatgacatgcatcacatgtacagaaaagggccaaatttttctagctggtcgtgatggccatatatatgaattgcagtatacaactggttcaggttggcgtaaacgctgccgtaaagtttgtcttactactggtattggcagccttctttctaggtgggtagtgccaaacacattcaaattttcaactgttgatccaatagttgatatggtcatggatgaggagagaaatactatctatacgcgtactgagggcatgaaaatgcaattatttgatctaggagctaatggtgatggccctttgacaaaaattactgaagaaaagaacattgttgatccactggatgcaccttatggtggccggaggactaatgcaccgccaccaagaactgcacgatcaccaaaaccatcaattgtttgcatctcacctctatccgctatggaatcgaaatggctccatgctgttgttgttttatcagatgggaagagattattcctcactacatcaggtgggattggttcttcagttggattgaacagtggtctgcggaggcccacctgtttaaaaattgttgctactaggccgtccccacctctgggggttggtggcgggcttacatttggtgctgtttctgcagctggcagagttcatcctgaggacctagctttgaaagttgagtctgcgttctattctgctggtgctcttataatgtcagattcatccgctacagccatgtcatctctgctggctgtgcagaaaggttcagctgcacagctatcccttcccagtacctttggaacagcttctagagcctcccgagctctacgggaaacagtatctgctttgcctgttgagggtcgaatgctttgtgcctctgatgttttaccacttcctgacgctgcttacatgttgcagtctttgtatgctgatgtggaatgcttcacaggtttcagaaaaccttttgagaaggcatgtataaaactttgggcaaaaggagatcttcctacccagcatatcttgcctcggaggagggttgttgtattcaatactatgggtttgatggaggtaatttttaacaggcctgttgatattctaaggaaattgtttgatgggaacaccttgagatcacaaatcgaagaattctttaatcgctttggtgctggagaggctgctgcaatgtgcttaatgatagctgcgaagctactttatgctgaagatagtctgataagcaattctgtttctgagaaagccgctgaggcatttgaggaccctgggcttgttgggatgcctcaaattgctggtaccactgctttatctaatacacgaactcaggctggaggctttagtatgggccaagttgttcaagaagcagaacctttgttttctggtgcatatgaagggctttgtttgtgctcgtcaagactactttatcccatatgggagtttcctattatggtgattcgaagaccggctggtactaataaatgcgaggatggtgtaattgtttgcaggctttcagctggggccatggaaattcttgagagcaagattcattcactggaaacatttttaagatctagaagaaataagagaaggggcctttatggttatgttgccggccttggtgattctggttccatactctacaaaacagggcctattattggtcctggagggcatagcaatgggaggagtccatataactcccaaattcaagatatggaccctgcggacaaatcagcatcaaataaaaagccaaggttgctttatacatcagcagaactagccgctatggaggtgagggcaatggagtgtcttaggcggttgcttaggagatctggtgaagcactctttctgcttcaacttatttgccagcataatgttgcccgcttggctcagacactgggcaatgatttacacaagaaattagttcaattaacatttcatcagttggtatgttcagaagatggtgatcagcttgcaatgtgtcttatttctgcactcatggagtactatattggcccagagggcagaggaactgttgaagaaattagcactaaattgaaggagggttgccctagttacttcaatgaatcagattacaaatattacttggcagtggagtgccttgagagagcagcatctatggctaataaccctgatgagagagatattcttgctagagatgctttcaaccttttgactaaaattccagaatctgctgatttgagtgccatatgcaagagatttgagaacctaagattttatgaggctgtagtccggttgcctctgcagaaagctcaagcacttgactccaatgctgatattaccaatggtcaaattgatccaaggcatcatgataccataatgttgcagcgtgaacaatgctatgagattgttatgaatgctctgcgcactctcaagggcgtcgggcatagtcgaatgcaaagtgcagacaagtcatctggtgtagcaactgctgttgatccagcttctcgaaccaagtatatcaaacaaattctccaacttagtgtccaatggccagacacagttttccatgaacatctatacaagacacttattgagctcggtctggaaaatgagcttttggagtatggtggttctgatttggcttcttttctgcagagtgctggtcgtaagcatcaagaagaggttcgggcagtttcttcagttacatctggagctgctaagttgcatgatttaagtgcacctatcttgactagtcaaacaaagtatctcgagctcctagctagatactatgttcgcaagggggagcgtattgctgctgccaggatgtttttaatattggcagagagacagtgctccaattctgaagaagttccaactcttgacaagaggtatgaatatctcagagatgcagtgcttcaggccaaaagcgcaggcatagaggctgattcgtctagaaaacctattgacagtagcacagtggatttgcttgaaggcaaacttaccgtgctacgcttccaaatgcaaatcaaacaagaattggagctcatgactgcacgggttgaaaatatttcgagcagttctgaatcccctagtggtctgttccctcgtgacaacattcttgctgatgcagaggctgctaaggctgctaaggataaggcaaaagaactatcattgaatctcaagagcatcactcaactgtataatgattatgctgttccatttgagctctgggaggtttgcctggaaatgctgagcttcgctaattactctggagatgctgatagcaaaattcttcgagaaatttgggctagactccttgatgaggcacttacaaaaggtggtgttgcagaagcatgttctgtagtgaaaagagtaggctcgaaacttgatcctgcagatggagcttgtttacctttagatataatatgccttcatcttgagaaggctgcattggatagattaagttcaggagaagaattagtcggtgatgatgatgttgcaagagctcttcttggtgcatgtaaaggtcttcctgaacctgtacttgctgtgtatgatcaactgttattgaacggtgcaataataccctcactaaatctgaagttgcgcttgctgcgatcagttcttgcgatcctccgtgagtgggggatatctgtcattgcacataggcttggcaccacaagtactggggcttcaatctttcttgatggaacattttcactgaaccaaacagggactgcgaatcaaggtgctcgagataaaataattagtttggctaacagaaccaaacggagaatgtctaccgtggtttccgtgaacttgaggagaaattactatctccttattaggcaattttcagttgttcttcaagattgtaaaagaagagtcgaaggctctggattcactgcagcatgatctctattgttctgtacatatatctgcaagaacccaaggcttctttaatcattattaattagaggttattcatgacggtgtgcagccttcttttatttgacttagagccagtatggattacagagctgttgttgtggaaattgtctagctgtcttcattacttcttaataatcttttggtagatgctgttgatcctgttttacctgaatttaggaaacagctagagaactcaggcaggactttccaccagaaatacaagttggttttcatgttggaaatcgaaatttagtatgtaccatgacattgtacagttcgttagtagattatttagagtgttgtaagccttgtagcttatgtttttgttggcatcaaggtatcattcctgtagctgaaaaataaacgttatattgtcagaaatatggaattctaggttgtttttgtt

SEQ ID NO: 26582 - DNA, 3984 bp, Zea Mays
tctaattcttgcgcttttggagagtaatccagctcctattcaagatttattatgaaggaaaacgacaagtgaaacgaagctgtacgtgttcaggtgatcggataatggctagtgatcggataatggttgacactttgaccgaggacaatggtggtgatgctagatcctcatcatctgaagagatgccaagtgaccaacagagtcatcctggggattctttagctgagtggaggtcaagtgagcaagttgagaatggaacaccatccacttcaccagcatactcagacaatgatgatgatgactgtggacctaggccttctgatctttatgggaagtttacatggagaattgataatttctcccaaatcaacaagagagagctaagaagtaattcctttgatgttggtggatttaagtggtatatcttaatttacccacaaggatgtgatgtatgcaatcacctctcactctttctttgtgttgccaaccatgataagctactcccaggatggagtcactttgcgcaatttacaatagctgtaattaatagagaccctaagaaatctaagtattctgatacactgcatcggttttggaagaaagagcatgattgggggtggaaaaagtttatggaactgtcaaaattacatgatggctttattgttgaggatgttcttaccatcaaagcccaagttcaagttatcagggagaagacagaccgtccatttcgttgccttgatggccattaccgaagggaactaattagggtgtatctatcaaatgttgaacaagtttgccggcgctttattgatgaaagaagaagcaagcttagcaggttgattgaggataaactggggtggtccagtttcagtggattctggctagcaatggatccaagtgtgcgtcgacacatgacaagggaaaagactgaaactatattgaaagttatagtgaaacaattctttatagagaaagaagttacatcaaccttggtaattgactctctatatagtggacttaaggcacttgaataccagagcaagaacaaaaaggcgatacctaaactaacagagacagatgctcggagcactccaatggtacttattgatcaggacatgtttgttttggctgatgatgtaatatttctgcttgaaagagctgcattggacacactgccacaccaacatttgcccacaaaagatgataaaagttcgcaaaaccgcacaaaggatggcaactcaggtcaggagttcagcaaagattctattgagcgtgatgatagacgacttatagagctaggctggaagacattggagcttttttccttagctcatatattcagccgaatacaagtggcacatcaagaggctgtggctttgaagcgccaagaggaacttattcgtgaagaagaagaagctgggctagctgaaattgaactcaaggcaaagcgtagtgccgctgaaaaggaaaaacgtgccaagaaaaaacaggcaaaacagaagaaaaatagtcgaaaaggtaataaggggaaaagtggcaagtccaacatcaataaggaaataattatggaccacagtcattcagatgatagaatattggatgatttttgtggacaaattgaagagatgcccttaaatgctgacaaccctgaagaagtttctgatatatctgacagtagagacgataattcagacatgcttcatgttgatattgaagaccgtgaatctagccctgttaattgggagatagatgcttcagaaactcaaactactattcctggaagtagtgaggtgcaaaatgaccatgcaggaaagaggacctctactgtggatgatagctcatcgtcttgttcatctgactcagtgccttcagttactgtgaatggatcatataaaggaggtgcctggacaagcgtcagatcctcatccaataggggaaacaacaggaggaataaggatactgaagcacgggcaggatttgcacaaggtggatcatgttcatcgcataatggttttataggctctggcagcaatgcctctggccactcaaaggaaagacacgaacctgaggatgataaagttgtcttgcagaggaagcaacatgcacaatggaacattgatatcattagctcctccaagtcaagaatggcagagtcttcattttcttctgtgagctctattaagaagcaacctcaaccaaattttttgctagaaagcaccaatagtttgaatcaccgtggaagcgaagcttctggcactgtgacttccactacaacagcgggtgcctcttcaaccccggccactcagttagttttgaataaaggacctgtatccagtgctgcaacccagaatgagaagccactacctctgcaggtgcttgtaccatccaaatctgaagtgcagaagcaggcttccctaactggcagtgcaactaccgaggccgtttcagtatcaaggcccttgactgccccacaagtccctgcagcaaaacaaagtgcaccagtcacttcaacagctcagaatgcaccttttctttctcgttcaatgagtgctgttgggcggttggggaatgaaccatctgccaatgctcctagtttcgttccccgttcacgaacatatcgcaatgccatgatggagaaaagttctggtggtggaagctgtttcacacatcagcaaggttcatcggagcaagcagttgcaccatggcaatcgatgtttacatcgcaacctttcattcggccatcagagaccttgtcttggaaagaggaaacattattgagatctgggtttacatttggaactgtgaagcccgagtcactgaacccatatcagggcagagaagagaactcacagcaagcgagcagcaacagcagtgattgtgcgccatcgagttcaaacatcagaagcgagatcgagaagctgaatttgagcggaagaccacgaagcaagcaactgttgtcagaaatttcgaccagatttactccctatcagccacaaggcttggtcgctgatgagttcccacacctagacatcatcaacgacttgctggatgaggagcagagtgacagaagaagggttcttcaacctgattttgttcaacagtcctatatgcctcatggtgccagcacacctgattatggtgagccatacttgtttgaccagtccgagcaatacttcgatgaggagcctccaaggttttatagtccattgagcagtgctcctcggaggttgagggacctgagctattcgcactttgatctcccatcacactccagcagcagccagtttgatgatctgatgatgagtcagtggccatacagccgcactgacatctccatgcctagttttgggtcagacacaagtggctacccctatcaggtgtgggatctcgcgaatggatcaagcaggtacccatcgtatcgccctgccaatgggcattgagagttttaatgattgcattgacaataatgtgtggttaagtccatgatgttcgcttctgagctgagtgtaattgtaatagttccccatagcagtgatataaagaattgttcctcagtttccttgttcaatcaatagttatatgacccccctcctccctcttttctctagttcagttttgcccagtggtaataaatctaagtcggctaaaatgatctggctaatcgtgttgtgaaatgtgtatgatgcaagcaaatggtagggtgtttttaagccatgccagtgcttcagctgatactacattaaactgggagtattctttgtttctccctctgacgagtgacgacgtgttattgatcgtctcatgttctctttgtatatttcagagtaaattctggatatagcccatggacataaactaattatttgatgcacactctggacctttggggtatgttttattccattgatggatatataagctataaagtaaaatgcgacaggatcaactgcgtgttggggcagaaaaaacaatcactaaggttag

SEQ ID NO: 26583 - DNA, 1374 bp, Zea Mays
caggcaacattggaggagctgatccaccgtcgattaacgacgggaatcaatctcctcgacaccagcagggagatcgagaaggaggaggaggcgggtctacgctgcaagacgcagtcgcaatgatggctaggaactacaacgacggttgagaccagcaagaagacactgatcctccatggtaccaagactagtgctgtgttgaactctgtgctgtcagatatttaccacctaaagcgtgataatgctgtgaaatataccaagaagaatgacaacattaggccttttgaaagtggtggagaatcttctctggagtttttctctcttaaggcagactgtagccttatagtgtatggttctcattcaaagaagaggcccaacaatctgattttgggtagaacgtatgaccaccacatatatgaccttgttgaagtaggagttgagaactacaagtcaatggaatcttatgtttatgataagaagctagcaccattacttggatcgaagcctttctttgctttcataggggaacactttgagagtgctgaagagctgaaacatttgaaagaagtgctgcttgatcttttcagaggagaggtcgtagagaatctgaaccttgctggtgtggatcggatctatgtgtgcactgcaatctctcccactaccgtctacatgatgcactgtgctctccgtctaaaaaggtcaggtacatctattcctaggatggaactggtcgaagttggaccttcgatggatctggttgtaaggaggcacagacttccagctgaaagtttaaagaaagaagctatgaagaccgctgaacatgctaagaagatgaaaaacgtcactaaggatccagtgcagggcaagctgggcaaggtctacatgccagaccagcaggttggaaagttgaccttatcaaacgacataaagggactaaagagggagcgccgtgaagccaagaaaaaccaggactcaaagaagcaaaaggtcaaccccgagtaaagatcactgaagtttacctttgcattggatacaggtcaggttaagaaaccctggtttgtatctgttcccatctgctgtgttatccaattagaagttgctcgttgtcagattgtgttaaatagtttagggccatcttgttaggctaaagacatgtgtacgactttcacaacaatattgcgtaccaattcatgttaagacgtaagcatggaaaaatttgggagtgttatcctatcaaatatcttttgatgtctcaagcttggataaatgaggagggttacgataggcttggcgagccaacgttaaaggtagcaattctggagattgaaacataaaatacctaaagatttagccttgattaggaatgcatgaaaa

SEQ ID NO: 26584 - DNA, 1233 bp, Zea Mays
atggtggcggagacagcggctattggaggagaaacaccagggcaatctctgaatggtactgtgaaaagtacaacgagagcagggacatttgtgacgttgcctgatgggagtgaaggattccttcccagagaagaggaagcattagcattatttacccttatcggacaatctgcaatggaaattggtaaacagataagggttaaagtactgaatgtggcacatgttcaggccactttgataatgaaaggggtggaagatgatgaagacgatctgaagacgctaaatatggagcttaagcgggactggtccagagggactaatgcgttcgagttggcttccgtaggaacaaagagatctttgcattcttgtatcagagggaaaggaccaaagtgccggctgatacttcagtttctgctccggaagctgaaagctatcaggaggaagctgctccaaaagatgaggaaagtgggaattcaggattctacttctgtggcaaatgttgttgaggaccaaactgtaggatctgaaagttcacctacaattagtgttgaattgtcctccaacgggaccccagatagatctattgtgtctccagtttcagaaactgcagataaacctactgaacctaaagaatcttcagcggtagaagaggttcttgtaactgcaagcagcgaggcagggaaagaaccagctgctgacactgaggctgtaccagccttgagtgagaaaactggtgccgaggttgttgctactgctggagttgcacaagcaagcaccacgacatgtctgtagtaattttatcagtgagtcagcgatggtgtcccctcaaagctttcacatgcaataatctgataagccatgacttatctgcaaaagcctcttgaagaagcaactctacctaattagaatagaatagggggtgctataaatagattgcaagaaacctgttacaagctactgttttttcccagttatttttattcgaattttttgttacatggatgatagatgtttcacacattggtaccaatcattgagttctgcccgtggtagccaaaagggtggatcctgcatagatcatgaaactcaccttctaatgtattattttgatcaatcatttatccacatttgcaaatattttttctttgatttatgtttcttgtgacatgccagctgcatagttttgctcaaactatttttatatgacaaaaaacatgttacttgtgtgctggc

SEQ ID NO: 26585 - DNA, 3479 bp, Zea Mays
ggggaaggaaaggcagagaaagcggtggcgaggagcagaaaacgagggtggtttagctagctgttcgtcccgtgtcccgttccagtcctcgcccaccaccgcacgcggacaaaaccgctctccgctcctcacgacctcgccacactcctcactcgcgcacaccaccaccagtcagtccagttcccgcagtgcagcagcggccagcggctgcctaatctctccagccctttttcgtcccctagccacgccgcccaccgctgccgcgtcatccgccagtcgtcgcctgccccgcggcttccgcccccattcgccgccgaagcacgccgagccccgtcccagatcgccgccgcgcttcctgccgccgccggcgcggcgcagggttggaaatctgtttgaccactcagtgagtggcttcatgttaaatccatttctggtttcaagatgcttcatcaatgacatctggaaactgtaatagcgaagcacttcttgctttcaaaaaggcagttacaaattcagatggagtcttcctaaattggcgcgagcaagatgcagacccctgcaattggaagggtgttagatgtgatagtcatagcaagagagtgattaatctgattcttgcataccacagattagttgggcccataccaccagaaattggaaggttaaatcagttgcaaaccttgtcattgcaggggaacagtttgtatggttcactccctcctgaactggggaattgtaccaagttgcaacaactgtatctacaaggaaattacttaagtggatacatcccttcagaattcggcgaactggtggaactcgtggcattggacttatccagtaatacattgagtggatctgttccgcattctcttgataagttgtccaaacttacatcattcaatgtttccatgaacttcctgacaggagcaataccatcttctggttcacttgtcaatttcaatgagacaacgatgaggcttgtggagaaccaaaatgacgacatgattaacaaaaggaacgggaagaattctaccagacttgttataagtgcagtggcaacagtgggagctctcctattggtggctttaatgtgtttctggggttgctttctttacaaaaattttggaaagaaagatatgcgtggtttcagagttgagctctgtggaggctcttctgttgtgatgttccatggagacctcccttactcctcaaaagacatactcaagaagctagagactatggatgaagaaaatatcattggagcaggaggcttcggaactgtttataaacttgcaatggatgatggcaatgtctttgctttgaaaagaatagtgaaaacaaatgaagggctagatcggttctttgatagagaacttgagatattgggaagtgttaaacatcgttacttggtcaatcttcgtggttattgcaactctccttcatcaaaacttttgatatatgattatcttcaaggtggaagcctggatgaagtgctgcatgaaaagtctgaacagttggattgggatgcacgtattaacatcatacttggagctgcaaaaggcttgtcttacttgcatcacgattgttcgcctcgaataatacatcgtgatatcaagtcgagcaacatcttgcttgacggcagttttgaggcccgcgtatcagactttggacttgcaaagcttttagaggacgaagaatcccatatcactacaatagttgcaggaacatttggttatcttgcgccagagtatatgcagtttggcagagccaccgagaagaccgatgtctacagttttggggttctggtacttgaaatactcagcggaaagcggcctacggatgcatccttcattgagaagggattaaacattgttggatggttaaattttctggctggcgagaaccgggagagggaaatcgtcgatctgaattgtgaaggagtgcacaccgagaccttggacgctctgctctctctcgccaagcagtgtgtcagctctttgccggaggagcggccgacgatgcacagggtggtacagatgctggagtcggatgtagttacgccgtgccctagcgacttctacgattcagagtagcctcctggacggacaagccacagtggtgccgctagtttcccgtggaggcgcattcctttattctttgcagatattgtgtaaatgcattgccgcggtgtttgtttggtctcctccaatcggctggttcaacgggtgacatttttgcgtctgtgtttatctgtcatgctacaagttggctatgtgctgatttaataagagagaacttaccagtgtgtgtttaaaacattgatcttttggggttgtttggttccgaaggttaaattttagtctcatcaaatcggatgataacccaattacacacacaaaaactaagcagtaagatgagtatattaaacctaattaatctacaataaattagatttaatgaatttgtttcttagtttagttttcaactatctaattattttctaattagattatatttaatactgttaattggctattttataattagattatatttaatactgttaattggcgttcaaacataatacatacaccaaactttagaaccaaacaactcaacttcgaaatgctttaaaactgggttcgttacagacggcactgatacacgacggatgagacttcaatatcgttcggaacacagtagccacaacacacgctactcaagacagccatgataccggtacaacacagttacacggacgctggcattttatggacacccggcatgtgaagaactacccgatcgatcaacactaagacgaagacggcacaccatcggttgtgggcttgagcatactagccggagatctggatagacttgacgtcggccttcttggcctcctccttaggcacggtgacggtgagcacgccgttctccatggacgcactgatctgctccgtcctggcgttctccgtcaggcggaacctgcgcaggaacttgccgctgctgcgctccacgcggtgccaggtgtccgtcttctcctcctgctccttgcagcgctcgccgctgatctggagcacgttgccgtcctccagctccaccttcacctcctccttcttcagccccggcacgtcggtcttgaacacgtgcgcctccggcgtctccttccagtcgacgcgagcgccggcgaaggcggccgtctccgagctggtggtggtgcctccgaacgaggggaacaggctgctgctgctgctgcttccagagccgaagggaaataagccctggaaggggtcccagaggtcgagggagaaggggtcgaatgcgcttccacggcgaatcagcgacattgttgctcgagctcgagttttgagtgacgaggggggattgggattgttgttgtttcggcgactcgggtatgtgcttttcttggctgctctaggcttctagcttctgatgaggagcgtcgacgcgggagcggc

SEQ ID NO: 26586 - DNA, 4824 bp, Zea Mays
cccgctcgtgatgcccgtcccgcctccccgctgtggcagccgccttcgcgtccgtcgatccctccgtgcacagatgcgccccaaatcgcgcctcccccaccgcgctccgtgaaatccgccctcctcaacctccccgccacccagaactccctcgcacctcatccttcgcgcgatgctcgccgatgtgccgccttcaaacatcgtcgtcgtcacctcctccccctttcctaggagggcatcctcgccgatgtgtcgccttccaacatcgacaccaccgcgtccccgcaccaccctcccccgtgtgcgtccctggccccctgagctcgcgcaggccggaggaccgcgctcgcccacctgaagattgctccctcccccaaggagctggcggcgacgcggctgcgtcaggagatttgggtccaacttcacatcttattcctcttcagttctcggcagctttggaattgctcagctcagcttttcgacgccgagtctatagctgctgctcaccactgccctcggtgtctgtagtctgtccatggaatgctttcatactgcttgctactcgcagtgtcgtgctgtgcatgcctgccttcgaggcaacaaccaccgtgcatacattgtccgggtcgggctgcttcaaagatagagctaagcaggcgaggcctagaccgtccatgatggcgacaggagctcgacttcgagcgggcctccccagagatggtagccagatccggccattgagccccccctaaccgagcggatccaagatgctcctccgcagcaggaaatggtagcagcaaacggaacgggccaaccgcagctggtggtggacgaacacaagacgattcttgaagaggtccccagagaagaaaatggcaccctttctgccgccaattatgctggctgtcggccccaaattatggtacagcgcatacggaggctaaccttccattggcagcgcacagatcatccggggcggacctataagatgtcaactcaaggtcatgagaatgttgccgctgagtactacaaacaacaggtggagatgttagagggtttttagtgagatggacgcatttacatatcgtgcttttcctacctgtaatgtccaaggtatgctatatatggactttctgtttgaacattagggaaggtaacttatgtggatgttaataatcaaattttcttcactatattttttcttctttttaatagtgacgacatcaatagatatctggccactttattgacctgcaggaagaacaggaaaaagttgtcaggagtgaatcattagccatatggctgtctaatatcgcaaatatggttctctttgctgcaaaagtgtatgcttcaaaacccaattggaaaagcgtatgcagccactggaatcaaggaactagctgaggtctccttccctcaagatgacaaacaaacagaaaaaactaccctcaaggtgacctaaacacaaagggagctacataataccctacaagactagaccagcacggtgcaccgccgttctgtatgtcgctggctatgctaattgtgcagccgacccccttccatcctcagtgccctcctaccattggcggcatgggatctcggtgatggaagggcaggggcagcacaggatctactgcattttttacaacgcagtggcagacattggagacgggttcgtgtgggatgccgactcctagctctactgccacgccaggtagctgcttcctttctctctacgtgatgtagcgttccgctgattgggcaccgcagacggtctgtggttgtggatgggattatcgttttggcagaaagctggttgaagctcgtgatgaactaatgaaaggaaggtttgccgcttgcatgcgacctgtcccccctttctgttcaaaggcgttcgacaccccaccaggccgaggatgccgtgatctcctgtgcagcgcggacaatgcatgcaaccaacaccgtgggtgtgtgggtgttatagccattggattatcggattgctgctatgccgtgttttggtgtcaaattaaaactgtctttcttgcataaaaacagcttgccggttctaactcaacggggtgaaccacgtatatattctcgtgtaaggagggtgaataaactaattccctatttggatcctcctgtccacgaagccaggcaacaaagtcattaatgtcagcaccactgatcatcatctaactacattagtttacaggggttcgaaaaattttataggggtgagctgaccccaataagaacatgtagctccacccctgctcctagctaactgtttggcagtggctaacaattagtcgacaaatattaagctgacaaacaatttactgggacttgttttaattattgtctaatagacgtataaaattaaagtatagtagatagtttgttttatccctgcaagacaaacaatagtagcatatttttctttctcttctatctgctaatagttttcttttcttcagacactcttcccatatgaactttttgtgaagctctatagcaaggttgagttgcacccttttggtcttcataaccttggtaacaggtaaaagtaagagtaggaaggtcaactggcatgcatacatgtgcttgctcattatggttttatgctattggtctgggcctttgtaagatcttaagtagaagggcaggcatggtgcaatggtgagagttgtctcattgagccaccaggtcgcgggtttgaattagcctctccgcatttcaggaggaaggcttgcctcggtttatctcttccccggaccccactcatgtggttgcctccggcactggatctgccttttgtaagatcttaggtgtatgctcctagaatatgtgtgatttacttccattaaagtatgctttgtgcatattaattagaggatgacgttttggacctagacaaaataaaagtcggacggccactgtcaagcattctccaaattcgttgcttattgtgacgtgtgtgtgcttgagttaacaactaataccatccccaactcatcctcatccatatagaattgcttgaaagcatgtgagtcttcctcaaatcacatgcacccaccatatgtattagtttatgggtgttaaaaagcatgagcctaaagattggattccatagaatggtcacatctggccattcaaataagtccataacttccttttgtgatgtttgcttttgttggagcttcatgtttgaattgatgtatgtatctgactttaggccaatttatgctgggaatgcactttgtactgtgaaatataccgacgaggatccttgcatgatgagtattagatcaacttcattttcccctactgctgatgctatgtctgaaacaaaggttgcacctatcacccagggaaatctacatgggtgaatctgacatcccaagacacaaagcggcatgatcttgcaaatgcatgtgtagtagtcacaggaggcagaggtttaagaagtgctgaaaattttaagttgttggagcagcttgcggagaaatttggtgcagcagcgggcgcgactagggctgctgttgaagcaggttatgttccaaatgaccttcaggtaagcttgttagtctaccgtgagttctgtatgatctagctaattgatagttgtaatgccttcttattacaccatgcaaggatcctcgccggtatatttttacaccatgcccacttttaagaaaatgaaaacacagagttgcaggagaaggctgcagcagcttgaatctcagctaatggaagcgaacagaatcaaagaggaaggcaacactggaagtatccgatggaaggagaacatattagaccaagagaatgaattacagaacataaaacaagagaacgacgacctgcagacaaaggaatcagcggcttctgagaagattaaggaactctcttcccagcttactaatgcaaaatatggcatgataaatagtaacaccaaggagataatgagaaggggggcactgaagaggacgatgaacctgttgtagtagttgccaaaatatgggagaacaacaagtttgttgactatgattcatctaaggagaaggagaatgatggtgactcacaggttgatttggaatcaaacaagggggatgcaggtcttgatagcaacgggttgcactcaactaaggagaacagtggcagggcatcaccaactaaacaacaccagcagtataagaagaagtctctgctgaagagattcggtggtctgctaaaaaagaaaagcgaaaattagcataaaactgtctgatgatattctttgttctatcatttgacatattttttgtaaaccctctcagagatgctgaaagccaacttactattgagagtactatgaaacctctcgcgcagtgtgaaataaatgacagaaatgaagtgtgtgttggtgttggtgctggtgctggagacactaacataaccggtggtattatccaattgtattggagttctattcttgaaaggtgcttggatacaaacgatcaaagcttgaaggaggcttgagtcaattgaatcatctgtaagtaatttagaagaaatattgtttttgttggtgaagcgagtttgttctttcctttgggctctatttatttatgaattgataacccaacaggattgtagtttgtagccatttagatttgaatccgagctatgactgagacgaatacaacatatgcattttgtagccatgtatatctgaatcagagctctgtgattgagatgaatatggttttatgtgccgtcgcaacacactgacattgtactatggtattataagtatcaatatgaagtatttctttg

SEQ ID NO: 26587 - DNA, 2419 bp, Zea Mays
cgcccagccgcccagggcctaggccaccgtcagcgccgcccgcctccatctccgccccgagcggctgcgccccgcccgccgcccgcccgcagtccaccaggcgtcgagccccgccccggctcgcgcgcgtcgagcctctgtccggccccggctgcaacccactcactcagccagacctggcttctctgcagactgcaggttctcagtttctcttataacaggcatctcgagtgcaccgtcggccgcaccagcaggcagcatcccgacaccgccgttccccagcagacagcagcaggtcgccgtcgttccccagcaggcagcaacaggtcgccagcgctagtcctcgacggacgacgaccagcatcagccgccgccccagtcgaccagcatccacggcggcacgagcccacgaccagcagatcaacgcggtggcagatcaacgagcccacgactagtcagaaaatttttacagcagcatatccaccggatacccgatacccgacgggtacccggtgggcacgggtacacccttccctcccggctgtgcgaagcaactccaccctaatttattttgcagaaaaagttatcggtccgcccttggttactgaaactggtcaggtgtatgtaattttgaagtaacaaaggatttggaacccagccctctgttctccaccaccgcttcgaagatgccgcaggtaatggtggtggcacggaacttcatggatatggtggctgctcttcctgcgggcaagcttgatatgctctatgactcagcctttatctgtgaggcagtactcaggtcacttcccccactggcaaagaagtatgcactgcagatgttgtatgtgctggcaccagtgaccgctgcagcaatggaagagtgggtgcttgatgaatatgctgccaagcataaggttgccattgataagcttctacagctcagggtctttgttgaagtgcgcgacagacgacgggacgtgagctacaagatgaatcagaagttccagggaaacatgcagaagtatttggttgatggtggaagtttaccaagggaacctttaccattaagtgtcactggtcgattgcccacaccagcagatctggaagcctatgctcttgatcaatgggagtgcttcttgttgcaattgatcaattcatctcaagtcgaaaaagggtcaagttttagctcctccatgatgaagacgtttcagcgtggtcttctgagttcaagggatggtgaagcttcaaagttgactgaaaatggcttccaatttcttctgatggaaacaaatgcacaactttggtacataatgagagaatacatttcatctgctgaggaacgtggagtggaccctacggagctgatatcatttctcttggaacttagctttcataaattgggagcggcttatagcttgaacactctgactgatgtccagaggattgccatcagggatcttgcagaattaggactagtcaaacagcagcagggtcgaaaggatagctggttcattcctacccaattggctactaatctttcagcaagcttgtcagattcgtcatctaacaaagagggatttgtggttgtggagacaaactttcgaatgtatgcatactctacttccaagttgcactgtgaaattctacgcctttttgcaagggtggagtatcaacttccaaacctcatcgtaggagctgttacaaaagaaagtatctatggtgcttttgaaaatgggataactgctgagcagataatttcatttcttaggcaaaatgctcaccctcgtgttgctgacaagatacccgctgtcccggagaatgtcacagatcagattaggttgtgggaaactgacctcaacagggttgagatgattccatcgcatttgtacgaagattttcctagcaaggaatggtttgaacaatgctgtgattatgcaagggataatgggtacttgctgtgggaggaccccaagagaatgagactaattgtacgaggggagttccaccccgaaatgagggagttccttcgcaggcaaagatgaggaacgaccttgtacttgacggaccatgctatgcttctttgtagtgcatagaaacactgtatcgggtaatagttctcctttaaatatcaggaaagggtctagaaaagggctcagtttttgaattattttggtgacctgtgagctgtggaagcatatgaataatgtggtgttcaatggagcaaggcccaacatccttgatctgcttctaaatgttactagtgactgtaccctatgctggtgtatggctggtggccaggtcctgttggaactcttaggtaggtagtatggtgggatggagttggtatgctcttaatttgttgttatttggattgattctatataggacggagtgattttaaaaatgaaaaaaactcaaa

SEQ ID NO: 26588 - DNA, 5870 bp, Zea Mays
tttgctctgttatagagtagtaaaaacttcacctttggatcatttacctcactctctacaactacaagtctacaaggtaatgctcatgtaaaaaattctctttgaagggcttaacgaagagttttacagggataggcatgcaaatcctaaagctatatccgcttaaaaaaatctaggaatccgtaaacagtgtacaggtcaaaacaaaagaaagaaaaaaaactgcacacgacgtcaatcactctcactgcctctttccaccctgctgtagactgccctttctaccgttatatacccagcacaggatgtcgcgaccgatcggtttcccgagctgcagaggaattcttgcgtggatgctcgtctcttgcctagttgtttgtttcttgcagaggaattttttcctgaacttgtccccgccgtcttgaaggtttcttgtttgggagcagggcggaggcgctcctttccttcttggccgacgatggtatggactgggcagcggcgcgcgcgagcgatttttgcggcaaaccccctgcgagaaacatcgtccgcagaacacctcactttcactttttgtactcttccgtctctgccctcgcgttattgcctcgtctcgctcgcctggctggctcgtgccttgccttgctcagcgtacgcgaacgcagcgagaaggaggagcaaggaaatagagagagagagaaaaaaaaatcaagtcatccccctttcctctaagctcgttccatggagaactcttctcacaagcggacgcgggaggcggccgacctcgccgccggaggctgtggagaggagggctcgccgcaggccgacgccaagaggctgcggccgcaggacctgctcgacatgctggaggacgacaccgacacggccgcggtcggcgacctaccgtcggtcatgcggagcctgtaggaggagatagctagcttcgacgaggccgcggagacgccggcgccgacatcggggcagcagccagagctgggcttcctactcgaggcctcggacgatgagctggggttgccgccgacgggcgccgcctcctcttcgtcggaggaggctgggcgcgcgggggcaccggagcccgcgctcgacggccagatctggggcttggagggcggaggtgctcctttccttcttggccggcggcggcatggactgggcagcggctttcgggtctccgtcgtggagcgcggtggcgacggaccctggcccgaccatgctgtccttcgcaggcccgtcctcctccgccaccgacgccgaggtgcgactccaggatttcaccgtgggtcgcatggaagcggaggcgacggtcgcgagcatcacgcacggatgggggcaggcgatagcacggcatgcagacgcccaagtccagcaatgctggggcatcacgagcgggcgggggtaccgcggcgtgcgtcacggggacggggcgggcgcacgggcgggcatcgcgatgacgggtgcgggagcaggcgggggcacgcgaatcacgggagtggagccacggtggtggtggacgccctcgttagtgtcttatagagtagtagagatagagattgtaggcgtccacaattcccagtggcgcacggttctgctgtccctccatcctcccgcgctccctccgtgctacatcaacgcccgcaggttctgcctctccctgtcactacgccgcctgcccccgccgcacccctccccgttactaggtgcggcgccgcgccgcgccgcctcctcggcctcgcctccgcgctcgccgacgactcgtcctgctccgacctcctcccgctgttcccagtccccgccggctacgccgcctctgacgccgcggatccccgatgccgagagctgcccgtcgcccgctgccgtcagcagcgtcttcagtaagttccgcgacccggcgccatctcctgtgacccctgacgacgctgcggcggcgcctgacgagcccagggatcttggcttcgacgatgacgacagtttcgacgccgattctattctgtgcggcgtccaccagagcgcggccgagggcatcgatggcatcatggcttctggcaggatcagaatatcatcatcaatcaagcgctgaagcggcatagtgtcgatcctgaatggtggatgtgccctgccatacctgtgaaagacattaccccggcaccaccgccttcagtggcaatggcgaaggaagactaagaagaagtcactggggacaatatacgaggaggggactcctgagcctgccaatggcgacgacgatggagctttggcactgccagagacaggattggggcttagcttgaatactgatggggtgctcaaggcgtggtgtggcagaggctctgcgtttgctgatggcaatgggcctgacttgccattgtcccctgctcatgtggtagtaagtatttccagcttatctaaagatataaaagatcttacatttccagttaaaaattaaagatggctagagctcttggaaccctgagtagtacctgctattagttcatatcgtctggtaagtagaatctatttcacttcagtagaagtacagatcgtctgttgttttatatcagcagtgatcagaaaaatcttggcatgcattgctttgtttcagtcccttcgcatttcttgtcaatggaagatttctcccagaagaaaatctgtgtctgaaatttgctaatatgaaatagtacagtatgcccaccagtacttgactttactggctcaatgggccaggcagaaggaaattccaattggttgttttctttgagttgaatcattataacaaacttagccctcattatgttgtatctgcagtttttgaattcaattgaagtaaaaggaaatatcatagtttggtcctttcgcgaattttttttgtccaattttttgtccttgtaggtttttccgttgcattagaaaacactgtaggctgcttccttgcgttgcctctccgtttgcaggaacaagagaccagtttttatgtcatagacatgaactactttcctggtatgtggctgctttcttgcgttgtctctccgtttgcagggaagggtgctcccagcccccgtcatgccccttggcccctcccaaccctcgtcgtcataacggagggtgctgcgacaagccagcggatgagcgtggcgatcccgctggagcagtccatcacgccggtgctttaggactttatgaatctcaacatatgctatctaccagtgtattactgtggagcctcgtcgtcgactcccacgtccatgagaccacctaggagttgctcgtgtacagctagctctaccaattcgagggatacataagtgggaggcgtccacaattcccagtggcgcacggttctgccgtctctccgccctcccgcgctgcatcaaccgacaaagctaatttaaccaaacaattacaatagcagattttaaaaaatctatatattaagtaggtgtaggtgactcacacggtttgattatttgctggactctgtaccatggtttgtagtttgtactacatccgatgcaagaaagaataaaattatagttctggaattaaagttcagttttgttctcataatgcagagttctggaattaaagttcaataatacagttctcagccaccatgttacatgtgcctccttcaaaaaggattgtgttattagagttcagtattagagtttagtactggtacctggtactccttttttgtgctactgctctgcttcgcccatcaaaaatatagtagcttgtatgactgcacacctgatgtggtagattaaatcactctacacagccacctgttttcttagctaaatgtgtgtgtggtgcgagcagaaggttcttcggattatcctctcatttttagtattcccagttctctatccggatgactacaaaatcacaggttgaactgttttatatatctttcagtttggacagtcatatttcacattcattggaaacagctaacctgaacgctttcaaggcataaccataaccttttaagtctttgtaattttttctcctccaactgcatttgcatttttaaatacatcacgtgtcccatagtctattagctaggtgctaaggcaaatatgaaagtatgactatttttatatgtgattttagcttttcaatgcagcaactacaacttctttgcaactctattttccatctcatgttttcagtactgagggaggtgccgggggagaaaatttttctcagtttggtgctgatttatcaagacgaatgacttattgccacagagctaaggatgacagtagagaaagttggggcagatttccggcttcaatttatgtccttatcagcactacaacagcaacgacgagcacagtagcaaagcagtccgagccttgtggaggagagcctccacaagaagtgcctcgacgggttccctacctccgccgccggtatcgtgtcattgatgggccacttcatcgctatctagcacaagtgatgttgaaggctgccctttgtgctcaagttcttccgagacgtcaagcgtgtgcgagaacaaggagctatagatgatcgtgacactttcctccatgcagtgcgagatctcctatgttttcactcaaatgtccaaggaagctgtgtttgctgtggaatttcaaggaagctgtgtttggtgtggagaaggagattgagataaccagattggaaggctgtaacacctgcgacggaagtggtgccaagccaggtacaaaggcaacggcatgtaaaacttgtggaggtcagggccaggtagtctcctccacaagaacactgcttggaatattccagcaagtctccacctgcaatacttgtggtggcatcggtgaattctccactccttgcaacacctgtgggggtgatggctgggtgcgaaggacaaagaggatcagcctaaaggttcctgctggagtggattctggaagcatgctgagggtctggtctgagggtaatgctggcaggagaggaggccctcctgggacctttatgtcttcattgatgttctctctgatcctattcttaagcgagatgggacaaacattctctacacatgcaaggtttcttacattgatgcaatccttgggaccaccgtcaaaatccccactgttgacggaacagttgaccttaagataccctcagggactcagccaggcacagctctggtgatgtccaagaaaggtgtcccgcttctcgagaagtcaaatgcccgtggagaccagctggtgtgtgtccaggttgatattctgaagcgtctgagcagcgacgagaagaagctaattgaggagcttgcaaacctgaacaaggctcaaacaaccaatagcaggagatgattgtcacacaaggcttcgtaggacaacgtgcttgtgtggtaggcaattttgatgcaaactgcagtgatgattggatggaaagagttggtagtgataaactcttctacgaactacatacagcaaggggtacactggagcaaaaatgtgtcgttccacatctgtaacctcgtttttaagctattaaagttgagtcagtgaactggacgtttttgcaatagcttagcatatgcactaggcaactttattagcctttttttgttgttatacgacttttgtattcttgaaagccttaggcaaaatatctgatggtggaatcaggtttagacttgacatttctttcacaaatgctgcaccatgcattcatggaatctgtaagctgtaccatggaaatgttaactgtagttttattgtttgtgatgcatttggggtttattggtttgctcttcaaatacgttatgcagacactacgtttttttctcccttcggcagctgttgatttgaagctgcctctcgtagagcagg

SEQ ID NO: 26589 - DNA, 779 bp, Zea Mays
ttaaaaactggctcaacaagtacagtgcactgtacttcggccgttcggcgccacctggacgaatatctcgagaatgatcctgttcccacttcccaccacagaaaagccagtccaagccaacataaaacaagcccgcccgtcattttcgtcacccctgacgctcgacgcctctcctcctctcctcccccacccgtccatcgcccctccctccggtctgcgctcccacagcctcacccctgcgcccccgccgattcgcgtcgccctttgttggaaggaacgatggagcagaccttcatcatgatcaagcccgacggcgtccagcggggcctgatcggggacatcatcagtcgcttcgagaagaaagggttctacctcaagggtaagtgcgtttcattttgttctcgaattgattgctggaacacgtactctgttaaattttccagttatacgcatgaacttctctgctgttgaggcaagatttgatgtgcagattctggtgatatcttagaattgtttaatctatgtatacgttcggttgcgtgtgattaccatctgaaaagggatgttggtcgtggaagcaggaatattgcgtggagattagatttgattgaaaaccattatctttctgtcactagcccatggttggtcccttttatagtctgggtggctgatggccatagtaatctggaattaagtgcagctgctgttgcgttgtaaagtctaatcgcgaagtggacaagaaccacagatcagcactgctgttagaaaagaaaagaaaa

SEQ ID NO: 26590 - DNA, 3259 bp, Zea Mays
ggagagtctcagtcctcacagatcgcgcgcgcaccagcaccaccactgccgtctccggcgacgaccacgccgccggccatgccgtcctcctacgctgccgctgcagccggatcctcttcccgcaagccgaatcgcacctccagcgctgccgcacccactcttcgcccaccagcaccctcaccgtcgccggcacccgctcccctggcggtgaaccctagcgtcatctctgattccgacccctcctcctactcatcttcctctgcggatgaggccgatttcgccgcctccgactccgcaactgcctctgttgtctctgcctacctctcggttgctggcgagggggccgacctctcgaaagttggcattttcctctcatccgccgcgcgccgccgatcgccgccgtgccttatctgcttcgatcctatacgcccctctgacccggtgtggtcatgctcttcatcctgctttgccatcctccacctcccctgcatccagtcatgggcgcaccagtcagcatccgggcccgccgtgccgtgcccaacctggggatgccccaagtgccgcttcgcctaccccaagtccgagatcccctcctcctacgtctgcttctgctccaagaccatagacccggctccggacccctggatcctcccccactcttgtggcgacgtctgtggccgccgtcttgatgcgaatctcgactccggctgtgagcatacctgcctgctgctgtgccacccagggccatgcccgccatgcccggccgttgttcctaaagcgacgtgcttctgtggagtgcaccgggagccccgacgctgcgcacatcagcgttactcttgtggggggaaatgcaacaaacgtcttagctgtggactccaccactgtccagtggattgccatgatggcccctgcccgccgtgtgcagtgctggggagtcacaaatgtgagtgtggagagatattggaggagaaattgtgctctgaaaggattttccagtgcaagagggagtgtggtgggatgctagattgcggtaagcataagtgtgagagggggtgccatgggggcaagtgtggggaatgcccactccgaggtcgacgcacttgcccgtgtgggaagaaaaattatccaaggttggagtgtgatgcagaggctgccacatgcggatcaacttgtgagaaggtgcttgggtgtggacgacacaggtgccctgagcgctgccatcgtgggccatgtgatgggacttgccgtcttgtggttactaaggcctgccgttgcggggggttgaagaaggaggtgccctgctaccaagaattgacgtgtgaaagaaaatgtcaacgtttgcgaaactgtggtcgccatgcttgtaaacgacgttgctgtgctggagattgcccaccctgctctgagctcagatgtggcaaccataaatgtctctcaccatgccacagaggcgcttgttcaccttgtcctctgatgaagaccatttcttgcgcctgtggaaaaacatgttttgaggttccttgtgggactgagaagaatcagaaaccacccaaatgctcaaagaaatgcaatatacctcgcctttgccgacacaagcttgaatgccggccccacaaatgccactatggagcctgcccaccttgcaagctgatctgcggggaagaatttccatgtgggcacacgtgtaaagaaaggtgtcatggccctatttctcctccaaactccgagttcacactgaaaccgacaaaaaagaaaatgggaaagcacatagaatgtacacctgggacaccgtgcccaccatgcaaagaggtggttttggtgtcatgctttgggcagcatcttggccaagaacgcactatgccatgttgcaaatggaggccttttccctgtgaaaatttatgtgggaatcctctcctttgtggcaaccattattgtacaaaatcttgccatgtgttagaagtcccattgaatcatcctgaaggagatcgtacaacatctatcagtaaagtgaacgcacttgctatgccttgtgaacaatgcaatcttccttgtcaaagggttagatactctcttttcgttttcaagaactccagtttggtttgttttacaaagcttaatatgaagaagctactgtggtttcatatgcttttgagcttggtgcaggatattgacatatttatttcaggttagggagcctccttgttcacatccttgccctttgccatgtcatctgaacgattgtccttcttgtaaagtccttgttaaaagaccatgccattgtggtgctatggtgcatgcttttgaatgtgtgttttataacaacttaaatgcaaaggatcagattaaaataagatcttgtggtggcccatgtcataggtcagtttggctcctaactgtttccgtatcgaaaattgtacaatttttctgttgttactaaactcctatcacaaatttccttaaatttatttgattttaccaagcatctgaacatgctttttgaacagaaagctaccaaattgcccccatctgtgttcagaagtatgtcaccctggtgtatgcccatcggttgatcagtgcatgaaaaagcactctgaaacaagagtggcgatgtcaagatgtcctcaaggaataccgtaagtctggccgggatccaaaagaagtacctaaaagtcagtttggagttggcttacttgcctgcggtgaagattgcaagaagaagctgaaggctccagattcagagttgcatctccggaaaagtcaggagaacaagatccctgctgtggaagtcgtaaatgcacccaaacgcaggaagcggcgtgaccgtggacaagaagttaaaatttcgaaattccaggaagtgaagacttttgtgctgagagcgctactgattattttgctgtcaataatcgttgctgctggtctgtacctgttgtggaaaggtattttctggctttctgactggatgaacgaaatggaagagcagagggcgagtcaaaggtatccgaggggtgcaatgttgtaaaataaaacaattactttgagcctaataatcggtattgacatgtggattaattaatggttgttagggattcagttttgcaggatcataaacatgtcaccgttttctcactttttgtcactataaactagaaattgtatgcgtgatgtattgttgtatttttattttgctactctgcattgttaagtgaacaaacgatacaattactacatgattcatcgcttatatctgttaaaatgt

SEQ ID NO: 26591 - DNA, 1402 bp, Zea Mays
agttctttatgttatgcaagttgagtcttatgacacattcatgggagggaaggaatgatggtttatgtttatgatgttgtttatgatttctctcggcttatggaaagtaaaagctagcgacaataaaaaaactcgaccggtagggaaaagacccgccccctcaatcggagcccccttcgagaaagctgtaacttcttaaattttgctcgcaatcgtcactgtctcgaatgcaaagcagatggaccaaagaagatagaagcggccgtggatgcaatgaaaatgggcgattggatctgcacacagtaacttgcaccttacattataccattctttttccatttctttccagcaccgtttgatttgcatcaccctgtctgtgccttctaggtgtcagtttatgaacttctctcgcaacaagatatgttttaaatgtgaagaacctcacccgaagaggcaactcaatcctggagagtgggagtgcccctcatgcgactttgttaacttccgacgcaacgctatctgcaagaagtgcaatcaggaccgccccgaggatgatacccgagatagtcagcggggactgagaaaaaccagaggggctggcaagtttagaagattcgactatattgatcagaagagcgatgacgatgatgacaatgcctggttccagaagcgtggggcaagcatgaggtcgaaaccggaccagagaaccaccactgccaagagcagaggctctgacggtctggatgatattcttgttaccaccaagcgtagaagcaccaagcaagacgaggacgacgaggtcttgccgtacgagggtgcgcgcaagcatgttgtgagcagaagggcaacgccttcccagaggaggttcacggctgcccgtaaccagtaataatacccgagcttggagctttgatgactccgttctgtgaacaaatttcacagcgtcgctcgctctgctgctgtgatgcagacgaatagatgatggacataacacataagcgtgttcgatctgtagtgttattatacaaattattagggaacacacattgataaagctggtcctttacgatgatttttttgttgtcacttatgtaatgacgagttatggcgcttgccctttggccagttggcggagctgaagttccaccgaccgtgtacaccgtcgacccggcgagctcgccgtggaggagcatgctgataggcacaaggacgaaccgaaacggatgggaaaatccctttccgttttcgcattttttttcactggtaacggatttgaaatagtcgggaatgaagtaggataaacaggtgtatgaaaaacgaacgagaacgaaaatattaagtttaatattaatagataactagtacgtgattgactgggaggataacactacgaaacaattaa

SEQ ID NO: 26592 - DNA, 2374 bp, Zea Mays
caaaccctaaaccccaccgccgattctccctattgcttcgctgtcgcctgggagacgccggaggcggcgatggcgaagaagctagggaagaaggcgcgcaagttcgcgcgcaagaacctgcagtctgccgccaagcgcaaccgcaagatccgcaaccagttcaagcaccgccgaggaccccgcggaggtgggagcgccggccgggaggatggggacgagcacgtgctgcagcgggtcctcgatcccaccatggttaccgacgatgctgctgctactttgatccacggtttggagtttccagaggacgatgctgaactagatgctgatctgtctgacagtgatggttatctttctgaggatcctggatgtccatactattctgacagtgaggatgagaaagctgccaaagattgtatcatggaagaaggtttggacagacagaatgatgacatgaatcgagatatcaagaagcaaaagaaaaagttgaagaagttgctggataaggaccctgaatttgcaaattttctcgaaaaatggcagtcggagttggagagctccagaagtaaaggagattctgatgaagagggtatggattctatggatgatgacgatgactccaatgatgggaatttaccaaatgctaaggtccttacaagaaagacgataagtgaatggtgccagttagtgtcaaaggaacctaaagcacctgccttgcgtaatctactaaatgcttttcgagatgcttgtcgatatggtgttcactctgatgggcccttgatgcagagatttcaaagtgccagggtgttttatcaaataataatgtttgttctttctgagtcggacaacattttccgtgctcttttggaaattcaagatgacgttaacaaaggaaaaattatgaacctgagaaattcaaagaaatggctaactgttgattctctcataaagtcctacttatcaagttctcttgatcttcttagtcaacttacagacaacaagatacttgcctttgttttgactcggttgagggtatcagtggtccttttttctgcatatccatcaacatcaagtaggcttgtcaagattttatttcgcttgtgggcaagtggtgatcggagtttgtctctgtcggcatttcttatgatccgagaagtagcttcactgttacctgactgtttggatcactgtttaactaaatcctacaatacataccttgccagtaccaatcttgtgaatgacagaaacacaaagcatatttattttctgatggactgcctggtagagctgtattctcttgatgttcagaaatcatatgagagggcaataatctccgtggagcaactgaatgctattcttagacaggcttctaaaaccaaggaaaaggaagatctcaggaagatagataactggcaatatattagttgtgtcaacctatgggttcggtttctgtgttgtcactataaggattacaatctccatcccttattttctcaagttcttcaatcagatgttctatccaattccatcgttgctctttgactgcctagaattaagagaagtttctcagaaagaacaaacacaaagaacaaagatcaacttttcgtcgttgttgaaggtgccaaagaacctgctgaaatcaagggattttcaagaggagtgtattctttcagcgattcagattctatcagcacattttgcccagtggagttaccatgtttccttcccagaagtagccaccattcctcttgtcctcttgaagaggctacatgagcagacaacagtcgaatcacttcgccgtcctattaagcgtttgatagaccaggtgacggagaacaaggattttatagaaaggaaaagagaggttgtatccttttcaccaaatgataaggcgtcagttgatagcttccttcaggaggagaaggtcagcagaaccgcttcattcactcggttctatgcatccgtagctgaaaaccgtcaaccaaaatggagaaaaacactttaaaataccaagggaatttctgagagacatctcacatctggaatcggttggtttccaagtgagggccacgaagaaccacatcaatgtagaacattttagtgcagatatacgccgaggcagctattgtgtaacctctagtgagactgattcctacgagtcctcgagtgctcaacaattttgtacgattgtaaccttaattccgaagtgagttgtcaagtgatgaatgaaatttgctgttgcttttgaatctgttgtcactgtgcccgtagtacagagtatggactgttgtcatttcctactatgggggaagggatttaatcttactcaatccactctaatccctgttttagcttatcaatttgatttgtatgggct

SEQ ID NO: 26593 - DNA, 1485 bp, Zea Mays
catgcaacggcgctgctcctcactggtcttgactgtgcaacgattctcggcctgacatgtgatcgcgcacggggcatgtcagtttctggctgtgagacaatctggggtacatctgtcttggcagcttgatgacctgggactgtgccacagtaccttccagttgtcgacgtgtgttgcagcgcaggagccaccagttttctcacgtgccggagctcgcctggaagacaagccccagcagagtgggccttgggcttggacttcagggagagtgtggggattcacaggattcatggctgcaagccattcattggaaggggtggagatgagaagtgattggattcaaatgggaagattctccttttacaaaagctggctcattgtaaaagctgacttattcacctccaaacagggtcacagtagctgtatgagtgctgcaatgttaatataaacattgtacgtttataaagcagtttcatgaatgctctgcgaaaagcaggttagtgagggtcttgattttgctgatcgtgctgggagggcagtaatagttactggaatgccctttgctactccaactgatgccaaggttcggctcaagcgcgagtatttggataagcaggggacaccatctaataaaaacacaaagatgttgacaggagaagaatggtatgtgcaacaagcagcacgggctgtcaatcaggctgttggacgtgttatcagacatcgccatgactatggagctattatttattgtgatgaaaggtttgtgtggccaaattatcaatctcagatgtcatattggctccgacctcatataaagtgctactcaaagtatggggaagtagtccaaggattgacccgattttttcgagataaagcttcttcagatcctttgacactagagccaacagattgtaataattgtatagcaccaccagcaaacaaacacatgcttaaagagaagctatcagatttggctgccagtgcacaagatgagtgcccacaaatcacattatcaggaaattcaaccatgagaagaagtaacttcatgaagttggctcagatcactcctgctaatcgttcaacccttactacaaaacacaactttgtgtctacatctacgaagcacaacctcccagaagaccagctgtcacaggataccaatgttgatattactgttgacttggcaatacaagggcatttgaaggaacataccttcaagtctttagggcttaagaaagctaaaacaatggacagatccaaagatgctgttgttttagatgacgtctcttcaaaattgcctcaaaatatagggtcaagagctttggccagataccaatgtggtggacctacacctgaatcaaagaaaagcactatagcaacagcatgcggaaagaatgatggggcctgtgaaaaaactgaaggccaggaatctaactcagggccagccttcttgaagctggttcaagaaaagcttagtcctgcaga

SEQ ID NO: 26594 - DNA, 1166 bp, Zea Mays
tgcaaaatgtaactggatgtcgaaacaaaaaccagcagagtactcctatataaaacgccgtactggccacatcgtcgatctcccccaacatgttgttcaggctccacacttgacagggcacagggcagggcgccaggagacggggagaatctttcgccctgaaaaaagagcaaagtgtcagccctttccccccggttcctagttttggtactactacaggctcccgctgcatcatccccaacgaaccagcagagctcgcaagcaacaaaagagaaggacgaagcaggcgcagccgccacacggacacgcagcagagcatcgccgcagcggtccagaggcatgggggccgccgccgccgcaaagcacgccttgcaggttgtcgcggcgggaggagatgctgggcaatcgagcttcagcgccaactcaccccccaccaccggcgccgggttcgtcgccctcgacgtcggtgagctctcgtctctggccggcgacgccggccctccgggcacgcccatcgcgccgccccggacacccagggtggtgaggtcgctgtcgaggaagggcgacaggaagccggccgacgccgacgccaacgccaccgccggtggcggtagagagcggccgcagctgttcgtacacgtggctgccggcgacctcggggacgcgcccggcagcgcccggctggtcgtccacacgccgctggccggcacgcccggaagcaagtcccggcggttcggaaggcgggcggcgccgtggctcgatccccgcagggtggtcttcctcttcgccacgctgtccagcgtgggaacactgatcctcctctacttcacgctatccatgagcagggcggactccagtagcggcggcggcggcggcagcggcggcagcgacgcccggtgaaacgccagccgtctagagcgagggggcgtttggcctgatctgagaatttccagatctgcaaagatttacaagaacaccgtggtccaagcatatagaagaaaaggctgtggtgctgcgggcctatctcatggatgaatatagagcgagccaacgacagcgaagaagtcgagccggatgtggatttgatggagaagtttgtgatggtagacatccttgttccttgttgtattctctcactttttttttctgattttctaaaaaatagg

SEQ ID NO: 26595 - DNA, 2134 bp, Zea Mays
caggagtccaggcttcgagcaacgagcgggcgaggctggaactggaacgctggatgcaagcctgatctactctgcccttaacctagctggttgagcaaatattcttccaccaatggcgagagaaccgagtcctgaaatagatgatgaactttacaatgaagtttatgggaaagcatacagcggcccagttgcatcagctacaaatagtgtgactcctaaaggaaatgctgagaagaggcccctgactcgtgataagtcagatgatgaagatgaggccccagatcctaatgctgttcccacggacttcactagccgagaggctaaggtctgggaggctaaagctaaggctacagaaaggaactggaagaagaggaaggaggaagaaatgatttgtaaaatatgtggagacccaggccattttactcagggttgcccctccacacttggggcaaataagagaaatgcagacttttttgaaagagttccagcaagagataagcaagtcagagatcttttcaatgagagggtaataagccagattgagaaagatgtggggtgtaaaatcagaatggatgagaagttcctgtttgtcagtggaaaggatagattaatattatccaaaggtgtttctgctgtgcataaaattattcaagagggtaagggtaaacatagtccaagcagtccgaaacacgatcgctctaggtcgcctgtacgaaacactactgagtttcgttccaaacactctgattctcatcgctcacctagcccaagaaattttgattctcaatggtcccatagtccaagaaatgcatcactctctcaaagtaaaggatactataatgaaagacatcgagatggtcgcttacacaacaatatgcccaagttttcgaaaggatctccacaagctcatgccaactttggagcaaaaggccgtccagcccaatcaaaatctccacgccatacctcttatcttgatgaattacctagaacacatggcgagaataaccaatttgctgcatcacgagtgcccaatgattggggaattgagaggcatggagcagatgccagttcaagtcttaggtttgacatgccatcccaccaacagaccttggaagaacttgagatggagtttaaaaaagaagctacacaattagctagagctcgtgaccaagaggaggatgaagagaactataggcatcgagagtcgctgagagtgattagagaaaattacatggagagagtgattaccttgaggaatgtgcatgcaaagaagtgggaagaatttcttgacacctttaaaagtcaacaacaagcacagccttcatacatacaaaccggatatctaggttttgagcagagaacggcacatatttcagctacacatcaaccaatggattcgaagagcacatatccgtatgcttctgatagctattcagccccaaaggctcatgcagcatatggtgagtttcaacatgagaggcatgatgatcttgggagggcctataggcgatattagctgtgaatagtgggcgattttgtgaggaatcagtgtcaatggtgcgcttagacctacttatcacccattgctgttatgtagcttgaggaggtaagcattcatatataggcagaactgtctcccaattactttctttgcagcgtctacaaccgcaacggactgtggagctgtttcaggcatcgtaacaagctgctttccaacgaactaaactgaaatgctataaaaaaacattgacctgtatgactgttttatctgcttggaaaaaatctccctgagttggcgtttatgtgaacctagtattttttttgtcaaacctggtatatcgctatgctgggtctatccgaatggttgtttgcatcatcccattgttttggaaggtttggcacacgatatgaaagttagaacatgtggaacagtcagctatttcgtgaaatttggtcagaacttgatggcactcgttgctgtagtggtgactaggccagtgccttcggattggtactgttttgtgtcaatctcaacaggcactgcactgtcccatatacattggaatgtttgattggtggatggaggttgtattgtaaatcctggctgagtgaaaatcgaattttagaagaaaaa

SEQ ID NO: 26596 - DNA, 670 bp, Zea Mays
gctcaatcggcctttggccgcgaccagccatggctggtcggccatgcatccaagggctgggcgtttcacggttcgatgtcggcagcggaggtgcggttggccggcgaaggatagaaatgacaacagctagcgcagaaacaaaataaagaaaaatggctcaccggagaacgggaagggctcgtcggaagaaacaacttcgtgcgtggcagggacccctcgacacagcgacgagtgcggcgagacctccagctaggacatcggtcctttctccacggtgacaaatgatgcgacgacgagctctgcatgggacctctgctcgacggcgggcgcggcgccggggcgactgcgtgatgcaaggggtggttgctgcaaggttgagggacagagagcaggtgccgactgtttgaatgggactatgggagcggctataacggaccattgctaaattcttgcgtcgtggccatatagtgcggtagaggttgttcacacacggaagagatggtggtgggcctgcggcgcagcagccgagtgcggcgctggtgcttcccccacgcgtgctagcaggtagatatgaatatacatatatgtttatatgaatatatctatttatattagatcatgtcccgataatttaatttgatagtttttccttctttcgagtgtgaacacc

SEQ ID NO: 26597 - DNA, 1165 bp, Zea Mays
cttgttcctgtagatgcattgatcgtatgaatgagatcattgacaagtacagcacacattctaaaaacctggggaaagcagaacagccttcacttgacttgaacttagaacatagcaaatatgcaaatttgaatgagcaacttgtggaagcaagccttcgactcaggcagatgagaggtgaagaacttgagggattgagtgttgaagaactccagcaattggagaagaatctggaatctggtctgcatagggtccttcaaacaaaggatcaacaattcttggaacagatcagcgacctcgaacaaaagctccccaaatcatgggtaccaggacgccgagccaggaccaaacctgcacatagacagaagagacgcacctgctcctccggggttgacagcaagggaatctgttttcttgcagagggcacactttagtttaaagcatgtactctctctattccaaattagtacacaactggcagaggagaacaggcaactgaggaatcaagtatcccacatacccccagttggcaagcaatcagttgctgatgctgaaaatgttatcgctgaagatgggcaatcctctgaatcagtcatgactgcgttgcattctgggagttcacaggataatgatgatggctgccttgtgttgcatggaagtgaaaaaacaagatggtctgtgttgatctgggtggagctgcggcttcagcagataggcacttgtgttattgtcttatggacgacccccgactactgcaataatcttgcatcggaagcgagatcagttaacctgatttgtcatccttgtggcttcatgatgcgatgttgcgcttgtaccgtttgctaggatgttaactggactagaatcgtgtctacttttgtactgctcgtgaatcctatctactttgtgctatccaaagttatgacctaccacttgcatcggcatggcgcgccggccgtaagctgtgctcaagcatgcatgcttcgtgttatacgtgtgtacttattgggaagttgagtctgcatacaacctgagcgtagttgttgtcttacagagaccgtttagttttcagaaccgctttccccatgtctcgtttggatccttagaattgaatttcattatgataatagtaatttatacaaaaatcaattaaggtaatatgatt

SEQ ID NO: 26598 - DNA, 3465 bp, Zea Mays
ggaaacacgaacacggtcacgcactccgccgatcccgccaccgcggcgcggggacgcgcacatgctgccacgaatactcctccagtcctcccccgtggtgccggcccccacctgacccccgatccccgcaaccttctatccagaggggaaaaaaagaagacaaaaaccgccggcgagcatgggcacgcaacccggctcggcggttcgtgtcgctgcggatgagagctcgctccctggactttacttaactctactctgagtctcggatgctccagagtccagacttccgggattagaaatccacgcacatcgccgtgcacgcacgcgacggcggagatgtccgtggccgtggggaagcgggtgctcgatacgggctggctcgccgcgcgctccaccgaggtcgcgctcaccggcgtccagctcaccaccacgcacccgccggcagctgaccccgccccagccgcgccctggatgagcgccgccgtccccggcaccgtgctggggacgctgctcaagaacaagctgatccccgaccccttctacgggctgaacaaccaggccatcatcgacatcgccgacgccgggagggagtactacaccttttggttcttcaccacgttccagtgtgccctgtcaggaaatcagcatgcgactttaaacttccggggaataaactactcagctgaaatgtatttaaatgggcacaaggaggtactaccaaaaggaatgttccgaaggcacaacattgatattactgatatcctccatcctgatggtaacaatctgcttgctgtccttgttcatcctcctgatcaccctggcaaaattcctcctcaggggggccagggtggtgatcatgagattggaaaagatgttgctacacaatatgttgaaggatgggattggatgtgcccaataagggatcgaaatactggtatctgggatgaggtatcaatttccatatctgggcctgtgaatataacagacccccatctggtttcaacttttcatgatgattttaagaggtcatacctacattgtacacttcagttggagaacaaaagttcttggattgcagattgtaccttgaaaatacaagtttcaactgaacttgaagggaacatttgtttggtggaacaccttcaaagttatgcaataacagttcctcctcaatcagatatagagtacaccattccttctttattcttctataagcccaacttgtggtggccaaatggcatgggaaagcaatccttatacaacattgagattagtgtggatgtaaaagggtttggagaatctgattcctggagccattattttggattccgcaagattgagagtacaattgatgattctacgggtgggaggatcttcaaggtaaatggtgaacctatttttatccgaggagggaactggatattgtcagatggccttcttagattaacaaagaagcgatatatgaccgacatcaagttccatgctgacatgaacttcaatatgcttagatgttggggtggtgggctagcagagaggcctgacttttatcatttttgcgatgtctatggtctgatggtatggcaagaattttggataactggagatgttgatggccgaggaattcctgtatctaaccctaatggccctttggatcatgatctctttcttttgtgtgctagagataccgtgaaattactcaggaatcatgctagtctagctttatgggttggtggtaatgagcaagttccaccggttgacattaacaaagcactgaagaatgatttgaagctacatccaatgtttgatcaatgtgggatggttttgcgaatggtaaaggggacttcactgatggtccatatgagattcagtatccagagagttttttcaaggacagcttctacaaatatgggttcaaccctgaagttgggtctgtaggggttccagttgccgcaacaattagggccacaatgcctccagtaggatggagcattccgattttaaagaaaagaattgatgggtacatcgaagaagtaccaaatccaatatgggactaccacaagtatattccatactcaaaaccagggaaggtccatgatcagattgaactatatggagccccaaaagacctggatgatttttgtgaaaaggcacagctggtgaactatgttcagtacagagcacttttggaaggatggacttccttcatgtggacaaagtttacaggtgtcctaatttggaagacgcagaatccttggactggactaaggggccaattctatgatcacctccaagaccaaacggctgggttttatggttgccggtgtgctgctcaacctattcatgtccaactgaatttggttacctattttgtagaggtggtaaacactacagctgatgaactcaaagacatggctgtcgagatttcagtgtgggatctagatggtgcatgcccctattacaaagttaccgagaaaatagttataccgccaaagaaagtgaagcaaattatcgagatgaaatacccaaagatgaaagatgccaagcctgtgtattttctgctcctcaagctcttcaggctgtcagacaatggaacaatctccagaaacttctactggttacaccttcctgggcaggactacaaatcgctggagcagtatcagcagaaaaagattccattaaaaattgattctgatgtttcagtctcaggcacgaggcacaaagtaagaatgacagtagagaacatctcaaagaagtccgtagtagacagcacacgttcagtatcagcaatggatctaggtgatgcaagtggttcccacagcactcgcaaagaaactactcggaagggaaacgggagcgacggactgtggaggaaaatacgcagtggcctcggggtcgcaagaccaagcgacaaccgaagaacactggaggtcagcgggaccgattcaggggttgccttcttcctccatttctcagtgcacacctccgaatcatccacggacggggaggaatacaatgacacaagaatcctcccggtccactactcggacaactacttttcgctgacgccgggggagaacatggccgtcgacatctcgttcgaggctccccagggatccagtcccagagttgtcctcagaggctggaaccatcatctggaccacgccgtgatgatctgagatccgtgtaataaaataagcacgtaccgaataaagtgcagacatcagatcgtgttcgtgcctgttgttggattataattaggcttgtcctaattttattttattttattaaataaatcgtacgacctaaattgaattctaggttaaatggcttcaaggtactctatatccttcgtaattgttttagatgtcagtgttatttaaagcttatatatacatccttataaaagtataattattgtatttagagaagagaaagtaaaaaaagaaaatataaaaaacagattgc

SEQ ID NO: 26599 - DNA, 2331 bp, Zea Mays
cccggacctcatcaactcatccacgcgtcacagccacgaccatctcttcctccttaaccctgtagccgcccaagattcctctgccgaggaggccatggccacgatggaagcagccacggacgcaggggatcccgcaaggctcgaccaccctcgtcgtccccttccctacttgtcgtggggaacttgctgtcgccctccctcgcggtgctgcagctacaagctgtggtggtggacaagcagtaccgcgccgcgatgggtccaccgcctcctcttcccgaagtcgacgagttgtaccgcaacgaggcaagtcctccgcctcccatccacgacgacgctgtgggggtgatgtccttgggctcgagcgtgttcaaggtgctcgatcaaatggccgagagcacgagagccaacggtctggtggtgaacacgttcgaggagatggaaagcgactcgacgacgcttctcgcggaggcgacagacaaaaaggtgatcgccgtcaggtccatctcgctctgccgctcaccaagtctcgaccctcagtccatgtcgtgtgacgcgaggcaatgcatggcatggatggacgccaaggctcctaagtctgtggtgtacgtgagcttcggcagtgctaggcgcatgccacccattcagctcggcatggcgtttgcctcatgccccgcgcttgtgctctggctcatcaaggacgctgactccctgcccgacaacgtcaaggattggctacgcgagaacaccgatgcacacgacatcgcaggaagcaagtgtctggtggtgcgcggttgggcgctagaggtggccatcctggcccatccagtcagtggcagcttcatggcgctctatggatggggctccactctggaggttgttgcagccggtctgcccatggctacctggccctttttcattgagcaatttatcgacgagcagctcatcgtggacgtgcttggtattggattatccgtcggtgtgatgaagccaactgaaaatgttttgactgccagtaacacgggtgttgttgttgtgatgatatatgctcctgctttttggtcctgcctgacaagcttcacacttggaatctatggtctgatagttggggttatatgttggccatttctgatgaaacaagctagtctatcttttgtctcaagacaagatggctggtgattatcctttccttgctgctactccaatgggacaagccaaaccttcggggtctttacaaacccaagtgcattcagtgtggcttctatgctatgtacatgcttgtccaagcaggtggtctgactggctcccgtcggccgagttttggtataatagctcgttccattctgctatcagtcgatctccttttgatgccttatatggttatgcacctcgccatttcggtattacttcatgtgatggtccctctgctgacctaaatgcattcttgcaagacaaactggttatgaccaaactgttacagcaacatcttttgcgcgccaagcaatggatgaagtctatggctgataagcaccacactgagtgtcaatttgctgttggagatctgaagatattggagcggcgtctggtattccatggcacacgtgctgtccaacaggagttgatcacatggtcgtcccaaccttgctcgttggcgacatgggaagacttgtaatcactcaagcacacctttccttaggccccagcttgggggcaagctggttctcatggaggggggaatgtcagtatcccttcatcagtcattcactggaggtcaggtagggcacgttcaaggagatgcagcagacaatgaagctacaagactcgcaggccaagcaccagggtttatgggccagaatgggctaaatagttgctaggccggcctgcgtgccgtgagaataatatataagccaaacatgacgtagagaagcggtatgaatgaacaagactcgaatactactatctactatcatctccctattcttcgcctctattcctcttctctgtgttgtctgtctgtatctctccactcctgttgttctactattcctctatttctcttttctctgtgttgtctgtctgtatctctccactcccactattctattagtgatctattaggatcgctaacatgctgtctgtgtggtatagaaatagttagatatatatatatagttgtagcctaagtggagcacataattgtagacaatatccctgaattgatctttgtcaatacgcctttaaaatagaccggaataagtgacatatgtagttattctacatcaagaagccttgtattggtgtaataactaagcaagtgtgctgttttttccagca

SEQ ID NO: 26600 - DNA, 2539 bp, Zea Mays
gccgccgtggtccgctgtcgcacacgccctcctgcccctctgctcccctcccagatcccgtgatccgctgccgtgatccgatgccgcacccgccatcaacgccctcctccccctctgctcccctcccagatctcgtgatccgctgcgaggccgccatcaacgccctcctccccctccgctcagctcccctcccaggatctcggcgcgctttcatcgccgccttgatggtccacggctgcacccacatacgacatcgcctgtccgcacgcaagcttctgcctgcgcccacctgtgtgcatagatgtgtgcccccgcccacctcttctgcgcccaatctttacccgtcgtccgcgccgctgttccatcctcgcacccacgcccgagatccacatgtgccgcaccccagccgtgctccggatgctgcaccgcccttccatcctccgcatgcagcaccatgttggccgccgccctgaaacctcgctaccacggagctgcaagcccccgcttccaaaccagcaccatgcagacttccaatttgttttttgtttggagcactgttgattttttctcgtttttttgagaacattacattgcccgtctttcactgttcaacttttcttaattaaccatttacatttaccaaaaacttattcaacttttcactgttcaagttcaatttgttttgtgcagtattgatctgttgtgcagtgtatactttgaggttcggttggccgatcttgcgatcgaataccaaaaacttgtgcggtactctgttgctgaataaaacttggatcaggttaccccaaccccaatggcatttaccgagccgatggaggcgaacctgctacgccaagtgctggactatccccccagtgctctgtccatgtccatccctccttcagcttcattgatggttgcactgctctactatactataagtgaattgagttaaagcattttttgttcgactactgtttggtgcatgcaacttaatatggctgatttttagtctttctattttagtttataaattgtcaatcacagggattaaaagagactaaaagtaaggtttcaggttctatttctatccatctttaattaagggctgaaacgatactgtcttgattcctaattcacctaatattcctagaccaagaacgactcgggttaatggtcagggatgccaaattgtttcagtaaaactaagcaagctcgtatgatgattatgtacctacttgagaacaaattgtctaaaacatatctgctactacacttcagtaaaacaattgatcacacacaagaagttcagatcagaaagcaggctgtcgctactcccgtcaggttctcggatggttcccgtcaagggctgaccatggagaagagcacagtggtggtcagtgtccctgttgttgtcatggccgagactgctgagaccgactacagctcgagcttctcgatgcagagtcccagaaagatgttgggaagggtgataaatcaagggataagggaactgctgagaagtttgcaatatatcagaagcatcgttcttcgttggcagacactgttcaattcaggaggccagctgctccaacttccagtgtgaatgctgatattgtgggaacatccactctgcagtctgcatctctaccgaaacaagaaccctcaacagctacatccaagagctatactttcagagaaggtgatagggtgcgttatatgggtccagctcagttatcctcattgtcacaaaggctcctctccttttgctggcttcgctgttggaagcgagacatcatgtggtgtggataacgtccttgcagagcacgtgaactcaaatttcactctaatgccagctagctgctacatagtgcacttctgtatattatgagaagagagtggctcttcactcccatcggattgacaaaaacacactcggacaaccagtgctggtattaatcgagatgtcgcatcaacaaacgctcatgcagagccagattctactcctacagtcctacgtctacacgagacgacacaagtgcatctataattgatcttttcttttcatctactattctcaacagacacagcagaactgcatgccagcagaggaatgcatatctagtggagataaactgtaatcggccgcctggatgacacgataggaccacgcgtaagaacaaactgggaccaaataataaaagacgaacggagaaaacgtgtcgttgcagatgcccaggttgtcgcactggctccgtcactgtctgatcgagtatctgcaaagtagggattaggtttgtcaccgttgactttacatgcgcctgcacattattctcaagtagtagtacttgtaatcacccctaggccctagtcaatgtgcacgagggaggccaacgtggcttcgcccttgctttaaaatctgactgttttttttcttcactttctcataagaacgtacttttcctgtatcagtcgcctagatagttattttaaacttttacaagaattacagcgggaggtggtgataacgattacagttaaa

SEQ ID NO: 26601 - DNA, 3173 bp, Zea Mays
atacggtcatgccccaaattcttatgcttttcgaaaattacaatcacccacccccaataaaagcgcccacaccctcctgcacctcccttcctcaacctccgccatcaccgacgctgactcccacaccggccgccgcgcgagccccggcaccatctccgcacgagcagaaatgggggatgcgtgtttctcaacacagctaattgatggagatggggtcttcaacgtctctggattggagaacttcatgaaggatgccagattgggtgaatgcgggctctcctatgctgttgtatcaataatgggcccgcaaagtagtgggaaaagtacacttttgaatcatctttttggcaccaattttagggagatggacgccttcagaggaaggtcacagactaccaaaggtatatggttagcgaaggcccagaatattgaaccgtgcacccttgtaatggatttggaaggaactgatggaagggagaggggagaggatgacacagcatttgagaagcaaagtgcattgtttgctttggccgtttcagacattgtgttgattaatatgtggtgtcatgacattggtagagaacaggctgcaaacaagcctcttttgaagactgttttccaggtcatgatgaggttgttcagtcctcgtaaaacaacattgttgtttgtcattcgtgacaaatcaaggacacccctagaaaatcttgaaccaattttaagggaagacattcagaagatatgggatgctgttccaaaaccccatgcccataaagaaactccacttagcgaatttttcgatgtacaagttgtggcactgtccagttatgaagaaaaagaagagttgttcaaacagcaggtttctgatttaagagataggtttcagtattctatcgctcctggtggacttgctggggatcgtcgtggtgtcgtcccagcttcaggattctcgtttagttcccagcaattttggaaagtcattaaggagaacaaagaccttgatctgcctgctcataaagttatggttgctactgtacgttgtgaggaaattggtaatgagaaagtcggcagttttacatctgatgaggaatggcaacaattagaggaggctgttcaacatgactttgttcctggatttgggaagaagatcagcagccttcttgatagatgtttatcagagtatgacatggaggctatttattttgatgaaggtgtcagaagctctaaacggcaacagcttgagtctaaactcctacagcttgtcaatcctgcctatcaatctcttctaggtcacttgcgtactagaactttagaagcatttaatgagtcctttgacaaggctctagaaaaggagggatttgctgcagccgctcgcaattgtactcaaactttcttggagaagtttgataaaggatctgaagatgctgctattcaacaagtgaattgggacacctcaaaagtgaaggataagcttagacgtgacattgaggctcatgtagcttcagttcgagctgctaaattatctgaactttgtgccaaatatgaggcacaacttaccaaagctctggcggaaccagttgaatctcttctagattcagccagtgaagatacgtggccagctattagaaagcttcttcaacgcgagacaaaaactgccgtttcaggtcttcaatctgctgtgtcagcttttgaacttgatgaagcaactgagaaagaactgcttgtgaagctggagaagcatggaaggagtgttgttgagtcaaaggcaaaagaagaagctggaagggttttgattcgcatgaaggacaggttttcaatgctgttcagccgagatgctgactctatgcccagggtgtggacaggaaaggaggacataaaagctataactaaaaccgctcgctcagcttccatgaagttgctttctacaatggctgcaattcggttggaggaggatggtgataacattgagaacactctttccgttgctcttgttgacacctcaaaacctgggactactgataggagtatccaattgaccgatccacttgcctccagttcatgggaaagggttggcgaggagaagactttaattacccctgtgcagtgcaaaaatttgtggaggcaattcaaggctgaaactgaatatacagtgactcaagccttagctgctcaggaagcaaataagaggaacaacaactggctaccacctccatgggcacttgctgcaatggctattcttggattcaacgagttcatgacattactgaggaacccgctttacctgtttgccatatttgtgatttatctcgttggaaaagccatttgggtgcaatcagaaatcggcagggaattccaacacggatttcttcctgccatcctttcactgtcgacgaagtttgtgcccactgtaatgaacatcctgaagagattagccgacgagggtcaagcacctgcagccgccccagagaggcagagagagatggagctccaaccaaaacccaccaggaacggttcttcatacaccaacgcgacgtcggcggggtcatccagcgtaaccacttcggagatcggacctgagtattcgagcccggtggcgcaatgatttagctgacctttagcctttggctggaagcccactctagcgcagttgagggaaacagggtgcctctcgagaacataggaacttaggaagattttaaggacagtcaggtgccttgcagttttttctaagcctgcccttcccccaaactgatgcaaggtggtgatggggtggcactgcccatcactattatttaaggatttttgggggctgggggggttgtttgtaagagcattgtagaatgatttcgtttaatttttttggtttctgtaacatgaatacatgatatgtgatggttgtatagaagatctggggggcgtagtagtgcccattctacacagcttatactgggcagggggttgcatagttgccagaagcttgtacatgtctttaaaccgccatcggattgcgatggagtagtattactggtgttctggaataacacggaggaacgtgttgtgacttggcaggccgttggtaactggctgttctcattcggtagttttgacgcgtgcctcgaaccgattcatatttgagccccatctggcgcagattggcagcgtttttaagaggcaga

SEQ ID NO: 26602 - DNA, 2496 bp, Zea Mays
cacgacagaggccgggtcggggattaagataacagtctgatacccccccacccactgccttcactgactgctagagcccctccttgtcagtacagtgtttggtgctgaatcaaatccactgaagatgccaagttctgaaccagacagtgatgatgttttctttgacgcatttgaagatgttcgatctgcaggggaaccttcatgttcagaggattgcagcaccagcgatgaagtttcagtggtgaaatttgagtatgagatttgggcaaacgagccgatgagcgttcaagaaaggcggcaaaggttcctcaagggaatgggattcgatgatttcgtgtctagtagaacagattcttttcaatgccatggtgaaatcacagccgttgagtcttccactggcatggaggtgagaacggccagttgccattcttccgtggattcatctgtttgtgacaatgaatcggagtttgacggtgcctgttgcataagggatatggatagtagaaagagagatattgtcaagggtggacatagcagtataactgacatgctcaaggaggttggatcagataaggtgatgtctcttctggagttccagagtttgcctggcctctctcgggctgttcaaaatttagttcggagggggtgtggtaaaagtcctgcaaaagaaacgaaaagtgctaagaaaatggatgccaaaagcttgtggaagaaattcatgataaagagaagctttggtagcgtgtgcaagtatgatgtccatgtgaaaaactgcacaaatagtataccaaccagaacaagagttcaacatcggaagaaaaatttccttgaattctctgctgtctacatggatcaagaaatcagagctcacaagggttcaattcgggtcatgaaattcagcccatctggctggtatttagcaagtggtggtgaggattgtgttgtacggatatggcaaatcatacaagtagaagcatctcctaagttgtataggggagaggacccctatgaaaaagtggagaaagttcaggtctttaagacaagtatagaaaaggggcagaaccaggcacttgcagttatacccaataaggtttttcgtatatcagagactccattacatgaattccgtggccatacaagtgatatccttgatctggcatggtccaaatcagattatctcttaacttcatccaaagataagacagtgcgcttatggaaacccggctgtgatggttgtcttgcagttttcaaacacaaagactatgtaacatgtgttcagttcaaccctattgatgagaaatacttcatcagcggttcagtagatggtaaagtgcgcatttgggacgtgttggacaagcgagtaactgactgggccgatacgcgaaatatcataactgatttgagttaccaaccggatggaaagggctttattgttggcacgattgcaggcacatgtcgtttctatgatcaatcaggtgaaagcatccagctagagaaagaattgtttgtgcaagggaagaaaaagtcagctgcctgtcggatcaacagcctaaagctatgtgcaattggttccaacagggttataatcacatcaggagattccaaaatccgagttgccaatggtgataccatccaaaagtttgaagggccttggaagtcgaaggctctgtcattaccgtctctaacatcagacgagagatacctcatatcggccggcaaagattccaacgtctacatctgggacttggccaactcgagagacgacgcaaagccagtccactcgtgcgagctgttcttctccaaggacgtgacgaccgcagtgccatggccgggagtgcggcaacaagacgggcacgcgagcgcgaaacctgcctgtgtggccgagaaatccgccagcgcgcccatcctgcgccagtcggcccccgggccgtggccgttcgtggacggcggcggcagcagcagcaaggggtcggcgacgtggcccgaggagaagctcctttctgcagcgaagcctgtggaaagcagcccgcggctggacgactgcctctccatgctatccgccgcgtggagcacggtcatcgtgaccgccggccgcgatggcgtcatccggtcttttcccaactacggcttgcccgtcaggctgtgagctccgtcaccggtctgggctgctggtcagtggaggcgcagcagccgtggttggcgactgatgatagataacctgctaacgtcttgaagtttttttttctctctctcgtttttctgggcggagttactagaaattcttttttatgtaagcatttgttagatcatgaaccttgtcatgaagagatgatctgtagtagtcagttcaagtccaaacacttgtgctctgtgtgtgtgtgttttttttgctggatggttgtgacaaggtaaaaaaacgcaagcattcagttagatgtgaccagccttttttttgccctctaacatcaggatgtttatattgaaaatatatttaaa

SEQ ID NO: 26603 - DNA, 1121 bp, Zea Mays
caataatgtaacctgttgaagtgacacaagaaagctcatagagctgtagttaaagcagtgtaagacgggcatagtctcagcactataatcaggattcaggagtatagaagaagccatcacctctcacagataatatgacaattgatccttttacatgcactctaagcaatcaagctttcttggtagcactaatttttaactctcgtagcaacgcacgggcacataatgtgagcaggaattgtggaattgtctctagatgtgctcggtgcgggaacattgccatttgacatggctgagaaggaggaaacaaagggccgctgccctgcctgccacacacgttatgacaaggatatgatcgtcaagatggccgccacttgtgacaggacagtggcagataaaaatgcggagaagaagcaaaaggcccaaagggttaagccaaaggcagcaccaacagcaacaacaacatcaaccgtagaatctaagaagcatcttgctactatcagggttatccagagaaatctggtgtacataattgggctacctgcgcatttatgcaatgagagcgtacttgagcgtagggagtactttggtcattatgggaaagttttgaaggttttagtttcccgtccgactgggcctccctctcagcaggcatcagcaaacagcagtattagtggagatatacgtggagcgtcagaattatatgtgcatctacaagaacagttacaacaattctccatcaggttgatgttcatacatctcagatataaatgtgggggagacggtgcctcatcaatgatgagtaggttgattctcatctagcggcaccattgctcactacaactggtttgcttgagcaacttaatgtcactctcaagaggaccctcctttcgaccgacaccctgaagcaccacacaagctttagaaaagtcggaattgtacttcgtatacataaattacatgatattatatgttcatgtaattctatgttgattctttagaaataatatatatgatattgtaatgtgtgttcgacatcaatttattttatttgagttcgccgtgcgtacgtttggggttgtttctccctcgcttcttcctggcggcgaaagatagagaag

SEQ ID NO: 26604 - DNA, 2883 bp, Zea Mays
gctgtcaatcgcctccccactgcggcagatccgcaatccgctcctccaccaccgcgctcctcacccacgccagggacaagactgtctacctccacgcccgcctcaccaactccgcggccaccgccaccgccacgcccctcccccatggtcgtcgagtccgagtggtggaaccagcgacgcatgcgcgtcgagggcgacgtgaaataggtgctccaccgcgggcacaacgggcacagtggaggtggaacgagcaccatcgagttctggttccaccgaatccaccgctcgcacaccggatccatcgctcccacatgcccgcacaccggatccaccgctccctcccccgcgatggcctggttccaccgagacaactgcggggctagggtttggattcgtgggtggagcccaaggctagatccagcagggggagggaggtagaggaggggagggaactgctggtggtcggcagtgggcgaaggcgcgacaatccaggatatggattcctgagcgtcacccacccgcccatccacgtcgcgcggtgtagtcatcccctatccgcagccgcctcgctccctctcccacaacaaatccattctcctcctcccactcgacgaggatcgcgaggatgctggaggacgtcgtcgctgtcacgcttgacgttagggcctccgatgcttgacgttagggcctctcgcttgaagaggaacacaaacagagctcatgttttttattttgctctgcattatctactgcttctctgtgggggcgttatttacagtatgtggcctgtttgttgtgttgttcctgcggaagggcgggcgggccgaaggtgtttaagaaaatgttgttgtcaacatcaacctcctggaagggccagaacgcaggcagcgcctcaactcgtcaccccatcagcacggatgattatcacgagtacttcaagcgctcattttaggaagacatcgctgcgcaagtgcctcaaggagtggaatgcaattgatcgaaacatgatatatttgacatattcatgatggatttttgtatttgatgtgtcgctttttcatctatcaatgtaattcttggacataacattgcgcacaggtaccaaattcacacccttgttattgcgagttctgtaaatcatgatgttcacatgtgatggtttgattcagttcaatggttagcaagctatttgaacatgatactatagtagtgcatatttgctgtacaaatggccactgcccagctatttgcataagatattatgtttctcctgtgacattttctatgccacatacatttatatggcatttttgtgcaatttagtaccggtttttggttgatggtgtctggaggtgtgatgagacaaaaccctttgtacgtgatgaatatggactgatcagcaatgaagtgcttgtggaaaacaatgtactacccgttgtgcagccagagccttctatcagaggaactaatatggataagggtaccattttgaaaacaatgcccctggagccatcatctcagaacccaagcatgcaaatagcagttatccgccatgtggtctctggaatattattacacaataccatatatgacgttgttcccctttctagcaagggtcttgctctggttcctttttgggatgaccgtcagggaaccataacaggcatgctcactgcatcagattttgttttaatcttgagaaagttgcagagaaacattcaagttattggcaacgaagagcccatttctgcttggaaagaagcaaagctacagttctatggtgggcctgatggtgctgtcatgcagagaacgccattaatccattttgtacagacaggcaacattgatctcagggccaagaaagaagctcaactcggcatgcttcctgtttgaagcaagggcaacaaacttaccccaccagatctctgtcgccaaagcagggctagtgaataagctgtgtttcctcccggattgtcactgcttttatatttgtgcatttattttgagggaaacattttgcccaaaaaaggcctgcagtgcacgttttaaacaagtcatttgaaccaactcttatgctgaaaactgtatgtgatactgcagaaggcaacacactagcttgataggaaagttggttggcaagcataggtggactctggtgccttcatatatctatatatatattttaagttgacgatcttcgtgatgctgaaactgatgaagacctccgatgaaaaaagagacatgctgcacatgcacgagggtacttgcagatcgatgtcggctctatggacgaacactcgaccaagtcagatgaggagtatgagggcctagccatgcgcgacgtgatggctactggtccgacgatgagcagcaagctgtgagttaaagatgaactcacctgccctggagagtaacatccataggagtgaggcaaaatggctggtaccaccacaacatggacccgttcctgaagatgtccaaggaggtggtagccgacaccataatgtcttgtgtcattgtgtcaccggtcggcaacacactgcgctggtaccggcgggtgttgtgtttcttaggcgtctgcttctgtgctttgagttgtgctatagagtggttgtgccaactactgattttaaaagaaaaaggtgagctgagaatcattgttgaaaacaaacatgtaattgttcgttctcatcagttgtgccaactaccaagcatttcattgatcagaatttatcgttgctcatgagaaccaaaagtaagacacttctcaataacattggatgcaaatttctgctagcttatcttcactatcttttctcgtatcaatataacacacatttatacataatttttgtgttattatatgttttcgttgcaacgcac

SEQ ID NO: 26605 - DNA, 1084 bp, Zea Mays
gctctttcagtatccatccacttggaataatctccaccctttctgtgttttaatatttttaactttttttttgaaggatcacctgaccacctctcactagaagaatttgtttaggaagaagcatgtgacggtttgttgcttcctatcttctagatgctcaaagtggaatgagtgtgtcccctagagttgctgcccaggatatgaaagaaagccaagaagttaaagaagcactgagagcgcagatggaagtgcaacgaaggctgcatgaacaagtggaggtccaaaagcgcgtgcagatcagaatggaagcacttgagaagtacatcgacagtatcctagagagcgcatgcaagatggttactgaacaatttgcttcgagtggcttcagtatctccaaccctgatctcccggagatatcccctggaggggtcatgtgtggctccacggacacgttgggctcgtcggtgttgaaccagctttctgtgagctccatcgactcgcacagtccaggaggcaaaccttctccatcaggcatggaaggtccgacactgctccagaagtcgcctgagctcaagcggaggtcctcttgaactgtgacagcgaattctgaggttggcggtgatggctgtctctgtggagtgtctgaatatggtggtgacaatggaaatggtggcccagtcttgtggtagctgactttctctccaggtagcaggacgtgctgtgtttgttgatcaatccaagtatcaaacggacctactatgttcatgtgaacttcctcaagtgctagttaaaaagttttcatgcttctgtcatgagattatgatcctagtagcatccttagcacacttgaaacgttgactcgtgtcctagtgtcgtttgtgttagtccatatgtgaacaatgattcatgttggaacatgctagctaacaccagatgattcaagcttcgtatttttgtctcaattgtccatgcaggcttcccagcacttgctgcaatttattcccagcacttcctgcaatttattcgacttaaaggctactgtatttagctatgaaaggtccatgctgactttgtaatacacaaa

SEQ ID NO: 26606 - DNA, 2023 bp, Zea Mays
ctgaacctaaaattttagtgttttggacattgataatgggtaaccgtgaggctatttccaagatgaacaaaatcagtgcagctgttttgacatcagtgcttacattgattgatgaatacgatttatatggtcaagtggcatacccaaagcatcacaagcactctgaagttcctgatatttatcgtttagcagcaagaacaaaggctgccatgcacgggctgcctgttattgcaacaaaaaatggggctcctgttgaaattcatcaggttctggaaaatggtctccttgttgatccccatgatcagcatgcaatcgcagatgccctctataagatgctgtctgaaaagcaattttggtcaagatgtcgagagaatggattaaaaaatatacaccagttttcttggcctgaacattgcaagaattacttgtcaaggatattaactctaggtccaagacatcctgctttcgcatgcaaagaagaccataaagtgcctgtgaagtgcaggaagcatatattcgttattgctgtagactccgttaacaaggaagatttaattcagattatcagaaattctgttgaggctacacgctctggaactatgtcagatttgacaggttttgtgctgtcgacttcactgacaatagcagagttacagtctgtaatagtacgcacaggcatgctccctactgactttgatgcctttatatgcaatagtgggagtgacatatattatccatcacagtctagtgatgtgccaagcaattcccgtgttacatttgcatcggaccataactaccgatcacatattgagtatcgttggggtggagaaggtttaaggaagtacttagttaagtgggcctcttcagtagtagaaagaagggggagaaccgaaaagcaagtcatctttgaagattcggaacactcttcaacatattgtcttgcatttaaagtgattaatccaagtcatttgcctcctttgaaggagctgcaaaaattgatgagaatccagtcactgcgttgtcatgcactgtataaccatggcgccaccaggttatctgtaattccaattcatgcatcgcgatctcaggctctaaggtatttgtctatttgctggggcatagagttgccagatgctgtggtcattgttggtgaaactggtgattctgattacgaggaactgtttggaggtcttcacaagacagtcatccttaagggtggattcaacactcctgccaataggatccatacggttagaaggtaccctttacaggatgttgttgctcttgatagctcaaatatcattgcaattgagggatttagcactggtgacatcaggtctgctatgcaacaaaagcttggtatacccacacgatgacaccaagtgcgatctattttgttattaatagaaagaaacaaagaaaaaaatggccaatacaaatatacgatacaaacacttcgtttccattctattggaaatgcccgattttgcctgccagtcgtttaatgtatgtgtgccagtgtgtggtccctgcatgggttatgaatgacattcccttggatccctgcactggaaatttttggagcgaagagcatgtcaatggatacatccagctgtacagaagaaacaaatttgttcaaatgttgatagtgaaaacattttatggaagcattttcagcaacaaagcttccaatatacaaagctcacactttcacatcacttcaaagtggagcttatgattacagagcaaccctctaaaccttttttttccctttctaagaggggtgtcttatatttgtgtaaatactgtgtagcaccaatgcaccatcttgttttcttgtttcctgaattaatatgcgtaagcgtttactctctttctatatgtttttccaacagcctgtcttgtggttacatcatgaatacctttattcatctgctgctgtattggttatgaaattatagtagcaagcgtggtgctcccaactatgacttcatcatgcgtgtatagctttacattatctgcg

SEQ ID NO: 26607 - DNA, 898 bp, Zea Mays
cttttatttgcgctttggtttctacattgtttacccagtcagggatccaaaatttctgataagtcacataaccaggagacaacagatctacacaaatgtatttctcgaatccatcattgtacgcctgatgatgaaaaaccaaatctctgtgtacttgttactggagcactaggtggaaggtttgatcacgaggcggcaaatatcaatgttctgtatctgttttcggacatgaggattgtcctcctatcagacgattgcttgatccgacttcttccaagaacacatcgccatgagctttatattgagtcgtctgttgaaggaccccattgtgggcttttccctgttggagcaccatcaacaagcacaacaactactggcctgaaatggaatctaagtgaatcaaagatgagatttgggagcatgataagcacatccaacattgtgcagtcggagaaagtaactgtagaatctgatgcagatctcttgtggacaatttctctgcgaaatctgacataagcagttcctagtttgttatcttttttcttctctttcctgtcaagtggcaaccaagctcttgtacagccacttttgtgtttatgagttgtgtgtctggtaaataaataccatctgatgacaaatcgatgaggtctcatcattagacaggatgtctaccacgatcttgaactgctgatgaattatgtgaataacacgagcaggcatgatggttgtatcctctctagttgtataactgtattgttgtacttgcaacggggtttcttgtataaaattgttctcaacagttcacactgtatggttggattttgtaatgagtctggcaattgggtacagtgatatatgctaatccatctgttctaatgtaagacattttagattttct

SEQ ID NO: 26608 - DNA, 1019 bp, Zea Mays
ggatactcgtaatctaccaacgacagctgatcataactcaaccgatgacggagtgggatggtggaaggaggagcattttagtgctgcagatatggatggtgatggctttctaaatcttactgagtttaatgactttttacatccagctgatactaccaacccaaagctaatacattggttgtgcaaagaagaagtcagggaaagagataaagacaatgatgggaagctcaatttccaagagttcttcaacggattattttactcaattcgacactatgatgatgaaggcttaacagatgacaccggtggctctgatgcaccagctaaaaagtcattttcacaccttgatctggataatgatgggctcttatcagcagatgagctaaagcctgtaattggtaatctccatccatcagaatacttctatgccaagcaacaagccgactatgtaatatctcaggctgacacgaacaaagatggacaattgagcatgaatgagatgatcgagaacccctatgtcttttacaatgctttattcacagaagatgattatggctttcatgacgagctccgttagttcccaattcaacagcacaaagctttatggaatcaccactgtaggaagtcggaagactttgttatgcactgctaagaccatttccgttttctgtctgaaatcatccatcatttgacggtgattccatgtaaaacaagcatgtttttagatgcacctattctagaagctgtgttcttttgtactacccttgagccttttttatagtttgttgtttttttaatcatatatgtacggtgaggatgtgagtgagttttgttctttcaacttcttgaatcttgatacgatacaaaactagcgtcttccagaatcacaatttgtaaaccatacaaacccaggaaagcattactgtaagccatgaattgacgttatctgtaatgattgtgcaaatcatgaaatctgccaaattcatgctttagtccctatacaaattcttctaatgaag

SEQ ID NO: 26609 - DNA, 1625 bp, Zea Mays
atgatgaaatttaagaagggaggatgttgtggcaaggcgtccaaagatgaaaatacaagaaaagataacatgatactattaggtaagagagaagcaaagcaagcaacaccggctgccgacgcgcaggtcagtacaatgagaggatcgatgttctgcggcggagatctccggtggtggatgttggccatcttcttcctctgcacactaattgctgccgcggaggagcgcgtcgtcacccatctccccggcttccagggaccactccccttccagctccgaactgggtacgtggaggtggacgaggacaatggcgtccgcctcttctactacttcaccctctccgagggctcctcagccgacgacccggtcatgctctggctcagcggcggccccggatgcacttccttcaccggcctcgtctatcagattggccctctcagtttcgaccttgacagctacatgggtggcctgcctaagctggtgtacagacctgagtcctggaccaaggtgagcaatatcatttttcttgattccccggttggagctggattttcatactctgtcaaagagcaaggatacaattcaagtgacacaaaagctgtcagccatattctggtctttctcaagaagtggtttgacgagcacccagagttcttgtcaaatccactttacattggcggtgattcatacgctggtatgattgtgcctaccgtcacttctgaaattgctaagggtttgaaaattgttggtagtaaacctacaatgaatctaaagggctgccttgttggaaatccattcacagatcaatcaaactttgatgggccatcgaaaattccatttgctcataggatggctctcatatctgaccaaatgtacaagtcatacaagaagagttgccgtggaggagacaacaggcaccaaagcatccagtgcagaaatagtcttgatgccatagatgagtgtgtcaaggatatatctgagtttcacgttctggagccccgctgtgcttatgcaagccctcaccaatacaatgttctcaagctgaagacgagtttaggtgttcagaagatgcagcagctaccagacttcactgcagaagggcttcacttgtctgagatttctacagagtgcagagtttgtgcctagatgaggttttaacttattcagcagtacaccatattatgcctaacatttcacatcataccattctttgcagacaatgctatatacactgtctagaatatgggcaaacaatgccacagtgagggaggctcttgggattcacaagggaacagttcccctatggttaagatgcaacacggacataccgtatttgaaagatattaagagttcagtgaagtaccatttggatgtgaccaccaaaggatacaaaagtctagtttacagtggtgatcatgacatgggtgtaccttatattggcacacaatcctggattaggtcacttaatttctctattgtggatgactggagaccatggtatgttgatgggcaagttgcaggatatacagtgttgtactcaaataacctcacatttgcaacggtgaagaacctccccgaaaaggattgcaagcataatattcgatcgaaggaaaaaaatcaaataa

SEQ ID NO: 26610 - DNA, 527 bp, Zea Mays
gtcagaaaacgaaggaagagagggtcggcgagaaggaagatgaaatcggagggcagaaggaagatgacagggtaggttccctagcattgacaaaccatgatagagaaggaaataatcaagatcaagatcaaaaagcaccaattgatgaccattcaagcagaggaactcatacgggcaaagctattatagaagaatccagacctaactgcgttgatgatcataagacccatagacctatgtctcctggaacactagcactgatgtgtgatgaagaagcatttgagaaaatgtgtgacgaacaagatacaatgtttacgacttctcaaaatgctgctcctcagcagacagtaattgtcaaccataaccaatctgcactgtatgcagaacaagaaaacgttgtgctgacagaattccgggattgcctccgcaagtttgtgagatacggaagaatgaaaggagcctctggcatcgggtctgtcactctgtcctctctctctctctattgcataatatggatccatctgaat

SEQ ID NO: 26611 - DNA, 3291 bp, Zea Mays
cgggcgcagggcacacggctagagcctaaaagggagggagggggaggcgcgcgagccgccaggacctgagagcggctgctgctggcgaatcgacctcctgggcccgggaagagattgggtactgtagagagaccgggtagagatagagaggccaggatgagagtggcggtggtaggcgccggcgtgagcgggctggcggcggcgcacgagctggcgaggagcggcggctcccgggtgaccgtgtacgagaaggaggactacctcggtgggcacgccaggaccgtggccgtcgaggacgccgacgccgccagcaccgtgcagctcgacctcggcttcatggtcttcaaccgggtaacatacccaaacatgctggagtggtttgaagggctcggtgtagagatggagatatccgacatgtccttctcagtgagcacggaattgggggccagcggcagcagatgcgagtggggcagccgcaatggcatctcaggactcttggcacagaaaagcaatgcactcagccctagtttctggcgcatgattcgggagatactcaagttcaagaacgatgctctcaggtacttggaggaccatgaaaacaaccctgatatggaccggaatgagactctcgggcaattcattcggtctcatggatattcacagttcttccaagaggcttaccttaccccgatctgtgcgtgtatatggtcatgcccatcgcaaggagtgttgggattctctgctttctttgtgctctctttctgccgtaaccatcatcttcttcagttgttcggtcgcccccagtggctcaccgtgaagggtcgttcgcactcctatgtacacaaggtaagggaggagttggaaagtatgggttgccaaattaaaaccagctgtgaaatcaaatctgtttcaagttctgagggaggtttcagggttacagtgtttgatggttcagaggagacgtatgacagaatcatatttggtgtccatgcacctgatgctctaaagattctaggagctgaagcaacacatgaagaattgaggatcctaggagcttttcagtacgtctacagtgatatatacctccactccgataaaagtttgatgccacggagtttgtctgcttggagttcctggaacttcctggggacgacaagcaagggggtttgtgtaacctactggctaaatctgcttcagaccacgtctttcttaaatggtacactagccaccctgtcccatctgtggctgccgcaaaggcttctcttgagcttcatcacattcaaggaaacagaggaatttggttttgtggggcataccaaggttatggtttccatgaagatggactcaaggctgggaaagctgcagctcaagatttgcttggtaaggagagtgaccttttggtgaacccaaaacagatgatcccatcgtggtctgaggctggggcgcgtcttctggtaacaagatttcttggtcaatatgtgtctgtcggcaacttggtcttgcttgaagaaggaggcactatgttcagttttggtgaagtaggcaaaaaatgccatgtgaaatctgtcctgcgagtacatgaccccatgttttactggaaggttgcaactgaagcagaccttggcttggcagatgcctacattaacggttatttctcatttgtagacaagagagaaggtcttctaaatcttttcctgattctcattgcgaacagggacgcaaacaagagtagtagcagcgctgctggtaaaaggggttggtggacacccctgctattgacagctggggttgcctccgctaaatacttcctgcgtcacatagcaaggaggaattctgtctcacaaacacgtcaaaacatctctcaacactatgatctgagtaatgaattcttctctcttttcctggatccatcgatgacttactcttgtgccatcttcaagacggaggatcaaagcttagaggcagcccagctacagaaagtttgcctcctaatcgataaggctaaagtggagcgagatcaccatgttcttgagattggctgtggttggggcagcttagcaatccaattggtgaagcaaactggttgcaaatacactgggatcacattatcagtggagcaattgaaatatgcacagagaaaggtgaaagaagctggattagaggaccacataagcttcatgttgtgtgattaccgtcaaataccaactcagcgcaaatacgacaggatcatctcttgcgagatgatcgaaggtgttgggcacgaatacatggacgatttcttcggctgctgcgagtcccttttggctcaagacggcatatttgtcctgcagttcatctcaatcccagaagaacggtatgaggaatacaggcgcagctcagacttcatcaaggaatacatcttccctgggggttgcctgccttcgttagcccggatcacgtctgccatgtctgcagcatcaaggctctgcatcgagcaccttgagaatattgggtaccattactacccaacgctgatacagtggagggacaacttcatggccaataaggatgcaattttggccctgggcttcgatgagaaattcatccgtatatgggaatactacttcatatactgcgccgctggtttcaagtcacggacacttgggaactaccagattgtgttttctcgccctggcaacgacaaattaggtgacagcggtatacactccttaagcaagctttctggcagctaataatgcgaggatctatatatatgtggtggtagctggatcagtcggagcctacacacctgaacttgagcctttttatttgtgatcgaattggacacgcagtgctgtgtacacgtcgctaactaactgtacttgcagcggcggatcattccattgcttcgatccaatttgacgtttcatcactttctgtttctgttggcgcaacgtaactccaatgattaaccttggcacatggccggctgggacgcaggagagactcgagcattcactttcgctggatatacatttgtgtattgtgtccagtctccagactccagcgctgtatgatgagctcaagaacgtagatatattgtcgtcagagtaagacaccacggtaccaaagtgctaggaaaaatcagagatatagaaagatagaggagcgcagacctaaaaccgctggatcagagtatcgatatagctgtatgcacacgtacaatataaagaggtttggactcttaagcataataccctacgtcatctatgtggtgattggttaggtgcaaatgtggatacagcttagact

SEQ ID NO: 26612 - DNA, 4399 bp, Zea Mays
ataacagaccaagtaggatgacagaacaaaggcttacaagaggatggttgatgtcagtaggagaattgatgactaccgccagcatccacatttcagtgttcttgcaagttcacttgtctcaagccgggtttcagaatgcctaaagtcatccaagttgtactctaaaaaggcagatggagagacatccacagatacatatggaatgaaatggctaaaggatgttgttctcagcaaaagatcagataatgtttttaggagtattatggttggagacccaaaaattaagttatgggaaattggcattcctgaagatttatcctcaagcctggttgtttctgagcacgtcagttcttataattttcaaagtacaaatctgaagtgcaacctgcaccttctagccaagcaagaactatttattcggcgaaatggaaagctaatgtttcttcggaaggcagaccagctagaaataggtgacattgcctatagaccattgcaggatggtgatattattctcatcaacaggcctccttcagttcatcaacattcattgattgcattatctgcaaaaattctaccaattcactctgtcgtatcaatcaatccactatgctgtacaccttttgcaggagattttgatggtgattgtttgcatggatatatcccacaatctatacgctcaagggttgaacttgaagagctggtaagcttacacaaccagctgttgaatatgcaagacggtcgaaatttggtgtcactaacacatgactctctagctgctgcacatttgttaacaagtacagatgtttttctgaagaaatctgaattacagcagcttcaaatgctatgcctttcagtatcaacaccagcacccgcagttattaaatctatgaattttcaaggttctctgtggactggtaaacaacttttcagcatgcttcttccttcaggcatgaatttcagttgcgatacggagttacatatcatggacagtgaggtgcttacctgctcactgggttcttcttggctacaaaataacacatctggtcttttctctgtcatgttcaaacagtatggttgcaaggcacttgacttcctttcttcagcacaagaagtactatgtgagttcttaaccatgaggggtttaagtgtctctctttcagatctctacatgttctcagaccattactcaaggagaaaactagctgagggagttaagttggcactgtatgaagctgaagaagcttttcgagtcaagaaaatattgttagatccaattaacataccagttctgaagtgtcacgatgaaactgaagatgtaacttacagacaatctgattgtatccagagcaatccatcagttatcagatcttcaatcatggcatttaaagacgtcttccgtgatctcttaaaaatggtgcaacaacatgttagtaatgataactcaatgatggtgatgataaatgcaggaagcaagggtagcatgttgaaatatgctcaacaaactgcatgtattggtcttcaacttccagctagcaaatttcccttcagaattccttcccaactctcatgtattagctggaatggacagaaatcgttgaactatgaagctgagagtactagtgaacgtgtgggaggtcaaaacctttatgctgtgataaagaattccttcattgagggtttgaatccattggaatgtcttctgcacgctatatctggcagggcaaacttctttagtgaaaatgctgatgtaccagggacattgacaagaaaattaatgtatcacttgagagatatacatgttgcctatgatggaactgttagaagttcttatgggcagcaaatagtgcaattctcttatgatagtgttgatgacctagtagataaactcggcgccccggttggatgtcgggctgcttgttccatttcagaagctgcatatggagctttggaacacccggtcaatggtttagaggactcccctctcatgaatctacaagaagtatttaagtgtcacaaggctacaaattcaggggatcatattggtttgcttttcctgtcaaggcatttgaagaagtacagatacggtctggaatatgcatccctagaagttaaaaaccatcttgagcgagtgaacttctctgatttggttgaaaccatcatgattatatacgatggacatgacaaaataagaaacgaaggaatgtggaccacccattttcatataaacaaggcaatgatgaagaaaaaaagattaggattgagatttgttgtagatgaacttgcaaaagagtatgacaccaccagagatcagctaaacaacgcaatcccatcaattcgtatctcaaggagaaaatgtttagtaggtgacgagggtgttaaaagttcatcatgctgtatcgctgtcgtagcacatgctgaacgcaactccatctctcagttggacactatcaagacaagggtgattccaagcatactggatacactgctgaaaggttttttggaatttaaggatgttgagatccagtgtccacatgatggtgaacttcttgttaaagtttgtatgtctgagcattgtaaaggggggaggttctggcctactctacaaaatgcttgcattccagtaatggagttgattgactgggagctgagtcaaccaagcaatgtatctgatattttctgttcatatggcatagactcagcatggaaatactttgttgaatccttgaaatcagcgactactgatactgggaggaacattcgccgggagcacttgctggttattgcagatagcttgtctgtaactgggcagttccatgcattaagcagtcaaggtttaaagcagcagcgcactcggttatcgatctcgtctccattttctgaagcatgtttttctaggcctgcacaaagttttataaatgctgcaaagcaatgttcagtggacaatctgtgtggaagtctcgatgcagttgcttggggcaaagagcctttcaatgggacgtcagggccttttgaaattatgcactcgggaaagccacatgaaccagaacaaaatgagagcatctatgatttcctatgcagctctaaagttcggaattttgaaaagaatcatttggatacccgtagacaaagtactgaaaatgcttcgatatgtagattagcatgcaagtcttctaaaggcagtacgaccgtcaatggtgttgctataactatcgaccaggactttcttcatgctaaagtcagtatatgggataacattatcgatatgcgtacttccttacaaaacatgctaagagagtacccgttaaatggatatgtggcggagccagataaatcacagttaatcgaggccctgaaatttcattccagaggtgctgaaaagatcggtgtgggagtaagagaaattaagatcgggttgaatcctagtcacccaggtacaaggtgcttcattttgctgagaaacgatgataccactgaagacttttcttaccacaagtgtgttcagggtgctgcagactctatctcaccccagctcggaagttatttgaagaaactatattacagagcataagcttatgcaacactcccactagttcatttttttaactaaaacgtggcaaataaaaaagaacggatggagtaggattttggaaagtgttcctggcaacatcttgttctgatcagaccatattaccaatttctgataaggaaactacgtgtcgcattttaaggatgaggtgaaaactgaaagggtctggcgctcagaactcagaaggtcttctggactggaggtgtatgtcaactcaactcaatgggactatgtaaggtgggcctgagtcatgactgcggtttcatgcctgcaattctctagtcagtagtataaatactagtctgcgtgttttctaatatgaagatccatctattttattacttaaccatagcgtagatgattggtaacagatagatacattttatttactgattaaaatgcagcagcgactccccgaacttaaaacaggtaaacgggtgtggaaacttagtggctcattcaaaactgtctaaaatcgggtttgctcaaacaaagtgtcgacatggcatgtcatgttgaaatcatttgagtctctaaatttggtttacagacttttattagtgtgcttcaatcgtagcacaccaaatcagtattcggtttgagcatccgatttctgatggttttgcacaggccggccaagttatatgatctagttttttaacttaggggatctaattgatacaacatgccaagtttaagaatggctattgtatcttactcttatttattgaacaagtaatgcacattcccagtcagccgagcggctttgcgtgatgaatttgatgaactacacaagttaaactaagctacaca

SEQ ID NO: 26613 - DNA, 2012 bp, Zea Mays
gtctctcttcctcctcctacctcccagtcccacctttctttctttcttttttctttctttttgggtttctctttctcctggtccggtccgggagacctgctggaccagacggtgccgactcactgcaggcgttcgcttgacagccttcctattacgagacgagctcttggttttccgcagacacggactctaacaagcgagggcctgtcatggcctggcctgctgttaagtctcgtctcctgcgtgactgcgtctctcttctctctctctcgctctttctcccggagtagattttattcctattcattcctcgtgtgagtgaggtccctccgctcctcctctctctctctctctctccctctccgcggagtggagccggagtcgagaggcaggcagacgagacgaggaatgcttccttcttcccatgccgccgccgtccctgttcttctcctccctccctaattccagtgctctcacgtaccagatctgaggccgcggcggagcgtgacgacgacgaagtcggtcaggatgagccgcgaggataccctgaaagtgcagaccctcgagctcaaggtgaacatccactgcgacggctgccttaagaaagtcaagaaggtgcttcacaagatcgatggggtgtaccagagcacggttaatgcggcggagggcaaggtgacggtgtccgggctcatggacccggacaccgtcatcaggaagctgcacaaggccgggaagccggcgcagctgtggggcgccaccgccaagcctgccgtggcgacccagctcgagaaactgcagctcaaggatgccgggggcaagggccagggccagccgcccaagaacgcaggcggcaagggtcagccgcccaagaacgccgccggcaagggccagggccagggccagaagcagcagcagcccaagggtggagcgggcggcgccggcgccggcgcgaaagtggtggcgctgccgcactcgcagccgacgccgcagcagctgatgcagatgcagcagcagatgcagatgaacgggatgaagtttgctcatccggagctcatggccatgggcgcaggtcgcatgccgatgccgatgccgttcccggcggcagcgcaggcgcaggcgcaggccgccgcggccaaggaccccaagaccgtcaagttcgacctcccggggggcgaggagttcggggacgacggcagcgacctcgacgacgagttcgacgaactagacgacgtggatttcgaggacgacggcctcgacgacgacgacgacggcgacctgtacgacggccccgggatggtgatgaagcccatgggcatgcccccggccgctgctgccggtggcggcaacggaaacggcggcggcaagaagggtggcggcgggaacgaggtcccggttcagatcaatgggaacgccgccggcgtactactacccgatgccgcagcgccacccgcacgacagcatgttcagcgacgagaaccccaacgggtgctcggtgatgtgaggcgaggcgcggcggcggcctgcggggggctccggagaaagtgaaccaggcaaccagccagccagccaaccggaaggagggagctcgggcccgtcaggtcggaggcggccgccgtgagtggaagagtcgtcgtcggtatacatgaagaaaaaaaaaactagctatatgctatagcaccagccgtaacctcgccgccccatttcgttttcgtctttcccctagtttgttttcacctttggtactttttgtttcccttctctgaacaaagaaagagcggcatgcagcttcctcttccttgagtggaaggtaggtatagtggtaacaacaatgatagtggtgatgctagctgatggctgtcttccttcgcttctttctttcttgcttgcttgcttgcttgcttgcttgccccatatctaatgaatggacaatgtgcaagagcagtgcctctctctgcctgcctagcttgttgtgtgagagagacagagaagaatcatcatggatggaggtagat

SEQ ID NO: 26614 - DNA, 1740 bp, Zea Mays
gtaggtcgaatgtggaagtggatcttggggttttgccgcctcaaacgaaaaaaggggaaggcttggggctttgcgctgccagcgcgttcatctgccgttcttgggactgcggccactagtggtttgcaaattgtttgtgattgttgcccctttgttggggggtctttgggtgcaagttctctgctatttgggaaatcttgctgggccttttgagtttatgacatttgcaggttctataacagaaaattatctttggaaattctgtgcttttcagggaaacaaaagagtaggaggagttgaaaaggggactgaattgcatgtcagagggatctctgttggcgtgatattttcgatttgtgtactcttctttgggtgggaatttcagtttatcttggggcctagaggagggaaactaaagttgcagctttgtggtgttctttttaaattcccacttttcctccaaattctctactttcgaaaatgcgctctttcaatttatctttcagaatccttgctttgtttttcactttttcttgcttgctcaagctcttctcatcttcttctctgctctccctgctttgtttttgttgtattttgtacaaaacattttgatccgtcattatcttgctcaaattctgtaactttcatcccaaagttcgccagaattcgtttcttttttattttgttaccagtagagcatctcctgatctacctcttcgtcgtgtttggtaaagactattgagctcaggtgtgttgcgttgtgcagagcacaggtggtgggatggccaccagtctgcaactaccgcaagaacacgatgactaccacccagctggagggcagcaaggaggatggtgatgccaagcagggtcaggggttcctgtacgtcaaggtcagcatggatggcgcgccgtacctcaggaagatcgacctcaagacttacaagaactacaaggacctgtcgaccgcgcttgagaagatgttcagtggcttcagtactggcaaggacggctcatctgagtaccgcaaggatggtgaatatgttctgacttacgaggacaaggatggagattggatgcttgtcggcgacgtaccatgggactccaagggcagccgataagtccaagaaccgcaactagaacggtggcttcctatccttacacagtccggtacgagggaggagatgcagtgacttgtagggatctgtacgaaaaccgaaaaagtctactaacagctatgacttgtgagaagaattctggcttatggtctgcactagaatggcttggtacatcgtctatggacaaaacacgctattcgattaattgttgttaattaagccttggggggggtacgagtgctattcatgtaaatggtttggtgcatcgtgtgctgctgctgcctgctgctgttactacgattgagctcccctataatactatgatttgaagagagatggcgatgtcatatgatcccttggaatcgggctttactgcctactcctttcgtggtggtggtgcctgttagttggtggtgtgcatgtggtggagaagacgcttgagatgctggttctgttcttgaacttccttgcctcgtttctgccggtgctgtgctgtttgtgctctggggagaggatattccaatgacaagtcccagcgtgtgaaacagaacagacgaagctgatattctgccgggaggcaattaaaagaatgggtctcactagctgataacctacctgtttgtgc

SEQ ID NO: 26615 - DNA, 3603 bp, Zea Mays
aaaaaaaccggcatcactcttgtagtcttgtggcccctactagctaacggtaacagtgacggggggcgcgagttcaggaagaagagcgagtcagcgagaggcaattccgctgccgcaattcaacacgcgaggctaaaaacaattcgaaacccccgacctacgccgagtcgccgagaaaacaacagtgctccggcgcttagagaagagcgaaaggcgagcgcgcagcacagcacggctcccgtgggccgtggcggaggcaaaaaccccgacccgcattaccccgaaaccctccgattcggcccggggcgagctcgaatccgtgcaacctcgccgccgccgggctcgatctgagccagggctaccgcgcgccggcgaggaatgaggagcgtgaacggcgaggtcgaggggacccacgaccacgaagctaatcggcgtggtcagctgatcgaatggatgaacgccttactcccggaattcagtttgcctccggattcatcggatgaagagctacgagagctgctcagtgacggcgtggtcctgtgccgtgttgcgaacacactcatcccgggggttcttgagggatcctgggacggttatgcaccgtcggatcaacggttgggcaatctgaacaaattcctctcagtgattgctgatatggggctgccaggtttcagtgtgaaagatcttgatgagggatcaatgtctcctgtagtggaatgtctcttggttttgagagacagtgtggatcctagattaggtgacgatattccaccagatgttaccagaactcctttgagaaaacaatggggagttccggaaatggacaagcctcaagttcatggtgcagcactagggaaaagatcccctgcagaggacaagagaaatggcgttgcagatcccaaagcccatcagaaaacttctgtcttttctggacaaaagttttgtgatgttttccaattaaaacacggatcatattctggacctgctgctgccaagatttcagagatgatgcactctaatagcttagataatgcaccaacacagtcacttattagtgttgtcaatggcattttggatgaaagcatagaaaggaaaaagggagaaataccacatcgtgtagtttacttactgcggaaagtcgttcaagagattgagcgccgtctctatattcaagcagaacacataagaagtcaaaatgttatcatgaagagaagagaacagaagtactgttcaaaaattaaagtacttgaaatgttggtaaatggcacaaatgaagaaaaccagatggcaataaacaggcttcagatagtcaagaatgagaagtcaaaaatcgaagagaggagaaaacttagtgagcaagatgttcatcgattgatgagagagaaagaacattctgaaaacatcatagcaaacctaaagaaagatatagaagccatgaatagattgcatgaacagcaacttgagcaaactgaaagaaaggcaaaggaaatggaggagcaactaaccaccaaagtaaaagaagtagagtatctcttgctacaatcgaagaagaaagttgaagaagttgagactgcttccaggctaaaatcacagttatgggataagaaagaggacaattttcagagtcacatggataatcaacaactaattatcaaggacataagaatattgtcgcgatcatgtgaaaatgatatgtatgcacttcaaatgcagtggagaaatgagatctctaacttaggatctgggttaaaatgtttggttgatgctgctgaaaattatcataaagtcttggcggagaaccaaaagttatttaatgaagtgcaagaactaaaaggtaatataagagtatattgtcgtgtgaggccatttctttcgggtcaagacaaaaagtctactacaattgactacatgggggaaaatggtgagcttcttatatcaaatccatttaaacaagggaaggacggacacagattgttcaagtttaataaagtgtttagtccatttgcttctcaagctgaggttttttctgacatacaaccactaatccgatcagtcctggatggattcaacgtttgtatttttgcatatggtcagactggttctggcaaaacttacaccatgagtgggcctagcacatcgaagcaagattggggtgtcaattatcgggctttaaatgatttgtttgatatttcactaagtagaagaaatgccttctcatatgaggtgggtgtacagatggttgagatatacaatgaacaagttcgtgatttgctatcaaatgatattgcacagagaaggcttgggatttggagcacttctcaacccaatgggcttgttgttccagatgcaagcttgcactcagttaagtcgacatctgatgtattagacttgatggaaattgggcaagcaaatagagcagttggttcaacagcactaaatgagcgaagtagtcggtcacacagtattctaactgtacatgttcgagggttggatttgaagaatggatctacctcgaggggttgtttgcatcttattgatcttgctggtagtgagagggtggagaagtctgaagtaactggggatagattaaaagaagctcaatacatcaacaaatcactttctgcgttaggcgatgtgatttttgctctgtcacagaaaagtatccacgtgccttatagaaacagcaagctaacacaagttcttcaaagttctttaggtggacaagcaaaaactctaatgttcgttcaaataaatcctgatgttgagtcatattcagaaactataagcactttaaagtttgctgaaagggtgtctggagtagagttaggtgctgcaagaagcaacaaggagggaaaggatataaaagagctactggaacaggttgcgtctttgaaagacacaatttcacgcaaagatatggaaatagagcagctccaagtcatcaaagacaaagcaaaatccccaaatttattgttagatagaaatgggcctggcttgacaaagattacagtaaaccaacctagccaactattatcaggcgaacgaatgctcaagtctagtgacagagttctatcagatcctcctgataacagagattctaaccataatttgacggatactgctccagtgagcttagatgaagcagaatatgatggcaatgcatctgatgatggtttatcaggtgaagccgagaattacaattcagctgctgagatgacagcggaacggttgcatggaattccatcaagaataagcagattcactctcacaaaaaacgggcaaccatctatgtctagatcaaaatcaaaggatgctaagactccaagtaatgcaaaagctccatctagccagttaacaggaggttcttcagccagggggtctaaaagatggcagaagtaaagcacgatcatgttgctcgtgttgatgcacattgtaattgaaatgtgaatttgctgggtagctgtgttagaaagttaggcatttttagttttaatttaatccagaaaaacagtgcgatatatgtgatgacatgtatgtgcatgtgtgtataactactcgcataagcagtaaacaacaatgaaacatgcacaaatacgaagaaca

SEQ ID NO: 26616 - DNA, 2225 bp, Zea Mays
ttctgccttcagcttcagacccgttccgtgctatataaatccccacgatgggaggggttgcccaccccacccatcatcagtcagtcagtcagcagccgcaacctcgtacaatcacgaaagcagcacacgagtccacaacagcaccccgcctctttttcttcacgtgcgttgcgtgccctgcccccatggagaccctcctggctggcaaccccgccaacggcgtggcgaagccgacgtgcaatggcgtcggcgccctgcccgtggccaactcccacgccatcatcgccacgccgccggctgcggcgacgctggccccggctggcgccacgctcggccggcacctggcgcgccgcctcgtgcagatcggcgcctccgacgtcttcgccgtcccgggggacttcaacctcaccctgctcgactacctcatcgccgagccgggcctgaccctcgtcggctgctgcaacgagctcaacgccgggtacgccgccgacgggtacgcgcggtcgcggggcgtcggcgcctgcgccgtcacgttcaccgtcggtgggctcagcgtgctcaacgccatcgccggcgcgtacagcgagaacctccccgtcgtctgcatcgtgggcgggcccaactccaacgactacggcaccaaccgcatcctgcaccacaccatcggcctccctgacttctcccaggagctccgctgcttccagacgatcacctgctaccaggccatcatcaacaacctggacgacgcgcatgagcagatcgacacggccatcgcgacggcgctgagggagagcaagcccgtgtacatcagcgtcagctgcaacctggccggcctctcccacccgaccttcagccgggatccggtgcccatgttcatctcgccgaggctgagcaacaaggccaacctggagtacgccgtggaggcggcggccgacttcctcaacaaggcggtgaagccggtgatggtgggcgggcccaagatccgggtggccaaggccagggaggcgttcgccgccgtcgcggacgccagcgggtaccctttcgccgtcatgccggccgccaagggcctggtgccggagcaccacccgcgcttcatcggcacctactggggcgccgtcagcaccaccttctgcgccgagatcgtggagtccgccgacgcctacctcttcgccgggcccatcttcaacgactacagctccgtcggctactccctcctgctcaagcgggagaaggccgtcatcgtgcagcccgaccgcatggtggtcggcgacggcccggcgttcggctgcatcctcatgcccgagttcctccgcgcgctcgccaagcgcctcaggcgcaacaccacggcgtacgacaactaccgccgcatcttcgtccccgaccgcgagccgcccaacggcaagcccaacgagccgcttagggtcaacgtcctcttcaagcacatcaagggcatgctgtccggcgactccgcggtcgtcgccgagaccggcgactcgtggttcaactgccagaagctcaggctccccgagggctgcggctacgagttccagatgcagtacggctccatcgggtggtcggtcggcgccacgctcgggtacgcccaggcggccaaggacaagcgtgtcatcgcgtgcatcggcgacggaagcttccaggttcggacggaggagcagctcaaggaggcgatcgccacggcgacgggcgccaagaaagactgcctctgcttcatcgaggtaatcgtgcacaaggacgacacgagcaaggagctcctcgagtgggggtccagggtctccgccgccaacagcaggccgcccaatccccagtgatgagcccgtcgatcggtctcgagcgttcctgcaatggcgcctgcgcctgcgtctgtctgccctgaaattttttcgggtcgtttactcgttttcagtcagttactcagtttgtccgtcttcgtcgagcagaactacatccctgctgagggaagctgccaatctttatcctacgatgataatgtttgcaatttcacttgcttccaattgaattctgttataaatttttgcaacatttttttcccgcatcaataaaattcgttcgcgacgccggtctccttggagtcctcggttactgtgcgccgggtgtgtatccgcatgaccaatacggatttacgtctacaataggtgatttaggactagtttggcaaccttattttttcaatagatttctattttttc

SEQ ID NO: 26617 - DNA, 1458 bp, Zea Mays
cagtttctcaataatttgaacatccacccgaatgccgacgacgcccaccgcaccaccccaaagcccacaggaggaagacctagctagacacctgacctagggtttcccttccttggtctccttctccagggccgggagggaacccgtccatctctgagagccgagatcgctccatctcccccacatgccgctccgggagggagccaagcgtgtctccagcgcgcgccactatgcccccgccgcgccaacacccgcgcccgcgggggcacccgtcccgccccaccgcccgccgcgatctgtctccgccgctggctccatatccactgcctccgcccgcaagccgccagagccgcttcgaagggccgtcgccgactgcctctcgccgcccgccccgcacacccatggcccagctgcagccgccgcttctgccaccgcggaggcttcacggacgctccgggattatatagccaacccttcaaccatggatatggcttataatgtcctcattgaccatgcacttgcagaaagtgatcgtagcccagcagttgttccgagatgcgtgtcattgttaaagagatatcttatccggtacattccaagggtgcaaactctgcgacaaattgatctgttttgtgcgaatacgattgcaaaatgtgaaccgatggcaaataatagagcagcatcttttgccaagaataatgtatcagcagcagctgcaataaattcttcatcccttgccccaccaatatccaactttgcttcagcatctcttgtgaagtctttaaactatgttcgctcattggttgcaaggcatactccaaagttgtcattccaatcaatagtcgcggcaaagcagtcacttccttcactttcatcatttctgaataggtccttactttctcaactaactccagaagttattagcaacagagaacatcttgaatcgaaggaatgccatagctcacctgattttatatcatcagcaagtgaaaaagttgatgtgggtgaacctgtagatgatagcaaatatatatccttcgacattttaagctggcgatggcatgtgtatggcgaacggcagtcgtccttatctgccaaagaaaggtagataccttgttcttgtagttttttgtccccatttttttttgttttgcaaacactttctcattttttgtttatcagaagcagtgattttgtgggtcttcaagattttcatatacatggttttcttgaagtcggtgctgcagctcttctagttggggatatggatgcgaaaattaatgatcaacagtggaaatattctgttatccaggaatttccagatattgatttgttacaaccttcatcttctgccgcaagtacttttgcgtcatcacaaagtcatttaaaagcaataactgcttcaaaacgcatgagatcagctccaaatcaagtctgaaacgattatctgcatctgcc

SEQ ID NO: 26618 - DNA, 1425 bp, Zea Mays
ataacaaccgcgagggaaacaacagatcccgctcccgcctctccgttctactactactcctttccggcggaccggcggcggaaccgcctaagcaaaacggatggccccgagaggcggccgcgaggaggctagttctggctccgaggatgaggaagaggaggccggtttctccaggagctacttcctggccaaggagaaggagccgtcatccgtgaagaagcgcgcccgcgccgccgcaggtgttgcgtgcatcccttgcacagatccccccgaagcacaaggaagaggtggagtccctgacgagaagctacaaggaccagtaccgcaactggctgttcgaactaagatgcggttttggtctcctgatgtatgggtttggatctaagaagcagttgctcgaggattttgcctccaccaccttgactaatttcactgtcgttgtaatcaatggctaccttccggccgtcaatttgaaacaggtcatagcaacaatagctgaaatgttctgggatcaaacaaaagctaaacgcaggaaacgtgcaggaacaaggtcccagttgtcacagcagtttccgtcacaatcaacagagggtatcatctcattcctaatgagacagacatctgacgatgtggatgatcacgtgtgccttcttattcataatattgacgggcctgctttgcgtgatactgaatcacaacaatgtctagcacaaatttcttgctgcccacaaatccgtgtcgttgcatcaatagaccatgttaatgcccctttattgtgggacaagaagatggtgcacaaacagttcaagtggagctggtaccatgtcccgacattcgcaccttacaaagtcgaaggcgtgttctacccattgatccttgctagtggtggtcacgcccaaaccacaaaaactgctcttgttgttctgcagagtctgacaccgaatgcacaaagcgttttcagagtccttgctgagtatcagttggcaaatgagaaggaggaaggtatgccggtcagcagtttgtatacaaaatgccgtgagcgctttctggtaagcagccaagtgacattgaatgcacacctgacggagtttaaagatcacgatctggttaagaccaggaagcactctgatgggcaagattgcctccgcattcctcttgtttctgacgcgctggagaagttgctgcaagaattggcttgacattttgcattagcgcatttatttttcatggatgatggatgggttcactgaagtatttgtagttttctctgcccacgtggaactgaaggatcttgtccttattgaaggaaaatgtattaccatggaaagaactcagatgagcatgccattgcatggattatttataactcggattccggaactgaaagcatgttgcatgaaccgctctgctttgttggcttaaact

SEQ ID NO: 26619 - DNA, 1048 bp, Zea Mays
cggaaaaaaaatcccattatggacggcgactggtactttttgttcgcggggacggcgactggtactttttgtcgctgcggagacggggagtcttccgactcttccccaacgggaattcctcattcacatccctacgcacgaacggaaacgccccatgctgcgctcgcagtctcgcatggactccaccactgctgctgctaccgcggccgcggctgcggcgccggcgccggtgctgctggtgacgaacgacgacggaatcgacgcgccggggctccgcttccttgtcgaccgtctcgtcgccgcagggcgataccgcgtactcgtctgcgcgcccgacacagacaaatcgggtgtgagccactgcatcacatggcgccctgcactccgctgtaaacgtgttgatataataggtgctacagcatttggagtttcaggaactcctgctgactgtgcttctttaggcatctctggaaaactatttgatggtttggttcctgatctggtacttagtggaatcaacattggaaataattgtgggtaccatgtgtaagtatctttgttgctacaaacatgatcttgaacatattactagagttgagaagtcctcattcctcaaaattgtatgttggaagttgtgacaacaacaaaaacaacaatgaagccttttagtctcaagcaagttaggataggttagagttgaaacccaacataaaccataagtcaagattcaggcacatggatagctatttttcatacactcttagtcaagactaaatctttgggatcccactatgcaccggtgcctctagaggtctccgttgaacatgtccaaaccatctcaaccggtgttggacgagctttttttcaattggtgctatccctaacctatcacgtatatcatcgttccaaactctatcccttcttatatggacacagatccaacacaacatacgtatttctgcaacacttatatgttaacatgtctgtttttttgtaggccaacattctgcatcatgcaacatatcaggattgatcttaaataccaaaa

SEQ ID NO: 26620 - DNA, 2048 bp, Zea Mays
ctctctaacaatactaatactactgcatcaatgtttgtatgtatagagagagcgcaccttatattataggtatagaataaaaagtggttacgccttatattatgggacagagggagtatctagctagctagttagttattgtgtgtgttgctcacctcagtacttctgcctgttcctttgccgccttgctctgcagggagatacccaaggaggtttacaacaacttggacactggcagccaggatgagaaatggtgggagggagtggacctccaaaagctcattctggctcacaataatcttgaggtgttaagagaagaccttaggaacttgtcttcgcttgttgttctaaatataagtcacaacaagatatcttcccttccagcagctatcggagaggttgacttctcaaacaattgccttactgagcttccacctaacctcgccacatgcccggacttgtccgaactcaaggcatcaaacaacaacatatccagagtaccagatgtacttgctggctgttccaagttaagtaaattggatctagagggtaacaagcttgtggcactttctgaaaacatgtttgtgtcatggacaatgctcacagaattgaatctcgcaaagaatctacttacagccatcccaggtagcattggagcacttccaaaactaatccgcttggacatgcatcagaataaaataacatcgattcccccttccataaaaggttgctcttcgctagccgagttgtatatgggaaataacttattgtcttcaataccagctgatattggcacgttatcaaagttaggcatacttgatctccattctaatcagctaaaggagtatccagttggagcctgcaacctcaaattatctttccttgatctatcaaataactcattatctggtctaccagctgaactaggtaaaatgactaccctaagaaagcttctgcttactggaaatcctatgaggacacttaggagttcattggtttctggaccaacaacaacattgctgaagtatctgcgcagccggctttcatccgatgaggaagcatcaggatccagaagcaccccaactaaagatgaccaaattgctgcagcaaggcgcttgtccttatcttcaaaggaactggacttgagtggccttggagtgaccagtgtaccagctgccgcgtgggagacaagtgatgtggtgaaactggatctttctaaaaattcaatagaagatctaccaaatgagttgtcattatgctcatcacttcaatccttagttttgtctaataacaagataaaaaggtggcctcacacagtggtttcctcccttccctgtctgtcttccttaaagctggacaataaccccttggtagagatatcatccactgatcttgtgcctctgtccaaacttgaagtacttgatctaagtggcaatgcttcagcacttcctgaaccttctgcagtttctgcattaccacagctgcaagagctttacctaagacgaatgaaactccatgaatttcctaatggtttgctgggcctaaaactgcttaggattcttgacctgagtcagaatcaccttacaactgtgccggagggcatcaagaatttcactgcactcattgagcttgatctgtctgacaacaatataacagcactcccagcggagctgggattgcttgaagctaacctgcaagtgctgaaactggatggaaatccgctaagaagcataagacgaactctgttggagcgaggaacgaaagcagttctcaagtacctcaaagaaaaattgccgtctgaataatatttatagaacaaactattgttggagtaatggaataaaatgtttttttgccactgtatctcagttttctggactgaattttgtgcaaaagtatctggaccttgtgtgagaagagagctttgtgagtgtgttgttggatatactggttatagtccacatgttttattggaacaaaaatattttctctgttcaatctttacatggacacaacctggaaagatgttatccaccgttgtatcgttc

SEQ ID NO: 26621 - DNA, 3942 bp, Zea Mays
caagttcgtcgagccgaacagcgacctgcactcgtaggctcaggcgcggtttaccctgacccacatacgatagttgatgtgggtgaaatggactttttaagtccaaaataagcgtactaacaccggcagccgccccaaatctcagtcgggtcattccaatcgaaaccctagaagcgctccgccgagctccaggttcccgagctcgccgctttctcgcggagtaaaaaggccgaggccgggacaacctacttgtgctacctcaacggttcagccatggatctggagatcgttgggcggcatgccttactgttcgacgacgacgcgacggcggagctcgtcaactccggcgtctcccttgtcccctgggcggccgtcggcgcggcagacctcctcctcgaccgccacgacgtccgccacctccttgaccgcgtgccccctcgcccgcaccgcgcctactcgatggccctcctctccgcgccctcccctgacggcgtctctgagaccgagctcgatcgcgagcgctaccttgacctcccggctggcgacggcgaatacgagggttctggggatgcggctccttcaggtataaatgaatcttcctttcgcgccgcctctcttctcctctcttctcgcctctcgtatctgtaactgtcagcttctgccttatcctttgtggatatacttgagctcaagtttagtttgttccgttctacattttgatgtacctctgctgactttgccctcttatatgtttgaccatgttttaaggagtcataatcctacattattcagactcatttcaatgaagcatcaagtacaaattcaaaataagtctattaattggttgggatttcagtggtatggtcgcagccctgttgagccaaactgtataaggaatttttcagatattactcccttgtatatgacctcacacgtactgatctcttctctgctgtttgatttttttggttagcagcagactaacgttgtagtaactgtttgtttcttgcaaacaaacaaggttcatagaatatccaatcgtatccaaataacagtatcactgccacatgtttaaatttagcagtgttcattgtacatatttttttccattgtatacttttaagtttgcaggaaggatgctttgactagttcatgagcatctttaatcatttcaagtaagggactttcttctgttgctcggcagatggaatttgtgcctgcatttttcttccctactcctatttctgttatttactatataacaatcctttagctgacatttttttgcttatctaggaaatgggtcagatactggacagactgattataatgttgttcctttctcgtatggatatcccgctggttcagatgaaccaaattcttcgaacttgtgctatcgcccatcattttatgtgccagaaagcttgttgaataagctgcctccttctgagaaggtgcatcagataattgcaaggacagccttatttgtcagcgagcatgggggacaatcagagattgtattgagggtgaaacaaggagataatccaacatttggattcttgatgcctgatcatcatctccacagctacttccgctaccttgttgatcatcctcaactgctgaaggatggtgctgatgctgttggcacgaataaaggcaatactgagaatgagcatgcttcatctggcggggctttatcattgcttgggaccacatatgactcaggagacgagaatgaaggcacactcccgcgtagttcggaaggcatgaatcctgaaaatagcatgactcttgatgtgcagggccatgtaaaatctgcatcaattatgcctgacaaaaaagaaataggcaaaaatcagaatgctcctcctgcagttaaaagaaaaacaatattgatgaagaagaatcagattcttactggcaacagcatggttgctgttcagcatgaaaaggttaatgacgcaattatagcatcaagtacttccaaatcacataccaattcaggcttatcagaaataaaagaaatgatccttgaaccaccatctttcatgaaacgcacaatggagaaaataattgagttcattctgacaaatgggaaggagttcgagaaaaaactgattgagcaagacagaacaactgggaggtttccatttcttctgtcttctaatccataccactcatattatctaaagtttctccaggaaactgaagagtccaattcacatggtagaagtcctaataacaaggacagaagaggttcttctgaccggaggggcagaaactctcgtgagcgcgccgacagaagctcctgtgagcgcgctgacagaagctctcgtgaacgcgccgacagaaggtgctcaatggagcgcaaagacatcaattatagcatggaatccagtgcttctgatagaagctcatctgggccatcagagaagcagctgtatgacaaacaagggaagggtatattccatcctgtttgtggggtcaagactcggaaagttactgcagatgaagctgctgctatagtaatggcagctactcgaggactgggtgctgcaaatgactcacttaacaccatgaaaggaaccaaggacaatgttcgcacccatgttagtaatgatccttcttccagctttggaagtttctcatctttacaggaccgaaatgcactgtccaaacacatttcaaatagtgatgttgatgcttcacttacaagtagtggacagccccaaagggaaggttttggaatcattgatgatgattggattgcaaacactattgcaaaagctgctgctgcagcagcttccaaagaggcaggttctttggaagctaccatgacaaaggaacagaagctgaaagctgataggcttcgccgtgcgaagatgtttgctgcaatcattaagagtggagacaacaagatgaatgatttagctgcagcatcgaacccaactagtgaagctgccaaggccattcctgatatgaatgcctctggacttgatctgcaatctgtggctaaggaacgtgaaggtagtagctctgttctgtttgaccatgaggggccaaacttgacaaaacatagtaaagactctgatgatgaacagaacagagtgcggaagtatagaaagaaacaccaagaatccgacgaggaaaaagatgaatctgaggatagctataagcactcaaggaagaagcatcgcccagagcattcaagagaccagagcaaggatgttcacaaacataagaacaagagtcactccaaggacagggaatccagacatcatagacaccattgtagctcttcggaagatgagcatgagcatgaacgttggagttccaaatcaaggcataggcatagagatgatcaccgctactctgacgaggaacactctgatgaggaacacaggaggtcacacaagcatcggagggagcatcactccagttctaaaaggaagcacgaggaagactgataccaggttcgccggaagtgtctgtctagatcaggtgccaagtttgaatcagacaagctgtctgatgacactgcacaaatcaactcagggaacaactgaagcgccgagtaaactgagagcaaaaatcagagcaacatactgtaatattttgtatcacagcagtaacattatgtccttaggcctctgttttgtagccaattgctctttcgatttctgtatttgtttcgaacgttctaactaggtgtctgtccatcttatttgaaatcagtgacctgctcgccaagttctaactacatgctggcgtttctgatgcatgcatagctttattatttcaagtggtctacatgtagcgtcatactccgtcccaaaattcgttttagttaactaatggttgatatgtgttttaagtatgtgtctagattcattttcatgtatttgaatatagatataaaaattaatagctaatcaatggcta

SEQ ID NO: 26622 - DNA, 1412 bp, Zea Mays
ccacccaaatttgttcctctcctccatttcctcccttcgccatcatcccctcggctccgctctccttccctccccggctcaccccgccgctgccccgcgcccgtggagttcttcgatcgagtcctcggagcctggagcacctcgtccaacaatccgggaccgcacgagaagagagagagggggtggtttgacacaagtcaggcacccgtcaagattcggctcgatctgctgcgggacggtagcgggagctgggccgctggtgatatctccggccacgggcgtgcatgagcttctcgagtgccccgtctgcaccaactccatgtacccgcccatccaccagtgccaaaatggtcatactctgtgttccacctgcaaaactcgggtgcacaaccgctgcccaacttgtcgacaggagctcggtgacatcaggtgtctggcattagaaaaagtggctgaatcacttgagctcccctgcagatactactctcttggatgtccagaagtcttcccatactacagcaaactaagccatgagtcacagtgtagttttaggccatacaactgtccttatgctggttctgaatgttcagttgttggggatattccttttcttgtggcacatctacgagatgatcataaagtggacatgcactctggatgcacatttaatcaccgctatgtcaagtccaacccaagagaggttgaaaatgcaacctggatgctaactgtgtttcattgttttgggcagtacttttgcttgcactttgaggcatttcagcttgggttggcaccagtatacatggctttcctacgatttatgggtgacgaaaatgattctaggaattacagctatagccttgaggttggtgcaaatggcaggaagatgatatgggagggaacgccccgcagcatccgggacagccaccggaaggttagggacagccatgacggcctaataattcagcgcaacatggctctcttcttctcaggtggagataggaaagagctgaagctgcgcgtcacaggccgtatctggaaggagcagcagaaccctgactcgggggcctgcattcccaatttgttcagctgagctgagtaacaaggatgaatccaggtctgtgcttggtgttttgtccttgccaagctgccattgcagcctgccctaaattagttaggttgttggcaggataatgaaaatacagagttcctcctcctgtgggctggtgaatctcatgataagcaaatttttttctcgacgatacagatttgtgatgttatgtttgcctcggtgtattttgttgtctggaaataaactgttgcgcagtaactgcatttggttggctggtcattagcttgtcactctgagtttgacgtacatcatgtttaatgcgacagtggcaatgggttttata

SEQ ID NO: 26623 - DNA, 1721 bp, Zea Mays
cgtccccatcccactcgtcgcccatctgccgtgacgtctctcctctctccagcggttcccatctactacttaactcgcaggccgcggccgcctagaccttcctctcacttcgcgggtacgcagagtcgctagacgcacctcgctcgcaacttgttggactcgaaggggcaatagacagcaggcagggccccgaactgcgggaggagattcccaaggatctcgtcggccgggtagaggaagggacggggacgggcgatggcggcggacggcggcggcggggtggactgggagagcctggcggaggccacctccggggcaatcggctcgctcgtcagcaccaccgtgctctacccgctcgacacctgcaagaccaagttccaggccgagctccagacgcaccagggcgctcagaagtataggaacctttcagatgtcttttgggaagcgattcgtaaaaagcaatttttgtccctatatcagggcctgaacacgaagaacattcagtcttttgtctcctcgtttttttatttttatgggtatagctattttaaaagactctacttggagaagagtggagcaaagtctattggaacaacagccaacttgttagttgctgctgctgctggtgcttgtactgttatcgtgacacagccattagatacagcagcttctaggatgcagacaagtgtctttggaaagtctaaagggctgagagaaactcttgcagaagtacaccgcgtttgatcagttcaagcaaaggatacttcataggcagcggcgcaaaaatgcaggatcagcggaggataattccggagttgctctttctgctttctcagcttttctgcttggcgccgtctctaaaagtattgctacagtattgacttatccattaatcagatgcaaggtgatgattcaggctgcagaccctgatgaggatgatgacgatgaacctggaaggccaagcaaatcaagaacaccaaaaacaatgctaggtgccttgcatgctatctggagcaaggaaggcattccaggcttcttcaaaggcttgaatgctcagatccttaaaacagttctgagctccgccttgctgctgatgattaaggagaagatctcgaagttcacttgggtctcactgcttgccctgcggcggtatcttttcgtttctcagaagaggatcaagagtgcaactgtataaatacgttagctccaaaacacaaactagcacacatagcgacatggtgcttctggagatgttatgccaaggaataaatctgaggaataatcagcagaaatacttaaccaagagagagagaataaggtgtgtatctggggtcgatagcatcagagggctcttcaataagtttgtccatttcttttttttctctctctctctgaatctcttgtagctagtgacgtagatgttgcgcggatctgaaactggactgtacttttagcgtttgttgcctgtaattaggggtgataatgggctctgaattttacagtataatatttaaggttcggattatgattgggtcctgtttctattcatttttaattaaattttatttaggactctaagaaattgtgaaaaacatttagagcgtgatctattatcatccctacctgtaacgtgtaaaatagcagcgtgttaatattccctttaaaaaaggtaatcgatcggcagtgtgatgtaagatgtgttgtcgatcgttcccttttgc

SEQ ID NO: 26624 - DNA, 1596 bp, Zea Mays
ggttggttggcgccataaattacacgccaccaccgctcgacctaccagccctccttcctcatccgcctgccctgcccgtcccgtccgtccacccccttcccttctttcccctttgcttgctgctgcctgcttctcgccgtcgccgcctcaattccctcctcgttgtccgtcgcctcgtccacgcgcacctcgtcctcctctccgttccctccacctcctcgaccgcaccgtcgtcgtctagctagcggagcgagctgcgaccagatcggagagccaagcacccaggaagagggggccggggaacaagaagaagccgccggaagccgggcgtggacgtgtggtggttttctgccggcggctgacaagtggtgtaggctacccgctctggccatggatccgtcgggcggcgcgttcctgccgccgctgcagcaagggagctcctccttcccgcggtcctccagcaacgcgtcgctcgccaggagcggcagcggcggcggcggcgttggcgccgggcgcgggaccaggggcaggaagatgatgcgcagggtctgccgcggcgtcatcaccttcatcttcgccatcgctgggctgttcctgggagcggtgaccggcggtctgatcgggctggcgacggagagcgggctgttccgcggcaccgggatcggcgccatcaccggcgcgctcgtctccatcgaggtcgtcgactcctccatccgcctctggcaggcgcgccgatccgggatctggagcatcctctacgtgctgaacgtgatctacagcctcctgacgggcaggctggtgcgcgagaaggtcgacccggcggtgcagcgggtggtccgcagccagatgaacgcggtggactcgtcgccgttcagggagtcgccggacctgttcgaggtggaggccaccaacggcatgccgcgggcgtccatcgacaagctccccgagtcgtggatcaccgaggagtacaggcgcgacgccgtcggcgacctctccggctgctccgtctgcctccaggatttccaggtcggggagaaggtgcggagcctgccggactgctggcacgtgttccacgtgccgtgcatcgacggctggctcatcaagcacggctcctgcccgctctgcaggaggaagctgtaggcggatcgaccggacgacgccatggacgatgttcttctctgcgatcgagccgatgatgtgtgtgtgtgtgcccccgccgccgccaccaccgatagctgctgctaggatcggaggagggaggagggagaagagactgacatctatagaacccttaatttatagagagggcttttgctttgctgctacttgtacgtgctctactacgtacctattgcatctttctttctttttttgatccaccatgatcgacctccctcctcagatccatccatgcatgtaatataccctggaccggcttgtgcttcgttcgatccattccatgcatctccggactgtgatctcgatctggtgtaatatatataaaaaaaaactactagtatgtaccatcgcactttggacatctatacatgcatgctggttttggtcatatttttttagaaaatattaatattcgag

SEQ ID NO: 26625 - DNA, 5602 bp, Zea Mays
acagcactttctgaccgctggcccgcctgtcagaaccgccgggcatcgtcgacgccgccgcttgcccccattaaacccccggtctcgaggcgattctcccgcagcgctacatcgccactagaaccctccccactctacgaagcacgaagttaacgcgcgacggcggtcacaccgccgccgccgcccaccaccgctcacggccggcggcgacgcgctgcatctccgcaccgcctcctgtccgccaaccccgccctcccatccccgtacgcgtccggcctgccgcagcttccccttcacccgccaggctataagctgctagtgcttgtggaatggaagagccacagaaggacagtgggcaaccatcaaaaagttctgattctgagctagaagctatggtattggatgataatggagcgggaaaatcccatagtatggaggaaaacagggattctcctatagatgtcgatggtgggcagtcatctatggatgtggatatcaagggaaaatcatccctcagtgatgatgttaatggaaagtcttcttccgagccatattccaatgctccaattgacatgagtgtcgaaagcctagagaagttttgcaaagaagcgtcaaggtccttctttgatgaagttggtctgattagccatcagataaattcctacaatgagtttgtctcgcatgggctccaggagctttttgattcgcttggggaagtgattgttgaacctggctatgatccttcgaagaaaggatcaggtggctggaagcatgccatcatcaagtttgggagagtgaagcttgaaaagcctgtgttttggactggcaaggatgaaggttctgttgattttaaaccttggcatgctcgtctccagaatatgacatatgcttcaagacttatagtagaagtgactattcaggtttattctttggagaaaagtgacaaatctaaaacagggaatgatggttttgttcaaaaaaggaacttcatgaatgaaactcattggatatttattggcctccttccggttatggtcaaatcaaacttatgtttgctgcatagcctcaacgaaagtgagtgcctgttcgacgcaggtggatactttttggtcaagggaatggagaaggcacaagagtgataaaggctgagttgagcttatggaagttacagaactttctacaccagactgctggtgccatatgcaggcttgttgtgtttaagctatatatataggtctaaatgtgctgcagtgtcttattttgtcatatcttggagattctaatagattttcaaagtttaagtgataattattacaggaacaatgaagatctgctgatgatggtactccctgattatttgctaagttcatttggagtttccttttgggggtgtgactgtctgagttgtagcctttttactgcaaagataacatcctttaaatcatgtacattatttttcctttcatcttactatgtttctattattgttatacctgcaggtattcattgctcaagagcaaagatgtctaaggaggctttggattagtgaccgaccttgctggactatctcttttatgtctgaaatcaagcgtagacgtatatatattaaactagttgaatctacaaggagtgaagatttcagtgagagcaaaatcattaccatttcctttttgtatgcgacaatgccagtttggttgttgttctttgcacttggaatatcatcagataaggaagtgtttgatatgatagatatgcaagattgtgatgcttctgttatcaacacgatatctgcaactatcaaagaatctgataaactgtgtgaagacttccgtaaatcagataaagctcgtcaatatgttgatgagttggtaaaaagttcgagatttcctccagcggagtcctttgatgactatattgctaggtttctctttcctgatattagtggaaatagaaacaaagcacttttcttagggtacatggttaaatgtctgctaatggcttttactgggaagcgtaaatgtgataataaggatgatttcaggaacaaaaggctggacctacctggtgaattgcttggaagggaacttagggcacagcttaggctggcagagaaacgcatggttaaggccatccaaagagatttgaatagtgaccgtgagttacaagatcttgaacgttatatagatgcatcaattgttactaatggtctaaatcgtgccttttccactggttcttggtgccatccgtacaaaagagctgaacgatgctcaggaattgttgcgactctaaggagaactaatcctcttcaaatgatgtctgacttgaggaaaacccggcagcgggttgcttacgctgggaaagctggtgatgcaagatatccgaatccatcctattggggaaagctatgctttatgtccactccggatggtgaaaactgtggacttgtaaaaaatctagctgttactgctattgttagctcaagggtgatgcagcccttgattgagagcttcatttcttgtggaatgagtaagctgaatgacattcctactgaacacattcaaagaatggataagatctttttgaatggcaattgggtgggatcttgtgaaaattcagcttcatttgtatttcgattgaggtgcatgagacgcagcagtctgattgatcctcaggttgaaattaaaagggacaagcaccacaatgaggttcgcgtgtttactgatgcagggcgaatcctcagaccccttcttgtggttgagaatctgaataaaatcagaaaacctaaggggcgctcattctctttccatgaattaatgcaacaagaaataattgagttcattggtgttgaagaggaggaagatatacaatgtgcgtggggaatcaggcatttgtttgagagtgaaggtgcgatatctagttatactcactgtgaactggatccttcctttcttctgggattaagctgtggtatcattccttttgcaaaccacaattttgctcggagggtattgtaccaatctgaaaaacactcgcaacaagctattgggtactcaacgacaaatccacacatcagagttgatactctttctcatcaactatattatcctcagaggcctcttttcaaaacagttatagccgactgtcttggcagatcagattatgcttcttttggaagaaaaaatgatttcgcgagaccagaatattttaatggacaaaatgcaattgtagcagtcaatgttcatcaggggtttaaccaagaggattccctggttatgaatagggcttctcttgaacgaggtatgtttaggactgaacacctcaggagctataaggcagatgtagaaaacaaggatggaaccaaacgactgaaattgaaggaaaaaatagactttggaaaaacagaaagcaaaagaggacgtgttgacaatcttgatgatgatggcttaccttacgttggtgcaagtcttcagaccaatgacattgttattggcaaagtctcagaatctggagaagaccacagtattaagctgaagcatacagaaaagggaatggttcagaaagtattgctttcagcaaatgatgaagggaagaattttgctgtggttactctaagacaggttcggacaccttgccttggagataagttttccagcatgcatggccaaaaaggtgttgttggttttctagaatctcaagagaacttcccatttactcacgaaggtatagtcccggatattgtgataaatccacatgccttcccaacacgtcaaactcccggacagctgcttgaagctgctctggggaagggaatagcttgcaaaggtacaatgagatatgcaacaccattcaccacagcatcagttgacgttattgcagaacagttgcacagggctggttattcacgatggggatctgagaacgttctaaatgggcgaacaggtgaaagagtgcaatccttggttttcatgggccctaccttttaccagaggctgattcatatgtccgaagataaggtgaaattccgtaacactgggccggtgcaccccctcacgaggcagcctgttgccgacaggaaaaggtttggtggagttaagtttggagaaatggagcgtgactgcctcctcgcccatgggtcagctgccaacctgcatgaacgcctcttcctgcttagtgacttctcccagatgcacatctgccagacatgcgagcgcgtggctaatgttgtcatgaggtctgtccccggaggcaagaagatccgtggcccctactgcggcttctgcaagtcttcggagaacatagtgagaatcaatgtgccctatggcgcgaagctgctctaccaggaactcttcagcatggggatctgcctcaagtttgagacccaagtctgctagaacttgtagacctgcttgcatccagttattacatatgtacatacagctagcctatgaggatctccaagctggtgtgccggtgtgtgatgctggcatagtaaggatgggcgagctagaaaccctgttgtgtttatgtgctgttttctccctgctcatgtggtaaactatgctaaagtgaatgaacactcgtttcctgttccctctttgaatgcgctgtgttagcatgcccttttgtttgaagattgcgtcttttgtggagcaccttgtattgctccgtagggatcacaccccttaccgccggcgatggccgacgatttgagataagatataatatttctggtcgtccttgttaaagagttcatgcatatacagtacacaagaaatgtcgatcgaatatagctagtaaaacaacttcaagaaacatgtacatgcggttggatggatcctttctcatcgatgatttgtctgcattgattcatccaaatcaagatacaagaggcagcatgagatgatctgtctgtgtctgcattgatccaaatcaagacacaatagagggacagcatgaggacgaacagagacaaatccatcgccccgtgcttgagtttctccacgagctagtaagagatcagcaagatcctctctagctaactacctgagggaaacgaacagcaggggaggaccaagaagtgatgagtgggggaactccatgcgagccctctggcctctcctcccacaggctacatcttgaggacgaagaagaacagtcctcgatgcgtcttcacctagctgctgcttaatttacgagtgatgctcttcgatccaaaggtacttatactacaaatacccctccccctctctctctctgtctccatcgccccaatgcaaagccggtctttctatagctcatagctgctggaatttggacctggctttgaaacatgtcgtgcactcgcgttgggtttgaaagagatgacttgcgttgcagcgagcgagcgacacaggtcaggtcacactgcaggggggaagcgaagcacgagtgtacatgcattgaacctggacgccctctttagcttttgcgtttgggcatacagtatttttattttggccttctgggatttgggaatacgagtcatcgattccctcagtgtcgtcccgtcacagctttttttttccgttgcctttatgctgcatgcccattcagcagtcacgca

SEQ ID NO: 26626 - DNA, 1991 bp, Zea Mays
gtgtttttgaaaatgggtctccttgtctgtctttaatcttcaatcagtttgaagacgagaggagtaggtggatggccgctggtgccaagggattatcttacctggcagcccctctccctgctatttgagtgttggaggcatctttgtctcgcctggttgatggttgtgttcctatggactagtttatgcaaaacaaaatcatgttgatgtacaaagggctgctttaagatgcctttgtctccttggactgttagagaacagacctaatgcagagttggtgaagcagctacgcttatctttcatcaatgggcctgacttggttagtgccatagcatgcaaggccttgattgaccttgtaacttggcatgggccacaagaaatagatcgagccattggaattgaatcgccagatcctagctacgaaaaatctcagttcactcaagttgacctctctgatatgaatgatgatgatctaaacattggagttcttgatattttattttctggatttcataaagatcactgggaattcgatctagagggtgacaatcatgataatgtcccaaccattcttggtgaaggttttgcaaagattcttctcctcagtgggaattttgcaagtatacctgctgatttgcatactgttatcctcgctaaactcattaaattgtatttctcagaggaaactaaagagctcgaaaggtcaatcgctcatttatcctctgctacttaaacacatttgttttctttttattctcacaaatgctttcttttttctgtttcagattgaaacaatgtatgtctgtcttctttcagcactatccagcactttcagataaacacaagagttgtatctgcaacgcatttgtacctgtcatgaaagccatgtggcctggtttatatggtaatgctgggggtagcactcatgttatttcaaagagacggaaacttgcggttcaagcttctcgtttcatggtgcaaatggtgcaaacccaattattttcaaccgaaagtatggaccaagcttcaaaaagttctgaaagtgcttcaggtttagcagatgcgtcaaacaattttgacatcagcgaggaagggcttgctatccgtatagcactagaggtagccagttgcccagataagaagaccgcagctgggaaagcatatgctttggccctgtgcaaggttgtggtccttctaagattccggcaatcagaacagaaggccatcaagtgcatgagaggccttgtgaatcatttggctgcttcagtggcttccgacaaggagctcgggaaggagctagctcaaatggctgcacggcttagatcgcttgatgcctgtccagacgaagaacttgcacaagatgacgcagatgccatattcaagaaactaggattcgatgatggcttcaagttggacaccaatcaagcagtgcctcctacaccagcaccacggtcagtccggcctccggctcctgccaggagaagagcgagacaggcaccgtcctctagcgatgacagtgacgaggaagcgggagaagctgacgtgcctgcaacatcggcaagcagggttccagccactcccagtatgactgctgctgcacgttctcagagagcaagcaagactgctgctctgagcaagatgtctgcaaaacctgctaccgcgtctgatgacagtgagctggacgggcagtctgacgtcacgagcgaggaggatgcatccgatgaggagtcgttatagccttataggttgctgttattgtctcgtgtaatcgtggactggagtttctgatgacgttgttgagcggaagaaccaagtaatctaactaaattaattacagcggtgacatattgtcactgcattatgtatttctttcgtgttactaagtatgatttaaagccttcatttgcgtttgagctgcagcaatctgcacagacggttttataagcagcaagtgattagttttaaataaaagtcctgacggtggtaaattt

SEQ ID NO: 26627 - DNA, 1432 bp, Zea Mays
ctccagtctccctctcctctcttcgtcctcactcctcgacgtttcgtcggggtctctcgccgtcgctctctctgctctccaccatcctcctccccctcccctcgacctctcatcctcctcctgcttccccgcccggtcaacccataatccaaggcatccctgtgctgatggatcgattggaaatgcaggacgactcgaagagatccaataggcccaaatattctaagtttacgcagcaagagcttccagcatgcaagccactgctaactccagcaattgtcatttccgccttcttactggttggcatcctattcgtcccaattggtctcgcatcgctttctgcgtcacaagagattgtggagctggtagatagatacgatacaagttgtgtgcccgtggctgacaaagttgggttcattcagaacactaaaacggacaaatcatgcacaagaactctaactatccctaagcatatgaagagcccaattcaaatatattaccagatcggtgacttctatcaaaaccatcgacggtatgtgaaaagtcgcagtgataaacaattgcgatataaagatgctgcacacttgacaaaagattgtgagcctgaagtttatagtgctggcggtgccccaatcgttccatgtggcctcgttgcttggagtttgttcaatgatacatatacaatttcggtcaacaagaaagctattgtagtgaataaaaaggatatagcctggcagagtgacaagaagaaaaaatttggcagtgatgtttatcccagtaactttcagaacggaaatcttataggtggcgctaagctaaatgagagcataccgctaagtgagcaagaagatctcattgtttggatgagaactgctgccctcccaactttcagaaagctttatggaagaattgagacagatattatggaaaatgatgaactcacagtggttatacagaacaactataacacatacagttttggagggtcaaaagcactggtcctctcaactacatcttggattggaggcaaaaataatttcattggtttcgcatatctgattgttggtggtttttgccttttccttgcactggtttttgtagttctctacatgattaagccaaggactcttggagacacctctttcttgtcatggaataggggtaccatggactatccaagctaatacatcgaaacattctctttataaaaatagtgggattataggatccatgggtgtggatatgctcctagtgcacatttcaggaccaatctctgtgaccccttcatcctgtgttattatagttccactgatcaacaaccttgttctggagaaatcataaatcaattaaatgaaaggaaagaggtagcgaaatgaaaacacaggtcatgcctttgcaagattcctgaagtaaattgttatgtagttccccg

SEQ ID NO: 26628 - DNA, 700 bp, Zea Mays
ttatgaaacaatccaagttcagtgccttggctgggtttgagtgctggcgtgggtcaaaagagcagcaccacgtgtatacctcatgttgtgttggcgcccttggagctctcctttgctgtgttctggccagctcaagaaccactgcatctgccccctataatcagtaccttgggctgccgtattcagtgaagatttcttccttgccctcaaattctagtcaaagttcactgtttgagtgtgcagtccttgtgtactgctggtataaccctctctgcatcctaggtttgcctgtcccagaacccttctccccatggactagatacgctcacttccccatggactagatacgctcactgacacacccctttcccttgcttacatattctgtaatttggggctagttattttggagctcctcactgcccttaaattccagccaagactctttgcatatgcgaggtgttcctgatgttcttaagtctacacagcttcctccctagccaccaaaatttggtctgtacagaggctgggcacaccatcaactgttgttgtggtgaccactccggtcagtttgccgccttgccgtggccggagcgattcaagaagggtcgtgccgtcgtgatctagcactgcggacagcctccacgctggccgagcaactcgcgctttctccagctgttagacaacagccgaagaaatt

SEQ ID NO: 26629 - DNA, 228 bp, Zea Mays
cgagccacacagctgtgaagataagggcaaggtacagtgtcacaaccggggaacagggatccatccaactgctgaaatggaaaacatgcgagacgatccaactgttcacgttaccatttcagcccgaacagttcttcgatgagaggcttcgaccaatcagtggcggactcacgactcagtcttcgggcacgtttgttccagcttttatctgaccagaatttagctgtg

SEQ ID NO: 26630 - DNA, 1614 bp, Zea Mays
agacttccctctaattcccaaattttccagctaccgcctctcctgagtcgccgccccatccatcctcctcgtcgatctgctctagcctccaatcccgcttgggcatcgggcccagccaccctcgcgctagtgctaggctgctaaccatagccagtccttcctcctctcgcgtggccgcgcctgcatccggccacgggccaccgcgcacagccctagccagacaccgtgcacgacccagcctagccgcagcggtggaggcgcgcagccccaccccgccccgcacgaccaaatgaacagccgcaaccagcgaggctaggcccgcaacagcaacgcccttcgctcgccagcaacggcagtgcgtccgacatccttcgctcgcctagttgccctgcagatggccaggaccagcaccactgcggtctgcagcagcgcccctaactgttgaggataagaggaggttgacatgggatgacaagttgacaacctgctaattgcaatggtatgatttcctctattatattttgagctgctagaattaaaatgattgtatggatttgagttgtcgatctgctatattttggtcatgtaaaactacgctttgtgattaattagcaagtgtcatcaatgacatttaccggatgttcattgggaatttgggtgaaaaccgtgaaactgattctacatgatgtgattattgttttatttttcctctgcatttactttagagaactttagctgaagctcacttattccatagtctttgtgcttgctgtaagtgtaaggaaacatgccatatcacttgtcacattttcagggttcattttagcactcatttgcatcactagtacaaacagtcaaacggttaaccttcaccaagtatggtgatttcaggcatttcccttatgagcatgaacttgtttgaagtaatgaagttgccatttacagttcaattcactcttcttcaactaccaggaggattgctagcagaattgtttggccgaaggtttgtttagggtaacaaatcatcttgaatatgcacaaagtcagagtgtttatgcttatgaaaatactgatataatatgtcatctgcttatgaagtaggaactgccaactggtatatggttcataagctgaacatatccctatttgttttaacccctttacaagatgaaaatacttcatattacatagaggattgcatggaggcacctggggcctttgtcctccacctcctcaagtgcgtgcttgtcagcggtggtgtggctgcgttcctcgcccttgtgcatctttctcctattacgaccgcgtcctgcgtaatatggatacaatggaagcacttgcggccgagcctagaatagaagaaaaagaatctaagacccgtatagaagcagttgctcaagtattggcttcatcaaaatttattcaaattgttggtcttgtagctgcaaaaaagagaagcaataatgttggtgatgtgacacgtgtacaagcagcaatgttggtcttgtagcatcaagatttggttattgatgaatgatatctatgataaatatatgtgatgatcattgattatagtttaattataatgggttgtgcttcttatgctacattgcc

SEQ ID NO: 26631 - DNA, 1782 bp, Zea Mays
ttcaccagaggctgctgcttgggacctcgggtcactcagctgagcggttccaaaaatgtcaatatgccaggacaagacttgtaagaactggagggcgtggatggggccttgtggctgatgagaatattatggctggtcaatttgttatcgaatattgtggagaagtaatatcatggaaggaagccaaacggagagctcaagcttatgaaacccagtgtctgcagatattctctcgcttctcatatttgaattgtggcaaactggcacttttttagctagctataacatctagcttctgtaactgcaggtttaaaggatgcctatatcatttacctcaatgctgatgagtcaattgatgcaacaagaaaagggaaccttgcgagattcatcaaccattcatgccaaccgaattgtgagacaaggaaatggaatgtccttggggaagtaagagttggaatttttgctaagcaaaacattccttttggcacggaattatcctatgactacaattttgagtggtatggtggtgtgatggtgcggtgcctctgtggagccgccagctgttctgggtttcttggggctaaatcacgtggtttccaggaggccacgtacctgtgggaagatgatgatgacaggttttctgttgagaatatccctctttacgattctgctgatgacgaacctacaagcattaacaaggaaatcctcgtatcaagtgatggcatggttacccaatacagcaacatcagcagagtacagagtaccgaaaatcctggaaacactggaacaaatgaatttgcgccaattatcgtcgacgaactgacaagctcaaatggattagcaccaatgaacgttgaaccattgactgtaagctcaaatgagttcacgccatcgaacgccatgccaatggtagctcgtctagtcgagaatgggtcaactggatacagcgcacaggacactcacgacgcttctcagaattcagcgcccaaagctgcaaatcacgcgaaccaaactggacctcagaacaacagcaaccattcagcgttggtccctgtgaagcccgcgccgaaacgccgtggcaggaaaccgaaacgcgttgtgcacaagcagctggacatcccagatatctgcgaccggcttacatcgtctgtggcgtgcgaagaaatactgtactgtgaggtaatggtctgctatgactatgatcagaactcccttctcttaaaacagtgtagtagtggcgaacaatgtgaagtttaagacgcatgcaccatgtaatgatccatctgatctcgccaggaagtgaagaaccaggccgtttctgaaatcgatgccctgtacgacgagataaggcctgcggttgaagagcacgagagggacagccaagatagcgtctccacaagcctcgcggagaagtggatcgaggctagctgccgcaagtacaaggccgaattcgacctgtatgctgcagtactcaagaacgttgcctccactccactacggtcgaaagatgatgtgggcccaagagagcagaacgggttgaagtacctggagaacggctcatgatttttttagctagaagcgtggaatattacgtacgccttcaatttgtagtatagggattgcatttttttttaactgtggttggtcttgtatttaggtagaggcattgtaaggttacatgattttaaatagcgtggaatcatgtcaaacgcacatttgatctcgttctcgtgtttatgctgtcgacctcattctgttttgctaacaccatctgcactctgc

SEQ ID NO: 26632 - DNA, 1665 bp, Zea Mays
gcgcgcgagtgaccagtaatataacacacactaatcaaacaccacatatatcttgcgctctccaaatccctcgccgaaagcccgaaacccttccagtggtcttccgccgccaaccctcgccgctcttccgctgccaaccgttgcgccggcccgactctgtcctgaagccgtggcgtacgggggattcacttccattcgacgccatctggcctcctcttccatctcgcgggcgcttgttcgtgcgcgtggattgttttatcagggtctcgtgcccgtgccctaggtgggcgcgtccgctatgtttcctcccaaagggcccaatcactatggccagcagctgccttacggcgtgcagcagccgtacggccaaatccctagtagcactggatttgcagccccggcagcggcaggtggcactgatggtggtcggtttggtgcgcgtgcaggacaaggggctgctgcgcagtatggagggccttatgcatcagtatatggcacacaacaggttggcggacttggtggcaaaggtccagcttcttcaagtcttcctagtttcccaactcgtccaacttctctccctgagtcgtccaacttctcatctgcacctgtggggtctggcctggcaaggccaaatgatgactatatggctgtgcgtggttatgcacagaagctagaccaatatagcactgattatccactagagagacgtatgtatggtgaacactcagccaatcttggtaggagagatggtctcagtgatttggatagaagatatactgatcagacagctactggtcatcaggttcatgatcatatggagcagagttcatcaatgcgccaccagcagctcctgaaaggtcagctgcagcccggatctgatacaaggtttttccatttcgcttcgtggatgatgagagggattatctgtgcttgacaaaacggtatcccagacttgcagttactccagaattttctaagattgtcttgaactgggctaaagaaaacttaaatcttcctctcgatacaccagtgagtttggagcatgatatccatgattcagatgataatgctgatgaaggagcaattatctccactgagaaaacaccaagcttcaatactccagccaccatttggaatgcaaaggtactattgatgagtggcatgagcaaaggtgcctttgctgacataacttcattgagaagtactgaggaacgagttgtgcacttgaacaatatattaaaatttgctttattcaagaaggatcgttctctatttgcaattggaggcccttggaatgcagcaatagatggtggtgacccctcagttgactgttcttgcttgattcaaactgccatcagatgtgttaaagaaatggttcaagttgatctatctagttgcacccactggaaccgttttgtcgaggtacattacaatagaataggcaaagatggactcttcagtcataaagaaattactgttctgtttgtgccaaacttgtctgaatgcttgccttcagtggatatatggaagaataactggattctgtacaaaaaatcaaaggcagaaagggaagaactcactgttaaaaaggaaaagagtcctggtgattcgaaagagcagatgcaagtttcaggggagctgaataagggtaaaagtttagatgct

SEQ ID NO: 26633 - DNA, 917 bp, Zea Mays
attagacgttaaaaacccgacgcgatacggaacccctgcaactaagcggaaagcttcaaagggagggagggagggagggacagggagagccagagaggagggagaagaaaatggtcgcggcggcggcggaggtgtcgacggcggcgacggctagcagtagccccccggcggaggagggggagcggcgggacgagagcgagagcgacggggagatggcggggctggcggccgtgctggacttcgacatgctgtgcgcgtccgtggcgctgtcggcggagaggaggaaggccggcgcggcgctggcgggcgcggccggcgactgcggcggtggaggcggaggggtgcagaggatgtgggagggcgacgtcgtgctggattgcctagacgaccggcgaatcgcgctcgagacgtcctgctgcccatgctaccggtttggtaagaacatgcggagagccaatctcggatcttgcttccttcaggtatgttgtgtaagcttcaagtgactacgtttcttgttgccttcctaataaggcgtgaaatgcaagcagccaccatgttatttggacagcctaggaaagctgctattttcagccttgtgcagttgtgcctataccatgtagtgcttggtgtgtagcttgtttgagttgacctggcattttgaacagcattttggataatcccttattcctgtggtatgtcttagacctggtctaacttagtgacctgtcttttttatttgacgctgcatagagtgtatgttcgagtaaaatgtgcgcctgtcattcgaaatattctatgttggaggaatcagactgcacgttggacttgctggacagattggtgccagtatattttactcactttaactactctgccagccttgaaagaccaacttgattttatctttagctcagtca

SEQ ID NO: 26634 - DNA, 4658 bp, Zea Mays
tgcccgtgtgccaggcgaaaaacgtagcctcgcactctcgcaggcggcggcgcatcgagaaacagggctgcggctgttgcttcttccacctctccggccatccggcggtccatcgttccgtgccggcggcctcccctcctacgcccctgccgattcttcaatcttcaccaacgtctgcgcgtagcaggctagcagtcggcacggcttcctcagatctgccggacgacttgctgttcgtcaccgactcaccagcaaccaacgtcagccatcagccggcagcaggggaagctgggcggagggtcattgcggcacggcgtccaggcgtacagaaggcaccagcaacagcccatggcaaacgatgaccctatggcagatgaagccggagtagaagatgccttcacacaggagatcaatcattcgtacgtccctagataccatgtgttgagttggatggaaactgtggaggggatggtggccggtgtggcgtcgcttccgccggtgtatttgatactgaacagagagatatatgatacatgctcctgcttgctcatgatgccggtttggtgccaaagctatcttcttgagacgggatggggatggaagaggctggtgccctacagacctgaagcctgatccatttggatggattgttgctgaaaagagtgccctgattgctgcagccaaatcgtgcctcaagatggagaaggcacttctcaggtactgtgctagctttctcactcctgacgacaaaaggctgatcctccggatcaaggaccaggcaaagcaaatgatccaatcagagggtgatcaatctttgattgtaactatatgcttggagtgtattgcgaaggaggccgagttaatgtacaattatttgccttgtgattttgacaccaccgaagaagtcgccgtctgcaataaggttcggcggtctgccttgaatcttatgctctacaaaggttctgaatctgctgttgctgctggtgccatgatggtgtgttcctgatactctctccattcattttataggctttattttgactatgcaaaaaccaatattctgctgtaaattctccctatagtattatgttggtagttacaaaatcatagtcagtagcaagtgcttttaattaggaattgttacgtaactcacattttatgggactaatgtctggtcaaagcatgaacttggatagtcaaaccacaccttataaatatgaatatagggagtaattgtgtattttttaatcctctgttatcctgtcaagcttctttaaccaaactgcaaaaacgatgtacttgaagggtatcacaacagaggctaagtccatttttgacttgcttagtcgagaccatgacgtggtcatggaagtttttacttgtgagagtataagggaacatacagcatcagttctgacccagcttgggaaggaatttgcttgcgagactgctactgtgaacagctcatcagcgcggcctatgggggtcagtgatgttagagatctgaactctgaagtatctggttcaatggaagactgtacgagtatggatggagcaaggttttaaagtcggctagtcgactctagtcgcctaagcaccgataaggtgactaatcgcgattagtcgtcgattagctcgattagtcgatcctagtcgactccctagtcgtcctatagtcgtccatctataacaggaccatatatatatatatatatactagattgcaaatctattgacaatattacaatgaaactgtagaatgaatgaatgatcatgttttcactaaaaggtaaagatcacttagacacttaccttggattggagtatacaacagcacactgcaagattagtaggacaacacttctggtatatctccagcagccttactagtgcaaaacgtcatatatctccaacaaagcaagcagaggagggcgtccagcaagcagaggagggcggcggcgcttacagcagcagcaagcagaggagggcggcgctcagagcagcagcaagcagaggagggcggcagcgctcagagcagcagcaagcagaggagggcggcggcgctcacagcagcagcaagcagaggagggcggcgctcagagcagcagcaagcagaggagggcggcagcgctcagagcagcagcaagcagagaagggcggcgacgctcacagcagcagcaagcagaggagggcggcgctcacagcagcagcaagcagaggagggcggcggcgctcagagcagcagcaagcaggggagggcggcggcgctcagagcagttagcagcaagcagatgaagcggtggcgctcaactccagctaggttaaagactgtaacggcattggcacagtttcaggcttttcagcccccctggtgggccggcccaaatagaaaagagcagcctggagcccaaaacaaagcacctagtcgagaacaaccctaatcggacgactaatcgccgactaatcgcgattagtcggacgactaggtttctagtcgccctaatcgcgtcggtggccctaatcggccttgcagcagcgataagtccgactaatcgcgactaatcgcgattagtcggacgactttaaaaccattccgatggagacaatggaaacaatccagttgttggagggggtggctaagaactcgaagaatttaaagttggtggagaaccacgaaaacgagaccagggttgccacgtaagagaagactgcatcagcatcactacttgcctgttttgaaatttaatgtacctttcacggaagccctcactaacattaattgtttgtatgtttcatctcagcttgatgactgaaaataactagggccttgcagggaaaccttcgttgacttctgaggtactgaaggttagtgaagaggcagatgattacgttccaaataggaagtcttgaatactgctgtgacttgtgttttgaaatagatatagtattttctggttctcttgcaaacctcattgttgcagccctaacatttcatggtgtgtttgatttgtggggtgggggtggatgggagacggtcaacccattttttaaagttgttcagttagatgggatgcccaaccagtggggatattcccccgagatcttggatgggatgtccatgcaaatctggtggacagagtagtccatggccttgttgaatacttattgcgcgactggttgtggtcacctaatgtgccttttctttttgctccaattgttcccaatctcatccctcattaacctgtttctgactgggatgcgcacagcaattgggaaccagcaggccctctgtccagacgctggtgctttgtgctccgttgttgtgctgctgctccactggcgtttactagttctagtgccttttcactgatttgtccgcacagggatcctggtgctagtgcttggctgattgctgctgcccctgtgttctccctcaattcgtactgctcatgcaattcctggaggccctaggaattggttctgcagttgtacctgtaggctgtagctgccaatttagttcgattttgaatttggcaggtagttgttgtgcttgtttctagatgcaagagtgcttattgtttgtggtgtttgttattggaaattttggttggtggtagttatttgtccggaaaggttaatgcaatgctgtggcttgtcttgcttttagtcaatggtagtaagttgagtaaaatgttcatgtgtatgtgcagcttgtggtcggcagtgtgaaattttgacctctaattatttgttagtaatgtaattttctcagcaggaatccaattcatgatgatgagctacattattcaagtttagcaactattgattgtgtttcccatcatgccttggatgtgtcaaaacttgaacacaccaatttgaagattatcataccctgcttatctatccacatacaaccaaccaaacaaaaatctgctggatcatcccatttgaaaacttgcaaccaaccaaacaagaatttggctcatgcaatccgtccaacctaatgagctaatacatgtaggagcatcattctatgattctatcctaaatccatggatggccctatcccatccaaccttgcctctccaacccatacggccatacaaacttgtgaccattcattgtaattctcatttcattgtcataagtgcgcctcgtttgacactgttgtttctctcgtcatcattggctttgtgtcggacacgttcatgataatttatctgcagcaacggtcaaatttatgaagctacaaggtgcaagttatgagctgctgtaactaaaaggatctctggtttcttttgagcagctgtctgttgtgtcaagttatgtgctacttgtaacactaaagtaccattttaccttatgacatgcagtgcttggttgttctgtcgtagttaaagaccgtgttgcaataagtgctagttctgtatgtttcctgggtttatgttatcaaatggttgcctggtttgcccactaatgtcatgttgctataagtattcctagctgttgagaaatgcgtgcgcgcgtgccgatcgttgtatcattgggtgcaacatcataggtcattgtagccaagggctatgaagaggggagtttcagatagtccaaaaacaccagggtacatagcaaatacgaaggttcttaggaaggaacagaag

SEQ ID NO: 26635 - DNA, 2367 bp, Zea Mays
ggacagacggacagcagccagccaccaggccagccccctcaatttccacgacgcttcatgaatggagggagacacaatgcttgtatgcatgcatgcagcttgtgcggcggcttgcatgcagcaaccatgcagagcttgtgcgcgcttgtgcggcttgcatgcagcagccatgcagttgacgatgtatgggatttgaaagcatgggacataataaagtctgcattgatcgaaaacactaatggcagtgcagttctaacaacgacaagtcgtcagatctgggaacatgagaactggaggccatctggggatgacaagtcggattctgacgcagagcagttagagcctcatttggacgtcacaacccccgcggatgtcctcccagcgtcttccccgagcaagagcaaggtggtggcccatgtggaactccgccacgacgacccagattcctctgcatttggaatcccgcaagtagcaggggatactcaacctgagctccgccttttccccgaggcggatgcggatcttaaagggttcttctacgaaaacctatttggatcggaagacaagtgccctgatgatctgaaagatatatgtaaagatctcatacaaatatctgctggtgtcctatcagatgcctatgagaccgtggaagagctcagaggtattacctacgacactggaaagctggcagcctgtgtatcagagaagaaaattcgagctctcttatcccaaactacctggccatctaaaggattgcttaagatattttagtatgtttccaaaaggttacgagatcagtgcagaacgcttagtttgggcgtggatagctcaaggtttcgtaaaggagactcagggacagaatgatttggagaaagtcggaaagaagtaccttattgaccttataagcagaaagatgatcgaagcagtggaggttcatgctgatggtatggccctctcatgccgtgcgtacgatttgttgcatggcttgatcgtttcattgtcaacagaagaaaaattcgttgaaattctaaatgactcgcagtcgcaggagagagcttcgaatccgaatacagaagttcaccggctgtccatccaaatccagagaaataatatgctacaccccctgccaaaagcttggatgaaacaagtgcagtcacttgttgtctcgtctgataccgtgccagacctctcagattttcagggtcttcatgccatggacttaggaggctgcgattcattgcaggttgatcatctcaagggtataagtaaaacaacatctttgatatatctggccataggaggaaaatatatcgctgacgtcccgaaagaagtttcttggctcaaaaagctgcggacattggatttaactgcaagtggtctgagtgaattgccacgatgtattttaacgctaactaatttggagcggctatttgttaatagccatatgaagattcctggtaagatctcaaaaatgtcaggtttacaagaactgggcgacatcaatattgttaagccagagttacttaaaaggctccgtaaattaagtaagttaagggttctcagaattgccatgtggtcttgggatgagggttctaagagctctgttaaactatggtgggagaccctgcactcattaatcgggtcctgcaaaaaaattgagagtctctgcatactgaccttctgctcccttgatttcatggatggttccggtgatgataataaatggccgcctcaaactctcaaaaacctcgagataagtcacagcgcatttctggataagctcccaagttggtttgactcactttccaccatctcctcgttgacaatcgaggtcaacaagttatcaaagaacatcactgacactctggcaaagctgtctgctctaagatccctttccctgacatccatagaaaagccagaaccagaagtacgctttgtcatcggctctgctggtagattcgagaatctagaaagcttaaagtttgtgtgtaatgaaatggtaaatttgcttgaaagaccggaatcgaatgctacccaacagttaacagggcttactatcgtgtttcatgcttcacgaacagaacgcagccgaaacaaagatttcaggtttggtttggacaaactgctgtccctacagcacgttcgtgttgaaataaactgttccaatgcgacgcagcggacggtgaaaaatgcagaagctgcaattggggaagaaatatcaaaaatacgcagggatgacgggagtcagccaatcctggaaatacgaagactccaggaagaaagtatgatagcagggaaggaccaaacccaggatgctaataagacaccgtcttcttcggtatcctcacaagctccacgaaaataaag

SEQ ID NO: 26636 - DNA, 249 bp, Zea Mays
aactaagtgttagaagacttttaaaaaggggagaaataattaacaaaaaaagggaagtcataagaaaaaacaaaaaaagggaagtcataagaaaaacataagatgaagaaagttgataagtgcattccatgtcatgagcatcacgtttattttatgacacactgcaccctatgaatagtatgttataagttgtctatactttgacctaaatatgtgcttttggcatttgagtacaaaagtgttattttc

SEQ ID NO: 26637 - DNA, 2671 bp, Zea Mays
tcttcatcttcctcgcaacgccgacgctgcaacttccgctccctccccgactcgcgctcggcacgcaggcaggcgactgcggtggcgctcaggctcgggctctcagcaacggcggggcagtcccagactcagcggctccctctctccaatcgccttgcgccctcgctccgttcctctgctcaccggccgattctgcgtgcgcgcctcccgctcccctatcgcctcggtcgaacgtcgacggcgcccggccccggcggctgcattgcgctgcttgcggccggcgggtagcgggagccagcaggctctgctcccccaaggcggccgcgccgctttgttcttggtccagatgttagttgcagaggtgctcagagctggagcgtacatctctaggttttctcggcgtgcatgcaaagtatacactactagcggaatatattgtggttgcaatattttccagcatagcttgctcacctacttctcaatttagaagacttcaatttctggatctgagcatcaaatcaagaccataccactttagtcagtcctgtctgatggcactggctgcagctccagccagtggtgattcacagagtggtcctcagaggaactatcaggttgttgtggctgccactcgtgacatgggcattggcaagggtggggtcatgccatggaagcttcttggtgatcttaaattcttcaaagaacttacactaactacaactgatcctgccaaaaagaatgcagttataatgggaaggaaaacatgggagagcattcctgttaagtcaaggccactgcctggtcgtttgaatgtcatacttactcgatctggtagttttgattttgcaacagtagagaatgttgttatatgtggaagtatgaagtctgccttagagctgctagcatcaactccatactgcttatcaattgagaaagtttttgtcataggaggtgggcaggtactgagagaatatttgaatggacctgcatgtgaggctatccatctgactgatattcagtcaagcattgagtgtgatactttcatccctccagttgacttttcagtgttccagccatggtattcatctttcccagtggtagagagcaacattaggcattcttttgtgacttttgttcgtgttagaaagtcagtggcagaaactcatgagtcaaatggcaaggaatcaactgagattgataccaagaatgacaaatttgaaatagagaatttctcttttctccccaagatagtatatgaccgccatgaggagtatcaatatctcaatcttgttgaagatattataaggttcggtgctcagaaaaatgacaggacaggaactggaacattgtcaaaatttgggtgtcagatgcgattcaacttaaggaaaaattttcctctgctgacaacaaagagggtgttttggcgtggtgttgtcgaagaactcctttggttcatcagtggctcaacaaatgcaaaggttttgcaagaaaagggtattcatatctgggatggcaatgcttcaagagagtatcttgaccgtattggcttggcacacagggaggaaggtgatctaggtccagtttatggatttcaatggcgacactttggtgccgaatatactgacatgcatgctgactatactggaaaaggctttgatcagctaatggatgtgattgacaagattaagaacaatcctgatgaccgccgaataattttatcggcgtggaatccttcagatctcaagaagatggctcttcctccttgccacatgtttgcacaattttatgtggagaacggggagctatcctgccagatgtatcaacgctctgcagacatggggcttggtgttccattcaacatcgcatcatattctcttttgacatatatgattgctcaagtttgtgatctttctccaggagattttgtccatgttataggggatgctcatgtctatagaaatcacgttcgagctctggaggaacagattcagaagatgcctaaaccatttccaattttgaagataaatccttcgaaaaaggatatagattctttcatggcgtcagacttcaagctggttggctatgatcctcaccagaagctagagatgaaaatggcagtgtaacggtggcttagctctggagcccccagccttggaacctcggtgggtgaaatcagtcgaacgaactggtactacataaaaaatgaaccggacatcgcactagcttgtttttggtgatggtgctgaatgttgtgcgggaggcgttttcccccgttattagtagcgatctgcgtgctatatatggtcgctgaagtcaaaattggctctcttttattttttatctactactactactcatttgcgagtgagagatggtctgggcacaccattcaattgcaacggcctactggtgtgttgccccccaatgagggctgtgacgattgcgccactacctcgtgagaaacatgatgtgaccgaaattgctgtgtacctgcatggtagaacaacgcactctttggtatctggttgccttaatacgtgacctggttaattcagtttccagtttggatgggcacaagatagcgatttgctgtggcgttttagttgttgttgctgtgctgggggcagaaagtctagtgccgtgcttgacgaagacggggtcaaagcgcttg

SEQ ID NO: 26638 - DNA, 1632 bp, Zea Mays
ggtgtctagaagcctcagtaacaacatgggtttcagctatagcagtcttctcgcctttaagacagagaagagattaattcagagttcagaaagaataaaatggaggataatctaccagttaatgtccgggaatatcaagaacttgctaagaaagcactaccaaagatgcactatgattatatcaacggaggagcagaagatgaatatacactgagggagaatattgcagcatatggaagaattctgttacggccacgagtccttatagatgtgagcaaagatagacatgtcaacaagcttattaggatataatatgccatcgccaataattgtcgcacctacaggggcacacaaattagccaatcccgaaggggaggtggccacagcaagagctgccgcagcatgtaacaccataatgatgctttccttctcatcaagctgcaggatcgaggaggttgcctccagttgcgacgctattcgcttttatcagttatatgtgtacaagagaagggatgtttcggcaacattggatgattgctccacctctgtcaaaccttgaaggtttaatgtcattagacgactttgacgatgctgaaggcggctccaagctggaacgattctcacgggagacgctggatccatcattgtcatggaaggacgtggagtggctcaagtccatcaccagcctgccgattctgctcaagggcatcgtcaccgcggaagacggtaatgaataactagcacaaaatgtactctaccagcggttggatcactggcatgcttggtgctgaaccggagaactggttacctgtatggtcactgtcttgtctcactgaactgtgacgactctgtggcggcgtcgagcagcgaggaaggccgtggaggcgggggcggccggcttgatcgtgtccaaccacggcgcccggcagctggactatgcgccggccaccatctcggcgctcgaagaggtggttaaggcggtggcgggggctgtgccggtgctggtggacggcggcgtccggcgcggcaccgacgtgttgaaggcgctggcgctcggcgccaaggcagtcatggtgggcaggccggtgttctttgggctggcggcgcgcggggaagccggcgcgaggcacgtgatcgagatgttgaacaaggagctggagttggccatggcgctctgcggctgccgtagcgtcgcggaggtcaccagggcgcacgtccagaccgagggcgaccggatcagggccctgctgtgacttataaataagcgaccatatccgaggccgaccaccgtgctgtctgggttgcgatatgatttatatgatacgtgagggcatgtgatcgattgttgcctccacacagataagcttactattgccagagcctgggctggactatgctttcagtgattatctaaatcaaatagactgaatgctaaagggaacatccaatggtgtccatctatatagcatttgttggagtcacatgtagccatttgactgcccatcattaaggcctgaagtcaagagctcaatcaccctgaatccccttcaacgaagaagcccgtaacgtacaagatcgtccggcactccgagagaagctggacgccgtccgcatgtcgtttggtgccgcccc

SEQ ID NO: 26639 - DNA, 1487 bp, Zea Mays
ccgagcagcggagggggcggcaaaacatttcttgtttgtttattgcgccgaaaaaactaacagacccagaaaaggacagaaagaggctgcacagtaggcgcgtatatttggcagcaggagcggcctcgtcgtgccccgtatcactcctcagttgcttcgacgtatttctctctctatctatacgattccgaagaaggtagagagagaaactcgaaggggagaggacagaagagggagatacaggaaatggttatgagatgaaacattcaggccataaagtttgcgatagggattcatcatcggagtctgatcggtctcaccaagaagcatcagcagcaagtgaaagcagtccaaatgaacacacatcaactcaatcagacaatgatgaagatcatgggaaagataatcaggacacaatgaagccagtattgtccttggggaaggaaggctctgcctttttggccccaaaattacattacagcccatcttttgcttgtattccttatacttctgatgcttattatagtgcggttggggtcttgacaggatatcctccacatgccattgtccatccccagcaaaatgatacaacgaacactccgggtatgttacctgtggaacctgcagaagaaccaatatatgttaatgcaaaacaataccatgcaatccttaggaggaggcaaacacgtgctaaattggaggcccagaacaagatggtgaaaaatcggaagccatatcttcatgagtcccgacatcgtcatgccatgaaacgggctcgtggatcaggaggacggttcctcaacacaaagcagctccaggagcagaaccagcagtatcaggcatcgagtggttcattgtgctcaaagatcattgccaacagcataatctcccaaagtggccccacctgcacgccctcttctggcactgcaggtgcttcaacagccggccaggaccgcagctgcttgccctcagttggcttccgccccacgacaaacttcagtgaccaaggtcgaggaggcttgaagctggccgtgatcggcatgcagcagcgtgtttccaccataaggtgaagagaagtgggcacaacaccattcccaggcacactgcctgtggcaactcatccttggctcttggaactttgaatatgcaatcgacatgtagcttgagatcctcagaataaaccaaaccttcagttatatgcaagccttttttgaggttgctgttgctgtacctgagaactgtggttaggttatgagtttgttcctcaaaactgacccatacatgacatgctaccttgtgctgagtttctgagacaaagccatcgaaacatgatcttgtggttcagtactttgctgccattagtgtctgataaactagctccccagtttgcagtttctctgaattccagcatgtctagcctcagccaacgttttgcatttgatgtgacgatgacataccatacacatttgtgcattcatctatgttct

SEQ ID NO: 26640 - DNA, 726 bp, Zea Mays
tgaatgctgggcgatattttttacatacattctgatcctgcatcaggcctgtcctcgaggaacaaaaggaaactacattgggggcttgacattaaagaacgatgggaaagaaaggcaaacatgtaaaaatatctgaagatccaacaacaaaagcatatccacaccgcactcatttgaaatttgaaagctgagggacaaaacaaagcggccgaccttttccacggatcatcatgttgctggtaaaggtttgtcagctagcagaactgatcagtaagctagtatctaatttttcagtgttttgtctaacgttttctccagacgtttggttgggactttgctctgttgtattgtccgatccaaacttgcaaagttcaagtgcgatgataatttgtttattgctgtgtgatatagtttgggtttgtttgtcctctttttgtgtgagaaaaggtactgatggtgcaacacaggcccatgtgcacaatggaacatagttgttgctgatgatactagtgtatatagaagattatttctcatatgcttctcgcaacttgctggtgcggcttgtttacaagaatgaagcaggtgaaggcaaatcgtgcaataagttatcgacggaccgcatacagatctcgcccccaggatgtgcccatttttaaatcctcgagcgcctttggcctggtccatctgggaccttttgcgatggtttccgttcgtactatgctgtcc

SEQ ID NO: 26641 - DNA, 2998 bp, Zea Mays
atcgggcagatggacgaaggcaggtgccaagtcctctacaatggcatcatcatatgcatccacggttacgagcatgttagcaaccgatcgggagaaccggagagctagagggacgaggtggatttgggaagaagaacaggagaactgctcttgctctctccggttctcccgatcagttgctaacatttggtatcagattcaatcatcctggatccacttgctgttttgccgcggctaccccgatcttccgcgatggagcaccaagacgccgccatctgcaagctgctcgatgaaatgcgactcatggaggcgcgtctgtccgagcgcatcagcggacgctgcgacgacgtcgagcaccacctggacgagcaccgtgaagagccctgtgacgagacgtctcgcttcgacaagggtcccatcttcgacgagaagccctgtttccaccgccacttccttgattcggatccgaactctccctgcaactgggtcgatctgctctcggtcatccgtgcagtggccccgagctcccgggatttgcttcctccaccgggcatctctgccgtgccgagcagctacgtcgcaagcaggcatccgcagaccgcaggaggacagagaacttgtccagcccccgcgacgagtcgagtcggctacttgcgtcgagtcaagcgttcccagggcctccagcaccgagctggacagggagttcatcgccgcctccgccttcgtcacagcatcagttgcctccagcaccagtgccctcgaggcaggcgcacacgtggacgtggctggcgaaccggagtttccgcctcgtgtcaccctcgatggccaccccgacgacgaactcctccatgtcgaaggggcggtggtccggccacttctcgaagagcgtgagcagcagcacggcacggcccagagggtcatcgttgcgcggggacaatcggtcctccaccgtcagtaccagctggactcgtccccgctcgactcctgcaacatcttcgctcctgaaagaccggccgaccgggagatggtcgaggcgtcagccgtcatggtggtgtgggcgtacgacgccgcgtgcgaccgcgtcggcgtgcaggaggtgaagcacgcgtgcgaggtcggatgcagcggtggcgagatgtgccttttcacggacctcctcggcgacttgctctgccgcattcaccgctcgccggactccctcatgttggtcgtggagacaacaatcggcaccaacagcacggagatcgccggaatcgttcgcggctgcgccaagaccgccgtctctgttggcaccacccagcaggccaaagacgaccccatctacaccaaggttggctccatccttggcctccgcgtctcgcccagccactggaggaagggcatggggaagaagctagcggatcgggaggaggacgaggttgtccaagcctcatacacgtacaacatctacaacaactgggctccattggaggatgcactcagactgtttgatagaatgtgcatggagcatgactcgcccaggacaagtgctgtgaaccttgggagctttaatgtgatggttgatgcatactgtcatgctggaagaggtcaatatgcgattaaggtgtttgggaagatgccgagaagaggcctgtgccagatgtactcctccaataatctgattgactggctagggaagaataaacttgttgggaagtctgaaggatggtacatggaggaagctgcaagagctgtattggaattgttgggagttcaggcatcggttcaccagatgacagtcaaagtgaccattggacagactatttcatgctcacatctgttgcgcagcggaaagatagctacgatttgccatgatgcaagtattgcccactctgagcatcagtacgttgctactgggatgcctacagaagttgttctggaggttttggttgagaacatgggacttcctggtggttataccccatctttcgattcatctgatttgcgaaggagttgtcagtggtggaataatctggccaagagagtagcaactctggaatttgatcgcactcgaaagtcaatgggagttattgtgaaagcaaactctgggaagaactcactgcttgttaagggagctgtagagaatctgctagagagatgtacctacattcagttgctcgatggatctgttgtgctattggatgatggtgccaaggcactcatattatttacactccatgacatgtctgccagtgccttgagttgtttgggttttgcttacaagtatgaattgtcagctccccgagaagaagtccacaaatcaattgacacatgttatggttgcaacaagagacaacaaagaaacaacagaggccatttgccgtaagattggggttttcagccctatgaaggtcaaactggcatggtccggcatggatcctgccttgcccacctaggaggatgctacagctttgaaggaacgctccctgcacgcgtcggcttggggacaagccgcatttgaagacccggggaatgtcagcactgatgatccacaagagaaggagacgatggagctgaagactgacaaaggcgacgtggcgtgactccagcgtttgaggcgcgacaatatttgtgtgtctgggccagaccgccagagtgggttgtctgatggccgggttgggccgggttgtaagcgctggtttgtaagcgtcgcatataagcgaactcttgggagagggtgaatcatggaacaacagaaagcttacaacaattaccttcgtcgcgtccacttctcctgttcttcttcccaaatccacctcgtccctctagctctctctggttctcccgattggttgctaacagagcatattctcctcgccaagataaagtgctccaagaaccgcctgtacctggttgatctgaacatcgtgcagctagtgtgcttggtggcgtggcacaacgaggagccgtggttgcggcatgcccactttgagcacctgagcttcgacgtgctcgggtg

SEQ ID NO: 26642 - DNA, 2627 bp, Zea Mays
  misc_feature (2626)..(2627): n is a, c, g, or t
agacggcggcaagtttctaacggcgcgagggcagcacgagcactgcacaagggctaaacaccattaagcgcgctcgatgccaaatttacaattcgagagagatttcaatgccacactttcaattgccacgacggcggtgccaaaagtttgaagcccgccgtagccgtgtcatgtttgcaaaattctcaattcatcatggtatacaaagctagggttagggagagagctgccgtgtagccgtcgccgccgccgccgctccgacgagaaccgccctacgcgcaaagcctgcgcagcctgagcttcaagcgcgccgcggtcgcgttcccgcgccgcgcaccggcggccagctgcacctcgtcctcggcccggcgcccgctgctcgggtccgcgggcggcttgggcgcggcagcaacagcgacgtctcggctgctgaacacccagggcgagcggcgcccacgctccgccacccgctcccgctcctgctctgacgacacgggccacggctccgcccgcgcacgccgtcttcgtcttcgagctcgccggccgcgacggtcatactccgtcctgcaaagaccccaacccgaaaatgcggccgcgtcagcacacggcgcgccgctgccggctgcggcggaatgaatccagagggtttcaaggacagagaccaaatatgaagggcccggcccggtaatgaatcctcgttcccaggcccaatccagcggactcaaaaggcaaaccctagtcaccatcccccacacctgacacctcccgccgcccgtcggcgattctcaatggccttcgccggcaacgccgacgactcggcggaggactattccgcggaggccaccgtggtgcgcttcgacccgccgctccctctcctccgggcgccagtcccctccccagcatctagcggcgagggccccgtcctcgccttccgcgacgccgcgagctggcgagccgcctgggaggccgccgaggccagcctcgtctcccagtgcgagctggccgaggtgcctcgcggtagtcatgcaaggcagtaagtttagcagctgcaaatatcaaggagggcaaaccagctcctggctactggagctcagtggttagggttgacaatgcccccataatcgccggactatgtttgtttcacttatgtttttttttactttgtgacgatgtgttctttgtggaaacccgaatggttagggttgacaatgcccacataaccactggactttcaatgtggcatttatatttgtttcctttttgaaaatgctgtttccagtttcaccccagttgggggcaaagagtacaaatcacctcctggcatctgaattccagtggtcagggtggaccgtgctatatagtcgcgatgccttctgtgtggaatggcggttatgtagtagtcggtaaacgtagataagccgagtcctttagcttattcaagtgtactcgttcttgtccttccatgccccatttttatttgctttcttccaatgtttttttgtttgcttcatcctagctgtttcaagtatcatgcttttacacgttgaacgaagccacagttgacttcgtctcacgttgattagttgttgcctgattaactggacgctagcgctctcctgcttttatgggaaaacagcaacaacattaactagagtacattgtagatggttctgctcgcaaaaagataatacgtgcttttaatcagatgagttatgttttttctcttgtttttcatgtagcttctcaagcatgccggttatgtagtagtcggtaaacgcagataagtcgagcgctttagcttattcaggtgtacgtgttcttgtcctttcatgccccatttctatttgctttcttccaatctagtttttttttgcttcatcctagctgtttcaagtatcatgcttttacacattgagcgaagccacagttgacttcgtctcacgttgattagttgttgcctgattaactggacgctagcgctctcctgcttttatgggaaaacagcaacaacattaattagagtacattgtagatggttctgctcgcaaaaagataatacgtgcttttaatcagacgagttatgttttttcttttgttcttcatgtagcttctcaagcatgtgcaacttatgttctcttcttctagggaaaacctatttgtacttgatgtttctatctcaaatagtatcgatcatcgattttatcagccatcgctgagacagagccccttcccctcttttttttaaataaatcttgttctgtcctgcctaatgtgctgaagggatttgatttgccattgcagctggccgagttggctggcttaagctctgccagccaataagtatagcagctgcatacattgaagagagcaaaccagctcatgactacttacctttagtgtcgtggttgacactgctccacagtacacatgtcaaaaaacccacttgttataccaatagctacatccaatactttttagtagtgtctaggctgaagaacagagtgtggttaaacacgtggggaagaagcacaggtcacacttagaacatattgtatagggttttagtgatcccttctgtatgatagtagacaaccagatcctggctactggagttgttgaatggttnn

SEQ ID NO: 26643 - DNA, 1204 bp, Zea Mays
agagaacatcccaccgcacccgagttttggttacccattgtcatggatgttcatgggcacacggccaccacaccgcggcgcgtggccagcgcagcgaatccatccccatcctcatgattataaataaataataattttacacgcccccttctctctcgatttctcgcggagcggccctccacctttatcgccgccgccgccgttgctgtgttccgtctcttcgccgatggcttcggccaagttcggtgctgcccagcaggtggagaaccgaggcgcgctgtccaaaaggtcacgtaacgacgagaatgatgtcaggacctcctgcttctggatatgaccggtcacctctattttacggaggaggtggtggcgccccacctccaattccgcttggaactggtagctatggtgctccatatccacaccttgggatgcgatatggctatggtccaccagtaggacctcctggttcatacggtcttttctcttcatatggtccacctgggccaatgagtggtatgggatatggcccaggacctgagctaggccgatatagctatgggtttagaggttctccaatgccggtttctagtccatggtctggtggagcattagctgaaaacaatgacaacattgcttcacgaaagcgccgtggaggccctgatggactttctgagggtgactggacctgtcccaaatgcgacaacattaacttttccttcagaagcacttgcaacatgaagaaatgtggagccccgaggccaactccgggaggtaacacgagctcatctcgcaaggacaacagcaataaggaagcccctgaaggaagctggacctgcccagagtgcaacaacctgaactacccattccgcacggtgtgtaacaggaaaggatgctcgtacagcaagccagccccggcgaacaactgaacccaaccttcgcgcatcgtcgagatattgttgtacccgtagattgtatcctagtcgtgtgcaatctttgaactgcacaaagatgtttgtgcctggagacgagagattcgattcgttacgcttaatttactattatacttttttattaaatgatgaaaactagggaagagcattatatctataaactcttagtagtctgctatacacagcaattgacatcaattgttgcagctctcgagacattaatccttgaaccacgcaacatgttctcaaac

SEQ ID NO: 26644 - DNA, 1069 bp, Zea Mays
cacagctcgagatggggcaatcattggatgcttttgtgctaaaatttgctttcaaataaacttgtcaattctcatggtacttactaatggaatagaggtaaagctgcagcggaatgctttaagtgtgattgaacctccgacaggcaacgaggatgatgataaatttgattgtgaaaacctgcggtggaatagttcagacttggtctccgatgatgcacaatcaccaaagccacaaaggtcaaggagcaggcagcataggggtttccacagaaaatcctttagccgttcaatgtcatgtgactcccaatctaagacgtctgtttcatcttcctcgagagctcacacgaaagttgacctgagcaagttagaactgactgcactgttgagatattggcgccacttcaatctcgatgcatgccctaatccatccagggagcagttagttgatgctgttcaaaggcacttcacggcccaggttgataaaacaaatttaacttctgactccagtaacttgcatcactatggtgtgaggtcctgacagtctgctttgttgtgttaattccaatatatgcttttgcccatgcggaagcaattggatgagttgcaggtcattgtcagctttgtgcaagctgcaaagaggctgaagacaactatgaaagtggcctgacagtgaagcatgaagttcaactaacagattcaagataggatgcagcatgtttgatgaatgttgccgtgctatgtaatatatatgcatgaagttctttagattcaggtggtaatggacaactagactatgttagcctcatctgatgtagatatgcagtatcctgtctaaagatgtttcaacctctagctcagttctttcctgctgactggatgtgaatcgaaatggcaagcttaaaacaagttctttttgtcatccttttcgaagtttcattatatttagcccatgcttttcccaaattgcatgcagaactaatcaggaatgcagaatatggtgcctaaaagtgccagagaattacctgagtctcatggcaaaacccttctgcaatagtagccgggaactgtt

SEQ ID NO: 26645 - DNA, 1301 bp, Zea Mays
aaagaaagcaatattcctattctctaactgcagaaaatgtgcgacgcaacttggagcaagcaaaagcactaatggatgctttgattaagagggaggagacaaagcgggaggccatggagtgccaagttaacctgcagcgtgttcagatgaaatataagcatgaggcccagcttgttgaggatgggactaccttgtctggcttccagcaaacttcgagcagatttgaatcgagcgatgatgatgtggattcagatgatactgcaactgaacagacatacatacgtccagcagttttccatccaaggttttctgctaataagctatctgtgatccctccacttcgcataaagcgtgaacgagagctaaaaaggagacctcagcagaatggctgtgtatttaaaagggtatcaagccaccaccagatcctcctattgagaatggtgccacatcaccaccatttcggtgtcgaggtaggattggacgaggcggccgcatcatctttgatcgatggaatcctcttctccggacaccaattgaccaggagacttattatgtgccatacggtcacaggcccccctcacctgaaggttgaagcggtttttcatatgcacatagtgcttaatggcactggcacagctatggaatttgtgaagcctctgagcaattgtttttccataggtgccaaattggcccttggagagtccattgtgagttgagcccagtggttcattctgatggaaggcagagaaagctccttgataagcagcagcctcagtggaagttcgagagcatatgggatctcgtggggctagcatttcttgctcagatgtggcttggtcatcttttttcacagctgttgtaaaattattgcagtgtaggtgaaagagtagatctttttgtctaatctttgcatttagggtcagtattcatatcatgctctctcatttgattattcatttggaggagaggaaatccttctcattgctaagttcagcttttctgtataattcttcaacaccttgttgcatgcattcaactaatgcacgtgtgtatatactgaaacccaatgtgcattgcccttttgtggcagatgtcattagtcagtaggttaggcagaaaatgggaatggaaaggggccaacaatgttattgaatctgttgctgaatgttgggttggcgcgcagcttcctcttgtaaccgtgtacagattcaggtttttgttgtgtaacaccgccaacaaatagctggttattgtcaggactgccatatgttctgattcttgctgatgacactgggctactt

SEQ ID NO: 26646 - DNA, 5362 bp, Zea Mays
agactactggtcagttttcacacttttaaagtagatagttgtctttggttttgctttgcattttctgtttgctggatttattaaatgtttcatgttttagctcttatgctgctaggatgaaacaccgcaaacacattggtacatgttggaactctttgttttgaatgctggaaaggtttcttcagaagttttaatgacattgaacacgatgatcatgcagaagttgcagaaactcgtcaactccctcctatgttgattgaaagatataacacagctgccggtgaaggaacagctctttgcgggattttttctgacatacatcgggcctgggcaacagttgacaattcatttttcatctggcgatttgataaatgggacgggcattgccaagagcataatgttgacgagcaagcaatttgtgctgttggccttgctagggcaaaacctgggattttcattgaagccattcaataccttttagttttagcaactcctgttgaactgatacttgttggagtttgctgttctgctagtgctgatggaacagacccatatgctgagctttcattacaaccattacctgagtacatgattgccactgatggtgtcacaatgacatgcatcacatgtacagacaagggccaaatttttgtagctggtcgcgatggccatatatatgaattgcagtatacaactggttcaggttggcgtaaacgttgccgtaaagtttgtcttactactggcattggcagtcttctttctaggtgggtactgccaaatgcattcaaattctcaactgttgatccaattgttgatatggtcatggatgaggagaggaacactatctatgcgcgtaccgagggcatgaagttgcaattatttgatctaggagttaatggtgatggccctttgacaaaaattactgaagaaaagaacattgttgatccacgggatggaccttatggtggtcggaggtctaatgcgccaagagctgcacgatcaccaagaccatcaattgtttgcatctcacctgtatcttctgtggaatcaaagtggctccatgctgttgctgttttatcagatgggaagagattattcctcactacatctggtggaagtggttcttcagttggattgaacagtggtctgcagaggccaacctgtttaaaaattgttgctactaggccgtccccacctctgggggttggtggtgggcttacatttggtgctgtttctgtggctggcagggctcttcctgaagatctagcattgaaagttgagtctgcattctattctgctggtgctcttgtaatgtcagattcatccgctacagccatgtcatctcttctggctgtgcagaaagattcagctgcgcagctatctctccccagcacctttggaacagcttctagaacctccagagctctacgagaaacagtctctgctttacctgttgagggtcgaatgctttgtgcctctgatgtcttaccacttcccgatgctgcttacatgatgcagtctttatatgctgatgtggaatgtttcacatgtttcagaaaaccttctgagaaggcatgtataaaactgtgggcaaaaggggatcttcctacccagcatatcttgcctcggaggagggtggttgtattcaatactatgggtttgatggagttgatttttaacaggcctgttgatattctaaggaaattgtttgacgggaacaccctgagatcacaaattgaagaattctttaatcgctttggtgctggagaggctgcggcaatgtgcttaatgttagctgcgaagctactttatgctgaagatagtctgataagcaatgctgtttctgagaaagctgctgaggcgtttgaggaccctgggcttgttgggatgcctcaaattaacggcaccactgctttatctaatacacgaactcaggctggaggctttagtatgggccaagttgttcaagaggcagaacctttgttttctggtgcatatgaagggctttgtttgtgctcgtcaagactactttatcccatctgggagcttcctattatgtcgattcgaggaccgtctggtaataataaacgcgaggatggcgtaattgtttgcaggctttcagctggggccatgaaaattcttgagagtaagattcattcactggaaacatttttaagatctagaagaaacaagagaaggggcctttatggttatgttgctggtcttggcgattctggttccatactctacaaaacagggcctattattggccctggagggcatagcaatggaaggagtccctacaactcccaaattcgagatatgaaccctgtagataaatctgcatcgaataaaaagccaaggctgctttatacatcagcagaactagccgctatggaggtgagggcaatggagtgtcttaggcggttgcttaggagatctggtgaagcactgtttctgcttcaacttatttgccagcataatgttgcccgtttggctcagacactgggcaatgatttatgcaagaaatttgttcaattaacatttcatcaattggtatgttcagaggatggtgatcagctcgcgatgcgtcttatttctgcactcatggagtactatattggcccagagggcagaggaactgttgaagaaatcagtactaaattgagggagggttgccctagttacttcaatgagtcagactacaaatattacttggcagtggaatgccttgagagagcatctatgactaataatgctgatgagagagatattcttgctagagatgctttcaacctcttgactaaaattccagactctgctgatttgagtgccatatgcaagagatttgagaacctaagattttatgaggctgtagtccgattgcctctgcagaaagctcaagcacttgactccaatgctgatattatcaatggtcaaatagacccaaggcatcatgatacaataatgttgcagcgtgaacaatgctataggattgttatggatgcgctgtgcactctcaagggtgttgggcatagtcgaatgcaaagtgcagacaagtcatctgctctagcaactgctgctgatccagcttctcgaagcaagtatatcaaacaaatcatacaacttagtgtccaatggccggacacagttttccatgagcatctatacaggacacttattgagcttggtctagaaaatgagcttttagagtatggtggatctgatttggtttcttttctgcagagtgctggccgtaagcatcaagaagaggttcgggcagtttcttcagttacacctggagctgctaagatgcatgatttaggtgcacctatctcgactagtcaaacaaagtatctcgagctcctagctaggtactatgtccgcaagggggaacatattgctgctgccaggatgttgttaatattggcagagagacagtgctctaattctgaagaagctccagctcttgacaagcggtatgaatatctcagagatgcagtgcttcaggccaaaagcgcaggcatcgctgctgatttgtccaaaaatcctgttgatagcagcacagtggatttgcttgaaggaaaacttgtcgtgctacgcttccaaattcaaattaaagaagaattggagctcatggttgcacggctcgaaaatattccaagcagttctgaattacctaatgttccgttccctcgtgacaacattcttgctaatgcagagactgctaaggctgctaaggataaggcaaaagaactatcattaaatctcaagagtatcactcaactgtataacgattatgctgttccatttgatctctgggaggtttgcttggaaatgctgagctttgctaattactctggagacgctgatagcaaaattgttcgagaagtttgggctagactccttgatcaggcacttactaaagggggtgttgcagaagcttgttctgttgtgaaaagagtaggctcgaaacttgatcctgcagatggagcttgtttacctttagatatcatatgccttcaccttgagaaggctgcagtggatagattaagttcaggagaagaattagttggtgatgatgatgttgcaagagctcttcttggtgcctgtaaaggtcttcctggacctgtactttctgtgtatgatcacctgttatcgaacggtgcaatcataccctcactaaatctgaagttgcgccttctgcgatcagttctagcaatcctccgtgagtgggggatatctgtcattgcacacaggctaggcaccacaagtgctggggcttcattctttcttgatggaacattctcattgaaccaaacagggactgcgaatcaaggtgctcgagataaaataattagtttggcgaacaggtacatgactgaggtgaggcgattaaaccttccacagaaccaaacggagaatgtctaccgtggtttccgtgaacttgaggagaaattactatcttcttattaagcagattgcagtcattcctcaagatagtgaagaatgatcttgcatctgttgtaccacaaaaccaaggaatagagtcgagggcttctggattcacctcagcatgatctgtattgttccttacacttatctgcaagaacccggggctgctgcaggactctagctgaggtggttagatggctctagtaccactcatgtcctggctgagttggttagatggctctaatagcacttctgatgtcctgggtttgacttctaggtgagagcaaatttcagacgggttgaaaaaggtcatttgttggttcctctgtttgtgtgcacacaacggactgaccaatggatcctcgtgtaggtaaagatctagatctggtctatagggagcggattctcttgctgcatgggaggcagttttcgtgacttggtcgtactccgattgagcttcttaatataataacgggggacagtcttttctcaccgttcgagttcttttcttttttgaacccaaggctgctttaatcattattaatcagatgtttttcatgactaagtgcagccttcttttatttgacttgagtcagtatggactgcagagccgtagatttggaaaattgtttagatgtcttcattacttgctaatctagtggtagatactgccggtcctgttttaagggtggactttgtccctgaacaacattaaactgttgaatacaagttgggttttgatgcaggaatcggaatttagtatgtgccatgacattgtacagttctatagtagattattctcagtgttgtaagcttttacgctgtgtttgtttgtatgaagataccgtttcagtagctgaaaaaaggtaaaggttattgccagaaatgtggatttataggtctcgtt

SEQ ID NO: 26647 - DNA, 761 bp, Zea Mays
aaagcctcgcgctccccgttgctcccttccttgcctaggcggcaacgccctcgtgctttataacccagcggcccctcccgcgtgaggcaaccgagacgggaggagaccagaccagcagcagcccatccgaaccccgcctcctcctcctcctcccgggttcgcgtgaggctgtgtgctgctgggaggcggcgccggcgccggcgccatggaggcggagaagaagccgccggcggtgtccgacgtgggcgcgtgggcgatgaacgtcgtcagctccgtcagcctcatcatggccaacaagcagctcatgtcctcctccggctacgccttcgccttcgccaccacgctcaccgggttccacttcaccgtcacggcgctcgtcgggtggatctccaacgccaccggctactccgtctccaagcacgtcccgctctgggagctcgtctggttctcgctcgtcgccaacacctccatcaccgggatgaacctcagcctcatgctcaactccgtcggattctaccagatctccaaactgagcatgattccggtggtctgcctcatggaatgggtgctcaacagcaagcactacaccactaaggtcatatccgcagtcatcgtcgtggccgccggtgtcgggatttgtactgtcacggatgtcgaggtcaatgccaaggggttcatctgcgcttgcgtggcagtgttctgcacgtcgcttcaacagatcgtccactatactctgaagggatgagctgatgatgtgtttc

SEQ ID NO: 26648 - DNA, 779 bp, Zea Mays
tcttgcttgtttttacaaaatggtttgctccgtcgcccccatgaatcaaggattcttggagcggcattgctgctataggcctatagtgtgattgcacttgttcagttgttcttataccctcaatccctcatagtgcacttgcgccttctcaccggaatgcagtcataagaattggtacatgatccattcatatccgttctcatttgattgccattggtgtattattggactgtcttcgtgagtccaaaatccaaatccaaaatgtttttgtcgttcgtttgcatttcagctcatttggaaggttccggccttccgggagttgctggaccccaccactggcagttcaagtatcagtttctgagcaaccaggcgatggggtcaggagttcgatgctgcttacgggccagcttggcactgcatcgtggggacgagtttcggttcatatgtcacgcacgcccggggtggattcttgtatttttccgtcgataaggtctacatcctgctcttcaggacagccgtggagccctagccgcattgacggccaccagcctaccagcaatggacaaatggttcataaaaatgcccagttcttgggatagctcacaccaaattcagttgttcagtcagctaggccgaggccttgtaacttgtaaattgcattgtttcttcgaaggcaaatggaaactccttgtgtttctgataaaatttctgatttgttcgggatcatctgtttcagctcaatttgttcaagactgctaatggttttttgtttttgtgcc

SEQ ID NO: 26649 - DNA, 553 bp, Zea Mays
ttaacaagagtttgttaccttacgaatccaatacaaagaaatgttcgcattatcgatggagctcatagcagtctggtggctcgagattgagggatgggtccctttcgagttcctctccaccgacactagctatgatatattccttgtctacaagctggcagatgagcatgatggcctcagatggggggagtcctacgtagcagtggatggagtacacaccactgatggcgttgtttcctttgtagacgaagatgccgtgcgtgtagatcgcgtggcttacccggttacccgttcagaaggttggatggagctctggcttggtgagttttacaataagtatgttgatagagaggtaaaagtgagtgtctgggagaaaaccgatacctatgccaagatagggctcatcattgagggcatggagatcagaaagaagagcgggagtattagctaggtaggtacatgttagtaatgaacctgatcttggggaacttgtcacatacttaggttttgcttttgcatgccatgaatttctacaagagatggccaaacgggc

SEQ ID NO: 26650 - DNA, 2232 bp, Zea Mays
cttgcttgttcttgtggaccaaactgtagcccctcctcctaactatcatgtgaagataggtctggtgattgatttgacaaataccacccgatattattcaccagcagaatggacgaagcaaggtactaagtatgcgaagattgcatgcaaggggagagatgctgtacctgacaatgaatctgttaataagtttgtctatgaggcaatgatgttccttgatcgacaaaaacaatcaaagaatcctaaatatattctggttcactgtacccatggtcataatcgtacaggtttcatgattattcattaccttatgcgcacacacgtctcttgtgttgctgaggcgattagtatatttgctcaaaggcggccacctggcatatacaagagggactatattgaagcattgtattcattttaccatgaggttcctgacaatatgatgatagcatgccctccaacaccagaatggaagagaccagatgatctcgatttaaatggcgaagctaagcaggatgacgatgatgacaatggtgatcctggaccactgcataatgaatcagaggataaagtcatcaccaatgacgatgtgttaggggatgaagtgccatatgaccagcaagaagctttgcgtgtcctatgttatcggttgcttgaaatgcctcttggaagggggcatgcacactttcctggatcacatccagtttctcttaacagtgaaaatctgcaactacttagacagcgatactactatgctacatggaaagctgacggaacacgttatatgatgcttataatgagacatggttgtttcttgattgatcggaattttagctttagaagggttcagatgcgctttccccataggagcctccaaggtctgcaagatatgaccttgattgatggagagatgattatagacacagtaccagattcaggcttgaagagacggtacttggcatatgatcttatggcgcttggctcagtgtccaaaactaggttgccattttctgaaaggtggaaaatgctggaagatgaaataatacagccgcgtaataatgagaaaggccttgagcgtggtgctaagagcaatccgttgtacaaatatgacatggaactattttcggttaggagaaaggctttttgggtgctattaacagtaaaaaaggttcttaaggtgtttattccatcgctatgccatgatgctgatggccttatatttcagggctgggatgatccatatgtaactcgtactcatgaaggtcttctaaagtggaaataccctgagatgaattctgttgactttctgtttgagcttacaaatgataatcgtcagctggttttcctatatgagagaggaaaaaagaaacttatggatggtgctcggatatcatttactgatgatgtagatccatcttctgtcgctgggaggattgtcgagtgctcttggaacaaggaagaacagtgttgggcatgtatgcgtattagatctgataaatcaactccaaacgacatcaacacataccggaaggtgatgaggagtatcacagataacattaccgaggagaagcttctcgaagagactgatgagataacgctcctgccgatgtatgccgataggatgaatgttcgtgttcatacaaagatggcacaacacaggcgaagattgccaccacagtgctagtctcgttgctagagtgctgggtcgctctcctagccagcggctggcttctgtagctgtgtaattagtagaggtttcagtagcccccccccccccccccccctatgatgatggccagccaactaattctttgcacttcatttgtgtcttgtcccctgccctcacacctacctgtataggcttccctgtaaattgtgtgctctatgttcctccatattctcccctatggttttatttttcatgggtgtagaatagcgtttaacaaggcgggtggtgttctatgtaggcgttgccatctctcggtgctgcctcgtgctagaataatgtagggtgtactggcgataccatgtggttgcgatatatggcttggttttagtgttttggtttgtgcgcacctgatccgatcctttgtccaacgaagattttttccccttatttttgggtaaaaaaggacgtcaatgttaccactctatggtatagtgcttttttgttcacatggttagatcatgtactgcgtggtccattttttctctttagtgtccgccactttgtgg

SEQ ID NO: 26651 - DNA, 2854 bp, Zea Mays
ggcgagtggcgcgtcggattcggtgttgtgtgcaggcatggatgtgggcggtagtcggtggaaggaggagggaagaagataaggcggagatagagattcaatctggtccttctattttatgtccaagggctgaaaagatcaagtgatggttgcctttggattagtcagttgttgcatagaaagactaaataaaacgttgagggagtgaggtagtgtgtagcgacacgagattggctgctgcaattggcattgtttttcctttaaatgaaacaaaccaagtgggagagctgcagattatattaatgaaaatgtaggcttagactaggcagacaaatacaatcagaaaagttgctctgatagtgcaacactaaaactaccatgttcgatacttaaatcatgtgtgttctcaagctctcgacgaactctggtaggcgctagacatattcctcctgccctgaggtcagacgacaccatctcaagctcccttccaccaaactctagtggtcacaatgggagcatgatgaaccaggttagtgatacaccatgcggtgaagtaggtcagaagcttagcaaagtaccaatggtcatgaaggaaaattaaaatgagtgatcctttttgacgaaggtgaagctccagatgcatgatctctaagatgccattgagattggtggcatcaacttgcaagaggagggactggtgtttgaaaccttttctaacgtaatgcttatggctggggccactactcttaggctagctagggaggagagattgatgtgggagatggtcgcggccaaatacctttcctatcttgctgccctcctccctgaggactagagtttttggagtggctttgagtcctagatgatttttttttcagttttctatgtttttggtctccataaggagtcccctgtattgggtctgacctctttcagacctttgtttccttccttcttaatataatgagacgcagctctcctgcgtgttcgagaaaaaaacgtaatgctgatggagataatatccatgccggtaggacagactggtgcttgaaacatgcacagttacaacgtcttcgtcacacctggacttcaaccaaagaaatgtaaagacactggtctctggtgatgcaactggtctctggtgatgcaactggtgcatcacaagttcacaatagaatactagaaagctaagtagataattgtttttttctgtgatgaactgcatgaagctttattatgttgttattgactggtccttcatcccaagcttgctgtgtctgtgtatcacattcttattttaaagagacatgtactgttgaggttaaccaacataatctgggaaaataaagggattacaattaagcatgtgtatcactaaaaagatagtttcttttctggaaatcacactctggtcaggtctattttggttgttagctgaaacaagttttcttgttgaaaagaacacaatatgactagactgggtcatgacttcaataccttatcgttgttttgtttaggctgtgtttgtttatgcagtggccggaaatgagttcgtaattattgtatcaactcgatgtaatgattgtgaattaataaaatcctccgcttagcaaaaaaggacaggcctgacgcagtggtgaaaagtcttcccactatgccaaaggttctgaattcgacgcagcctctctgcaaaatgctgcggtaagacttaccctgttattgcttccctagacccccactcacgtgggagctgccagcagttctgtccttcatttatcaaaaaaataccgtattgtgcaggatgccaggatgtaaatagttgtttagtttagttcttattacttccttattcactttccatgaaaatttctgtttcttttttttattgcactactgcatcattgtatgattgtatcggtccagtaatgacttcagttttactcgatgttgttaagttttgttaggatcacagaaaggctcttgcagatagggagtttgaagcattacaggataggatttctgggaagatgataaattttcgaagagtttcttgcataaacgggactgttccactgtccccatcattaatgtcagctgaggaactttgttctatgtgcaagtttgtggaggatggaaaagagagattagtagttggtagtttagaccttaatcagtgtctttggctaccagatgaattgactggaaagaggcctggggtaaatgaagacatccagacaagagcatatctaagcaatgtctgtgttgccaaggagcttcagaaaaaaggcttaggctatacattagttgacaaatccaagaaattagctcttgaatggggcataacagatctgtatgttcatgtcgccatcaacaacgtagcagggcaaaagctgtacaagaagtgtggatttgtttatgaaggcgaagaacctgcatggaagggtaggtttctggggagaccaaggaggctgcttctttggcttgatatgagcaaagtgcttgtgcgatcgtgcatgtaaatacatatttagctatttgtaatcatattattgcaattgttggttttaatattcgacccaaatctccaattgattgcagtctgaatcatccctcttttctgaccacacctttctcaacgatgtcctacaaaagtttttggaggcagattaggaacaaaatcctagaaatgctttagatgttacacaaagggcagttggatttggaaagaattgattatgggggtgattgtgttgttgccaaaaattaaaggggcataccatgtaagagcaactcaaacaaaggtgttgaattatgtcatatcttaaaatatagtgctcgacaaaaaagctttcaa

SEQ ID NO: 26652 - DNA, 1755 bp, Zea Mays
  misc_feature (1)..(1): n is a, c, g, or t
ncctcatacctctactctgcttaccctgatctcaagcctggtcaactaacagatctgaaatcattagctgtcaataacaattcatttgcttatgtcgccgttaagaaatctatccataggtatctcataaaggattctaactatcttacgacagcggtaaataaattcgcgaattatgttaacctttccagttcagagaaagacttgttagaagaaccaacatgtccaaagattctggcttcaacctgaaccatgtttggaagctaatgctaatgcttcttaaaccaatattgagcttttgtggcatgcacatcgatcctatgagagaactccgagaaacttgtcaatataatggttttgacttgggacttcccgaacctacgaagtacaatggagagttccatgtcaaagtagaagttaacataaacggcaagatgataagctgtactgcagcaaaccggaattcaaaagatgctagaaaagtagctgcacaagaaacactttcgaaactgaagaattatgggtacaagcataaaagaaagtcgctggaggaaattttgcgttctaccacgaaaaaagaatcggaactgataggctatgatgaagaaccaatcaatgttgaggatgacattgacatgcaaatgaataatctactgataaatggagaaagaacctccattcagagtacagcgggagataacaaggttgacaagaatgatgctaatagtggaaggaataataagtccaatgtggtcatgcagaatggttgcctacctagaggggcaactgataaaataaaccaaaaagaatatcatggtgatatggtccgcaaaacagcaaggtcattcctttatgaattatgtgctgcaaactattggaaacctcctgaatttgagttatgcaacgatgaaggaccaagtcaccttcgaaagttcacatgtaaggtccttattgagatcacgggaacttcggtgagccttttggagtgctatagtgatcctaagctacaaaagagagccgcgcaggagcatgcggcagagggagctctgtggtacctcaagcaccttggatacctaccaagagatgaaaatcgtttctagcgacattttaggttttgtagccttcagtcacataaataaacctcggatgggaagagttctgttattgtaagcatgcagtctattcagaggtatatagcatcctggaatctcaatccaacagtcaacagtgcaaaaaaatcataaaagatgcaaaaatgatgacgtgcttctcatcaggctgacatcggaggacatctgcattgtacaacatccaaattgtatgggaagattttcgtcggtatgggtacatatttgggagaaaatcttctcattagctatggtgggtatgtgtatgggaatgcagaattcgaacctgattataactagcaaaattagttgtgtaacccaatagataataaacccaataactaacccacttgtcctaacccttttaagcatccatctacccaacttagacgatcaaccacccgttgtcccatccactagttcacgtgtcatttatttttgttgttttatatagttaaacaatttttttcttgttaaatatcagtatatttgtgttatgttgttgactgtgaaccatacatgtgtcaggatcagaaattcacttacataactggatatcatcatacagtgttcaaataatagcgtaaaaaatattactttattacatcatggtgttcgaaatattcac

SEQ ID NO: 26653 - DNA, 1244 bp, Zea Mays
acaaagttcaccaaatccctgacttttatgtgtcgaagaaaggtaggctgtagtgcgacatctgctctgccacgtttctgctatggtggtgccgtggtggtgtgactaatcatcagagataagtagcaaaccgtcaaccaccagggagacgagccaggttgagaaggaaagcatcgcgagttcgccatacggatgggttccaaagcgcctttctgtctcacgctcctcttgctgctcgctgcggcctgtggacctgcagcacatgcccacgatgctgtcgagctcccgcatcatggcttagccttgaaggaacaaatttcttcaaccaagattcctgcccgtctcaagagtggcagcggactatgctcggcctgtgaaaacttcacgagcgaagccgtcacttatctcggcaaggaacagacacaggacaggatcatggagttccttcatgatgcttgctcccaatcattctcctttgaacagaagtgtgtcgagctgatggactcttatgcgactctcctgtttgccaagatcacggagatcagaccggaagcgttctgcaaacggtatggcctgtgcagggacacagctcttctctccggtgtgggaagtgacagcacgtgtgtgttctgccaccatctgctcgatgaaatcatgtccaaactgaaagatccagatgcggagtttgagataattcagattcttgtcaaggagtgcaataagatcgaaggtcacgtccagcaggttgagcagatagtggttgaaaggtctgaaggttggcattgtggatatttttgctatcatgcatggattcccagacaatgtgaggacgaaccagaagggcgagttctgggtggcgatccactgtcggagaaggacagcccgatggccagatgcttcacatcatggaggacgacaagggagaggtggtgagagttatcatcgaagtggagggtctgtctgatgccattcatcgctgtctttgacctcgtgaaggcgtcttagccacttcaatttgattggaaatattgttgttttaagatacgggtccatggttaatgttgtacgcttctctgagaagacctgtcattccaataatttggttctggagcaacctggagctgtatactgatctagcttcttttagtaacaaatgtaagttgctcacattttctttagattgtctatagaactttgaacaaccagctcgtcccttctaatttttatttggccagcaaacaaat

SEQ ID NO: 26654 - DNA, 4572 bp, Zea Mays
atggccctcatccaaagcctcctgaaccataccacattagaaactgataccgtcctattcaaacttgttaccgctgttccagagcaacaaaagcagcctgtgcaatcttatgatacagatatattttctaggcatgatcaaaagctcttaaaggcttcagcatttttacctactatagaatccccatttgttccaaattcgtttaccgggaagagaaaatcaactgttggtaattctcccgtagtccaacctcatgttggatcacgggctgtccatgagtaccagttccttcctgagcaaccaagtgatacatatgagagggcaagtcctcactactatgacactccagtggaagcttcaaattccaggataccttctctcacatcaggatcacaacttctccatggatctgaggaggctgcgcctagttatgcttttcaaggtcacacatctggttctagcctgttgcctccttccagcaggccccaggtgtttccagtagcaccaacagattatgagatgacccagtttaatagcaaccttagttctgttcctgttgaaggccagtttgatacgtctcaggttgctgcatttgaagacccacctgtatcgtctgaaagaagagcttatcatgatgaagatacttctcgagtggaaagaaaacgaaaacataatgaagaagcaaagattgcaaaagaagttgaagctcacgaaagacgaattaggaaggagcttgagaaacaagattttttgaatagaaagagagaggagcaaaggcacaaggaaatggagagacttgagcgtgagagaagaaaagaagaggagagattactgcgtgagaggcagagagaagaagagaggttccaaagagagcaaagacgtgaaaatgagcgcatggagaagtttttgcagaagcaatctagacgagaagagaaacaaagacaaaaggagcaactccgaaaagagaaagaggcagcaaggcaaaaggctgccaatgaaagggctgctgcacgtagaattgcacgggactatatggaactggtggaagatgagcgtttggaattaatggaattagctgcacaaaacaaagggttgccctcaatgctgtatcttgacagcgacacattacagcagcttgattcttttcgaggcatggtaagtcaatttcctcctgcaacagtgaaaatgaagttgccattttctataaagccttggactggatctgaggataacattggaaagcttttgatggtgtggaaattcttaattactttcactgatgttctgggtctttgtccagttacacttgatgagtttgttcagtctcttcatgattatgattcaaggcttttgggagaactgcatgttgctctgttgaaatccattatcaaggatattgaggatgttgctagaactccatcaattgcactaggggtgaatccaggaggtggtcatccacaaattgttgaaggggcatattcctggggattcgatatacgtagctggcaacgtcatcttaatcttcttacatggcctgagatattaagacagtttgctttatctgctggttctggaccccaattaaagaaaaggactgtggaagattctcactatcattatgataatgagggtcatgatggtgagaatgttatattggcacttcgaaatggtacagcagcagtgaatgctgttgctaagatgaaggaaagaggttacaccaatcgccgtagatcccgccaccgtctgactcctggaactgtgaaatttgccgctttccatgtgctctcgcttgaaggaagtaatggtctcacaatattggatgtagcagaaaaaattcagaaatctggattgagagacctcacaacaagcaagacacctgaggcatccatagctgctgctttgtctagggatgcaaaactttttgagagaactgctccttcaacatattgtttgaagtcgccttatagaaaagatccagctgattctgaggccgtgttgtcagcagcgcgtgaaaaaattagggcctttcagaatgtgctttctgactctgaagctgaaaaggaggcagatgaagctgagagggatgatgattctgactgtgatgatgctgatgatgaccctgatggtgatgatgtgaatattgaggtggaagaagacaaggatcctcttcttgccgtcaaggcacaagacgaagtaccgagtacaactacagttattggcataaagaccaagttagatagtgtaggtaatgcattgaactcatcaagtagttttactaaatcagcaaaaggtgctcctctcccttatttaggcaggtccagtgcagcagatacttctaatgattcacctcttggaggcccatcagctaatcatgaagtaacccctggcgattctgaaaatactcaaattgatgaaagcaatcaaattgagccttgggtatgtgcactagcagaaggagactactgcgatcttagtgttgaagaacgccttaacgcactggttgctcttgttggtgttgccactgaagggaactctattcgtggtgtacttgaggaacgtttggaattagcaaatgccttaaagaagcaaatgtgggcagaagtgcaacttgacaagaggcgtttcaaggaagaatttgctagcagagtacaatataactctggcatgagttttaagcctgatatatatcaagaaaacaacatgacagagattacttcaactcgagcctgtgatgcttacaaagaaaacgatggacatgttgggacaatcaacaattgtgagatgcttgatcagcatagtcagggtaatgctggtggtataacttatgatagaaatgtcgtaggccaggaaatccatgcaaccccagatacttcgtatgttcagcagtatgcttatgctgataaaacacgatctcagttgaaatcgtacattggtcaccgggcagagcagctctatgtttacagatccctgcccctaggtcaggatcggaggcgaaacaggtattggcagtttacaacttcagcatcaccaaatgaccctggctcaggaagaatcttttttgaatcggaagatggatgttggagagttatcgactcagaggatcttttgactgttctggaaggtgcaataataccagatcgcctctcttctgattttgaaacaacaagcgaatgtctaaactcacaggttatcgcaccccaaaatcctgtgttaccagctggatttgcttctgtccttccatgggttcctgacactacttctgctgttatgctccgagtgttagaccttgactcagctattttgtatgtgcaaaatcaaaagatggagagggatgatggaggttttatgaaatttccatcaaggtatacagttgttaagagcaaacaagaaacaattccactcgaaccaactggtatggatttgtatgatggaaggtggcttcctggtagtggccgtaggggacgtggccgtggaagtagaggaggtagcaggggaggcaggggccgaagtcgaggtggaaggatcccaagaggtgttagcagctcatcaaggatcgagttcaaggatggcattgctgcttctggtagagcgccaaggaagaatgcacgtcgaggtcgaggtcgaggtcgaggtcgtgggcgtcgaactgtcagacctcggcagccatctgtgggcagaggcagatcaattccaaaggaaaatttgatgggaagctttagcatgcttaccagctcaaaggctgccgacattgaggagtctccacgaagctctggcgcagatgagtggggcttggagaccagaatgacatacactgagcgtgacgagaacagttctggatcacgctatgaagataacgaggaaaacggccagcccatggacgaggattatgaagagcaggttccagattactcaatagactattctagtgggtcgaggcaccatgaaatgatgtccatgatggatcacgagactgacgaggaagatgaagatgctgaaggtgatgagaatgtggaagaagatgatgcagaccacgcagttgacgatgccgatgttgagatggacgaaggtgatgatgaaattggtgatgacggagaggatggcggcgttggcggggagatgactccggatgaggatccagatgctacttcatattcatctgactacagcgaataagaaagcagaaataagtgaccttatcctagagatcctccctcagcgtccctttgtgaaccaaaaggaaaagctaaggagcgatagatgtgcatactgtttttttaggcaccgcaggttctaatagatttcctgacgtatgcctactcattcgatgagtggttgtatcttgctaggtatgtgcatgtcactgtagaattccccgagctatacagtgtctaaggagagatgatatcatatcgcaatttgctaatttggttcccatgcgtcatcccgatcctaatctgatccttaaatagagcccattgtccccttaagtagaagtgatcttttatcatgagttttaccatctcttaaaagtaaatatgaaattggagtctgctttctaaccgagaacatggc

SEQ ID NO: 26655 - DNA, 2777 bp, Zea Mays
cttgtatcaccacttaattcaagggaatcaaggttaagtccactttaggtcttcttgaggtggttgttggttgttccataatcgagtctgaattgagctcttcagttgagagtagtcactctggagcagagcaaaagagaattcacttgcacctcaacagatttttcagtggcgcacgtttttcttcccaacattttcttaacttaatgtcagcaaagcacaaagaaggggatcttgtttatgttagtgataaaaaaggtgcttgctaatggccattatgagttgaaggagtacacaattgacgctattgaaggagaaggggaacacagcactatgcttgctaggaaaccacaccctatatacccgtcgaaagcgggattaaaacctagtctgcttggcctttcaatctctagggccttgaagatattgagcccagatgttgatccagtgcctcccgatgttctcgttgaattcaacttgcctaatctctttgatgcttacatgggaattcacaaacctaaggatcgatctgaagctgattttgctcgaagaaggcttatatttgatgatttcttttacctccagttaggaagactatttcaaatgcttgaagcagttggtacgcgggttgagaaggaggaattgttatacaagtgcaaaagtcatgagctgaatactgttggtgtagatgattggtctcctcttacaaagaaattgttgagggctcttccttattggcttactcctagtcagttggatgctgttcaagagattatatgggatctcaggagaccagttcccatgaacagactcttgcagggggatgttggttgtggaaagaccattgttgctttcctggcatgtatggaggttgttaattcaggatttcaggctgctttcatggttccaacagaggtgcttgctgtccagcattatgaacacctaacttcattgctagagaagtttgatggagatgagaaaccaaatattgccttgctaactggttcaacgtccacaagggagtcaaggataattcgagatggtctgaaaactggagagataggcatggtcattggaacacactgcttaatagctgataaaactgaattttcagctttacgtatctctgttatagatgaacagcagcgctttggagttgtacagagaggcaggtttaacagtaagctatatacttcttcctcaaagttgagtggtgaaaatacaagttcagacgaggcttctgattctgaaacatttatggctccacacgttcttgcgatgtcagctacccctattccaagaacattggcacttgctttatatggtgatatgtctcttactcagatcacggacctgcctcctggaaggcaacctattaaaacccttgctcttgaaggaaatgatgtagggtttgaagctgtcttccagatgatgagggatgaactgatagacgggggcaaggtctaccttgtgtatcctatcatagatgagtctgagcacttgccacaactccgtgctgcaacagctggatttgattccataaagcaaaaattcgaaggctatccctgtgggctattacacggccgcatgaggagcgatgagaaggaagaaactctcaacagttttagaagcggagaaacacgcattctcctgtcgacacaggtgatcgagatcggggtcgatgttcctgatgcttccatgatggttgtcatgaacgctgagcgatttggaatctctcagctgcatcagctgcgagggagagtaggtcgcggtgagaggaaatccagatgcatattcctggcttcaacttcgagcacgctgccaaggctgaaggtgctcgagaagtcctccgatgggttttacctggctaatgcagacctgctgctccgtggccctggcaatctactaggtaaaaagcaatctggtcatcttccagaatttccaatagctagattggaggtcgatggtggtattttacaagaggcccatcttgccgctctgaaagtgctggtcgcaagcaacgacctagcgttgtatccacggctgaaggtggagctcagcatgaggcagccattgtgcattcttggagattgacatgtcaacagtactgctcgtaggctcgtagcattgggcgacgcgtgtactgtggataactattggtcgtaggctcgtagcgtcggcaaagttgacatgccgtctggtgagcgaggcgtgtaccatgaataactgttagactgattgtgtgagtgtgtgtgggctggtaccattgttaggctgccggttcattagggttagagttgagtctatatattgtaaccccttctctatgcaatacaatgatccacttcactattctacatgttattagactaggttagggttttctgaaacccacagtagccaccggtcgcctcccaccccacagcagccgccaccacctgagccgtcgtcgccctccaggaggctcctccctctcggggcggcacttgcccctggcgcggctgtgcatgggcgcggcccctcgtagctcggcgcgggagtggcagcccctggcctcgacggcgcgaggcgcgaccccctggcagtgtggacgcgacggtccgtccatggcggcgcggccacgccggccccggcgcgggaaacggctcggcggcgcacgacacggagcctcatcacgaggcaatggtggccacggcgccgccctggcggctggctcctccggcgaggtacagcctcggcgcgacctaggcgcgagcgtaggctcgtgggcctcctct

SEQ ID NO: 26656 - DNA, 3965 bp, Zea Mays
gtaggtagttgctgctgtgctgttcccccccgtctgtccctgagaggcccgcggcgtctccgcttcgcctcaccacccaccacctcctcctcgccggtacccctcgccggagccagcgagcttccggcgaagaaatccggcgggcacaccacacgggggcggagcaggggggaaggggtccggcgccggaatgggggcaagcggccgggtgctcaacgccgtcgtcgctggtgtcgcgtcgctctagggttaggatgccatctcaagtcatggatccgaggcgccacctctcccagttcagcaatccaaccgtggctgcgtcctccttctctgaggagcagtttcgccttcccacagagaggcaggtcggattttggaagcaggagtcgctgcatcacattggaagcaagtcagttgcatcttctccaattgaaaagccccaacccattgggacaaaaactgtgggtcgggtagaaccacaaccatacaagctgagagaccagaagactgcatttagccttgagcacaagacttttggtcaagagagacatgttaacctaccaccatctctgtggagagctgatcaagaccctaacctccaatctgatccatctttatttcccgatggaaggaggactagtccaaatgaggcctacaacgagaatgggcttttctcaagctccctatcagaaatttttgacagaaaattgggactgagatccatggatgtgcgtctacgccagccagttcaaaaggttgatctaactcatgtagatgatgagccctttgagttaacagaggaaatcgaggcgcaaataataggaaacatacttcctgatgatgatgacctactatcagatgttcttgatgttgggtacacagcccatgctaacatgggtgatgatgtcgatgatgatatattctacactggaggcgggatggaactggaaaccgatgaaaataaaaaaaatacagaacttaatggagctaatgatggtcttgggttgctaaatggcacaatgaatggtgaacatccatatggggaacacccttcaagaactctttttgtccgaaacattaatagcagcgttgaggattctgaattaaaactcctatttgaaaattatggagaaatcagcaacctttacactgcctgcaaacatcgtggttttgtgatgatatcttactatgacataagatcagcatggaatgccatgagggcacttcaaaacaagccactcagacgtagaaaacttgacatacattactccattccgaaggacaatccttcggagaaggatattaaccaggggatgcttgttgtatttaatgttgacccctctataacaaacaatgatatccatcagatatttagcgaatatggtgacataaaagagattcgcgatgcaccgcaaaagggccatcacaaaattatagaattttatgatgtcagagcagccgaaggtgcagctcgtgctttaaacaggagtgatcttgctggcaagaaaataaaactggagactggccgtctgagtggtgctagacgttcaacacagcacatgtccaaggagttggggcaggaagaatttggtgtatgcaaactgggcagtccaagcacaaatagcccttcattgccttcattgggttcatctaatatagcagcaatgacatcttgtggacgtgaaaatgggagtatgcatggtttgcattctggacttctcacatcaatgagcccgttcagagaggcttcatttctgggtctatcatctaccctaccacagagcctgtcctctcccattggaattgcttctgctgcaactcatagtaaccaggctccccttggtgagctcagccactctcttagtcggatgaatgggcatgtgaattatggttttcaaggcttgggtgctattcatccccattctcttcctgatgttcacaatggagcaaataatggcaccccttacaatctgaacaccatcacacctgttggtgtcaataagaactcaagaacagctgaagcagttgacagcagacatcttcataaagtgggttctggcaatctcaatgggcactcatttgatcgtgccggtgaaggagccatgggattttcaagaagtggaagcggtcataactgtggtcaccagttaatgtggaataattcaaataacttccacggtcatcccaattctcctgtgctgtggcaaaatcccggatcatttgtaaataatgtaccgtctcgccccccagcacaaatgcatggagttccaagagcaccatcacacatgattgagaatgttcttccaatgcatcatcatcatgtgggctctgcgccagcaatcaatccgtcactttgggacaggcggcatggctatgcaggggacttgacagaagcatcaagttttcatcctggcagtgttgggagcatgggatttcctggtagccctcagcttcatggtctggagctaaatagcatattttctcacactggtgggagtcgcatggatccaactgtgtcttcagctcagatcagcgcaccatctcaacagagaggtcctatgttccatggaaggaatcctatggtcccccttccttcatttgattcacctggtgagcggatgagaagccggagaaatgattcaggtgttaaccagtctgataataagcggcagtatgagcttgatgttgaccgcataatgcggggggaagactcacgaactacactgatgataaagaatatcccaaataagtatacctccaagatgctcttggctgctattgatgaaagtcataagggcacttatgattttatttacttgccaattgattttaagaataaatgtaatgtcggctatgctttcatcaacatgaccaatcctcagcatatcattccgttttatcagagttttaatggtaaaaagtgggagaagtttaacagtgagaaggtggcatcacttgcttatgccagaatccaagggaaaacagccctgattgctcatttccagaactctagtttgatgaatgaggacaaacgctgccgccccatacttttccactcagatggtcctaatgcaggagatcaggaacctttccccatgggttcaaacatccgagccaggtctgggagatcccggacttcttcgggtgaagaaaatcaccatgacatccagacagtcttgaccaacggtgacacttcttccaatggagctgacaattcaggtcccaccaaggatactgagtagctgaactgcagcttgctgcatcgctaaccacaaaggcccaaacttaggctgctgcagaagttttgtctctggcgggaagctatatgcaagagggtggtaccggttcgttccccagaatctatgtgcttgttaacctgaaggccgagaaaggcgaaaaggcgcagggagagcctccagattttggtcgctgtaagaattaaccccatgttgtacagctggtcccagtaatttgtgctgaggggagagtgaaggagtcatttgatcagtttttagtggtggtgtgtggagaggaagagtcttgcctgcttttcctttttgaactttcttttgtgccttcacctgtgttacattttgagtcgagggctcctcttaaattgtgtgcagaggggctcgattttgttaccccagaacaaggcgcatgtgcgtcggcgtcgtcttctgccaccgtatctatcgaccttatgtacatcttcatctatatatagtatgagttttgatgtcatctatttcttggatgtctcacaaggttatttatttgtatctacgtgtctgttatgcttgtggtgtgtaaagcctctgtgaatcttatgcttggttgcttactatgtgagcatgaatgcaagctgtgagcgtgtaatccttgttcaaatccagagtataccaacaatagctaattgtttgtacattgctatggtttctatatgtagatcttgcttaaatggg

SEQ ID NO: 26657 - DNA, 2443 bp, Zea Mays
ccacatctgaatctcacccacccacccacccccgcgtcccccacctcatggcgccggcgatggggctgaagcggcctgcggcgggagcaggggcggcagcagcgcagaccgtcacgctgtccgcgcctgccgtgcgggacgcggtgcgcaccgccgtaagggaggccgaggccacggcgaaggctaccgccccggccgccagggtcccggcgacggcggcagtgccggcggagatcgctagggatggggtgctgtgcctggaggaggtcgacgggaggcggtggagctatgtggtcgacgccgccggcgccgcggtcaaggccaagggaagggcgtccgtcggcggcgccttcaaggccgtcccgctccagtccccgatgccgcccgtcgaggaaatcatgtcctttataagatcatatgttgtgcccgaaggctttccagatagtgtcacaccttcatatgttccatacatgacatggagagcattgaagcatttctttggtggagcaatgggtgtgtttacaacaaggaccttgctcaactctgttggagtctcccaaagcagggctgcatctggtgctgtggctatcaactggattctcaaggatggggctgggcgtgttggaaagatgctttttgcccgccaagggaagaaatttgattatgacctgaagcaggagctgggatagaattagctactgcagctttcccacagcttttcctaccaatggcatgcatagcaaatgttgttaagaatgttgctgctgtcacttccacctctactcgaacaccaatttacaaggcgtatgcaaaaggagaaaacatcggtgatgttactgctaaaggagaaagtgttggaaacattgctgatctgttgggaactggaatgagcatactaatctcaaagagcaatccatcactggtaacttcatttgccttcttgtcgtgtggatatcttctcagttcatatcatgaggtgagatctgttgtactaaacaccctgaatagggcaaggttcactgtggctgtggattctttcatcaggactgggtatgtaccctcgctgaaggatggaaactcacaagagacaatatttaatccaccttggcgacatgagccagttgcaataggatcaagatttggagatgcgtttcaagaacctgcttcgtttcttgctataaaacctttgttcgaggatgagaggtatattgttacatataacccaacaaaggacaaggtatatgctttgctcaaggaccaagcaaagccagatgacattctcaaagctgcttttcatgcacatgtgttactgcatttcatcaatgcctcacatgctaacctgaatgcacggaagcgcatgaactccaaccggtcgtaccagtatgacccactgaacatggactttgtaccacacatcgaagagtcgtgcaagatcgttatgtcatcttatggagttttcaagaagaaagcaagagaacagggatggataatgtctgaatcacttcttaacccgggacgagcaagattgtgtggagcagtaccacaatgatccaagcctttttcgtttttcatgatgaagaggatgagttctttttcatacaattggtatgtgagtcagcgaaactaacttaagtcgacaatcagctcaagtacataaaatgcaccaaattgtcatgagtcctgatcctgcaggaacagtacttgaacctggagcgttagatcgcaacaaccaccatgacaggggggtgctgactcaggaagggtccgtgaaggctccaaactgcggaagatcgactaacaatcagctcttgtatattcttttggtattgtataatggaggcggctatctttcctaatgttgaccggactaagtggtcatcggctgatttgttttgactatctgacaacaatcccccctgctaaccttgcggtatcgtggtcctcatttccctaatttggggagcggtacatgccagttttcgtaaagaatatcagtgtttatatgcaaattgatttgatcatttgtctcaggcctgtttggaacaagggagatgttttctgcgtatgtttcgtgaaattaaactgattcctatgattttttgcactattcctacgaattactgcacttcaaacaccctcggatgtctcgatatatatagagatagtgctctgttttgttagtcatcgtccatgatgggctggttaccgtggctgttcttacttttctatttaggaccagtttagcggggctatgactctaaaaactctggctttagtttttgtagagaagcagcttcttcgagagaagttagtaggtttaaaatgtccattgtgaccctacgtgtctgacttgtgtatacaaaagagaaatatgatatgttgaggaattaaaatgtgacttgtgtatacaaaagagaaatatgatatgctgaggaattaaaat

SEQ ID NO: 26658 - DNA, 6321 bp, Zea Mays
ttgttcaagtgtctagacataaaattgaaacaaattgatatccagaaatagaagtttcgcattcactacagtagcttttatcattgtcattattattatggagcactccttgtcattgccatgctagctgtttttcttgtcagtttggtttgtgctttgatcatcatttacttgaaagatccattcaaagaaggcacatttgatttcttgaaatccaatttgctatcttgggctgtaacttatttaaacttcaggtcctctttctgaccaaactagcaattatgttctgcaagctggaatgtatttgattgctctgacagtaacaatgtctgtgaatctggtagaagctttctgctaagtgctaacctaatcatacagacactattatcataaggtggttaatatgttcttgtgactcctgcagacaaaatatcaccgatggaccccagttgacagttgccaacttgccacattttgaggggggtcacttgcagaatactactctttatgatggaatgcagtttatgccagcatttgatcttgcccagtgttttggcatgagacaaaattttacttccatggatcaagatttaattgctgatggaaacgtaccacaaagatcagctcatttacgcagaagaagagatcttccacaaacatcaacattacccaaggttgcagtgaaccatgagttaggaagtgctggcacgtctatggatccatcattttttaacaatacaatcaaacaaagtcctagtgaaaacagaagttccttaaagcctccaatatttcttatggagaacagtaatcatcagccacatcatcatacagttgcactacctgttcaatatagtgattttttcattaccagcttgggagaaattgacaatcggacaagttaccacaattcataccagatatggccagttgggtttacgtcttactggcatgatagagttactggttcactgtttgagtgtgaagtgcacgatggagggaattttggacctttgtttaagatgagaaggttaccgtgttcagcattccaacttccggatgcatcaaccacagtgtgcctaaatgttgttaggaacgctgatacaatagaaacgaaggaaggtagtgatttgattgaagatactgccaatgatgctaatgataatatttctatgctcttatcagatttctctgagacgaatcaagatttcttatcatgtctaggtaatgatttggagggtaaagaaagtttagggtgcagtaatgtagaaactaaggatatgacagtgccagatgtgctgtcagatcctggctctttcagttgggcaccgaccaatgatgcaaatatgtatgacaaaattggtgacttcagttatgaaggaacatcaccttcctcagtctggaggatgatttcttgtgctatgatggaagcctgtgaaaaaatgtacaaggagcatggccatttggtattattctgcactcacagtagtgaaaaatctccatttgactatgaaagtggacctcagcgcactgatggtcctttcaatctattggctaagttttgctcatcaaatgggcctaaggtaccacagtttatagaaaaggagaatgatgtgcagtcaacttgtgcattacttaaagaatggctgtatccagacagaatcgggtttgatttggaatttgttcaagaatttgtggaatctcttcctaaatccggggcttgttcacactatcagttcttgtgtaacaggactggaattaactcttcactgacgattgcaagtggcacactggtagctgttaataaaaatagtccaatgcatgcgagacatggatctgtagtgagtgggccgcaggatcatgctcagcctagctcttctagcatccgtgagcttcctccaggaaatcctattagccgcaagcttgcaccagaattggctggggatgttttccagatattggagtttcttggacgatttgctgaaatcatcggcctgaaagaacttccttcaattgagcaagtagaagatgaactcattgacccatggccaatgcatccaaataaaaatgacatccacaactacatggatcacaatccaccgatgaattcacctgctaatgtttcttcatcgtactcgaatggcgaatcaggtgatggaggtatcctgtgtggagctctacccggggttgttggcatggagaaggatgcatcgctacttgcagaggctgaaacattgatatgcaattcttcagcaaatgaagggaataccgtctttatgatggattacaaggatactgatattgtagattctcctgaggagcctgctagtgacactacgttgccagattgggtgaaatcattggagcctgtgagaaaattgccaactaatgtgggaacaagaataaggaagtgtgtttatgaagctttggagagaaaacctccagaatgggcaaggaaaattttggagcactcaatcagtaaagaggtctacaagggtaatgcatctggaccaaccaagaaagctgttttatccgtcttgacagaggcatgccgtacaaaagtaccccagaatacagaaaaaccaagaaaagagagaaatattatctccatctcagaggctgtcctgaaaaagtgccgtattgccctgcggcgtgctatttcctctgatgaatcaaagcagtttgctaatttgcttggaacaactctaacaaattccaatgagaatgaagatgagggcatccttggatttcctggtatggtatcccgccctttggatttccgcacaattgatataaggttggctaagggagcttatcgcggatcttgggaggcttttcttgatgatgtacaagaagtaatttgtaatctgcaaactgcatttgctgatcgacctgaagtgctgataatggttgttgcactgtctgagagttttgagtcattgtataagacagaggtacaagaccttgttgagaaatttgacagatatctaagcaatgaaaatgatagctcagaaatccaccaggagctacaagatgctctcacggcagcaaacaataaactgccgaaagcaccatgggaggatggtgtctgcaaagtctgtggaatcgaccgtgatgacgagagcgttcttctatgtgataattgtgactctgaataccacacttattgcctgaacccaccactggcacgcataccgcttggaaactggtattgtccatcatgtactgcccaaactcatgttgcagtgcaagaacaaaagaagtgccttggggaggaagctcatgtttttattgagaaactcaacaagttagctgttgcgatggatgagaaagagtactgggagctaaccgtagcagagagaatctatttgctaaaatttctatgtgacgaattgcacaacacagctctcatcagagaacatctagatcagtgttcagacaagtcaaatgatctccagcagaaattacgtcacctgaattatgaactgaaagagttaaggtatcgggtagaaataaaaaatccttatgccacacaaagtagatggatgaaaaatgaccaagtaagcaatagttcaggactcgtggagaatcagcagcgtgctatgcccacagcctcagagcatcttgaagaggctgaacaggttaatgttggagttaacctgaacaaccctgctgaaggggttcctgctgcactattggatgtgggtaaaccttgcagtactgacaatggcatatccagcacatctgttattgaaggaaataaatctttggggctttcagaacaaccatcaaagataattactgaccagactgatcgggactctattgccgaaggatccaatagttgcgagaaatcattagttggcaaaagtggtacttgtgatccgaatgtgggagagactcatgctgctacagttatcaatgcaccaaatggagatttacctgatgaaaatgctatgacattgtcccaagataatattgaaacatcgacatctaaactggttgaccatgatgctgatatgaacgaatcaaataatttattggagaggatttcacagttgcatggttcaattagcacagtagagtcacagcttagtatggcatccttgagaggagagtgcctgggtagggattctgttggtcgattgtactgggttacaggaagaccttgtaagcgtcctcgtcttgttgcagatggaagcatgatgatacccaaggacagagacattagcatggttacaagccattctcagtcaacattcgatagaggttggaattcggcatcacttgttatttatgaatctgatgaagaaatgaagtgtcttgttgactggctaagggacattgatccaagggagaaggatctgaaagactctatcttgcactggcaaaagtctatttatcgccaggctagtttccccatcactgatcctccagtgtccaagttttcaaagagtgagccacttatggagcttccaaacaccaatgcttttatagttttggagcaaaagtatggtctgcaaacggatcaggacactagtgagctatccaaaaggagaggaacgaagtcaaggtcgggttctgaagaaagagtatatcgctgcgactgtttagagcctatatggccttctcgacaccattgcttaaattgtcatgaaacttatctcacattgatggaatatgaagggcataatggtggaaaatgcaccagcagtaacgactgtcctaatgaaagtaaagaaattgatgagccgaaactgaagggcagcaagtctgatataaaggaaaaagatcctgtagttcataattgttccgttgaaccatctaacagtggaaaattggagtcatgcccttatgactttgaagaaatttgtagaaaatttaccacaaatgattcaatcaaggagacggtgaaggagattgggctgcttggctcaaatggaattccatcttgtgtaccttcacctgcatatttccttgacccgccagttctgctaaatgaaagtaaaagaaatgacgataaaccaaatgattggacttcctcattgcaggaatgccaagctgtgtctgccaaaatgtcagggcaagagggatctcaagttggccaagatttttctggcaatgcaggtgatgaggagttgccaaaatctaagaagcctgtcagggatagtacttcagccaaggaagcaccttcaacagacatatccacaagattgctaactgttaatgggggattggttccagagtcatcactgatgcctgtaataggcaggaattttcatatcctgaagcagctaaagattaacttgcttgacatagaagcagctttgcctgaggaagcattcagagcctcaaagtctcagcaaataagaagacgttcatggcgtgcttttgtgaaggatgcagaattaatatcatatgtggtattggcaatcaatttcttgcagagcatgataaaagccgagtttctgaagaaagattggtggtactggtcctccttcactgcagctatcaagacaacaactgtatcatcgcttgcgctcaggatttacaccctcgacgactgcatcatgtacacaaaggatccagctccaaacctgcagccagctgacaatgcaaggtctggaaacaaggggaagaggaagaaagacatagattcatgagcatcgtaaccacaatgctcctggcttcccctgtagattctatctatctgcatttagaggcttctcagttctctggcagcataacaacgcggtcaggtagattggagatatagatggtagtggtcaggtagattggagatatagatggtagtgatacaggtcgcaacctatgtgtgacctctttcttactgtacattccagtgtcacagcaagggtgcagccatgatttgcccgtttcagtcttgtcctacttactggcctgccattgcgcgatatctgctgttgctaaggctcaatctctgtaaattctactcgagggatggcaccgggcaagtgctggtgtttaatctgttgcccgatgtgttgatctgttctaggggattagaggaggaatgctaggtcggtaggatttaccccatttctaccctgcttcattttattttagtggtggcagtgggtagtcgtagttttttcttttcttttcttttcagagctgggattgtttgatggatgtcccctgcggcatctgactgctttagggaatttgatacatgacgagtgtaatattttttttgacatagaagttgtaactaaaccgaaactaataatgatgaatgaaaatgaatccctgttcctttccccgtttcttcatgttggctgg

SEQ ID NO: 26659 - DNA, 1818 bp, Zea Mays
gccagttcccactatccggtcgacatttgagtatttgacgcgttttgtttgctgtttagaatttgacaaaatccatccactcttgcctctgtcttctcaacgtaaagacaggcagggcgggcacgaagcgaagggaccagccagcgagcggctcgccggcgacgaccctctccccgccccaccccgcccacggaagcacggagaagatgtccgccgcataccctcgtctcctcctctgtctcctgaccctagccctggctctcgcaggggtcgccgcgggcaagatctcggccccccgcaccccgatctcgcgcgacatctaccactccagagctttgggcagcatggcagagaacttatcacctccgaagttgcattacgtcttctctatgttttaacggagaagcccaagatcgctggtgtggatatttcatcctttgagaaactgctggagaaccttgtgatcaaagttgtgccgatggaaaatatgaatggtcgcaaacgtgtcgaagaaggggagctttgtgataggagaaatggaagaggagttgatctcaacagaaattggagtgttgactggggaaagaaagaaaaagactacgacccatacgaggagaatcctggtattgctccttttagcgaacctgaggcccagatcatgagggaattatcaaggtcgtttaaacctcatatttgggtgaacgtgcattctggaatggaggccttatttatgccatatgatcacaagaataccacaccaaatggagcatctgcacattcgatgcggtcagtcttagagaatttgaaccgtcgccatttccaagatagctgcctagttgggtcaggtggtggatctgttggatatcttgcacatggtacaacaactgattacatgtatgacattgcaaaggtgccaatgccgttcacctttgagatatatggagatgagaaagcatcttccgatgactgcttcaaaatgttcaatcctgttgacaagaaaacattcgacagagttgttaacaagtggtgcatggcatttctcattctcttcgaggaaggcctgcgaaacctgcgagacgcgcagatagtgtcgcaaggcacgctggaaaactgggtcccaattggaggagacatcgtcgagataaatgtggagcggaagagcagcatccgtgagaggaggaagctggaaggcctcgaccttggaatgcaggagctaaggacatatttccggctattcttgctgtcaacattcctgttgatgttcatgttctgcgcgcggatatcaaagaacagaaaccgagactcaggtaacttgtttgacccttgaatgaagtaccaaagagagcatcggtgggggggggcctcctccgagctgaacttcgggtgcaaagagcgatcccctcagatcagacgaacaaagcgatctgaaacattcagagctggaatacagctctgccttcgcaccctggtattcggagctggacgtcccgtatactttggacacgaaggatggtggcaggcagtgtctgtttaggttacagcagagacgccagacgatgtggctaactgtttaacaaaattgtagctgtaaaaatcgcccatgtcagtttttttttggtgatgcataggttttactactacattttgatggaaggttgttagtgcacccaacacttggtacggtgccatcagttgatgtaacatctcactgatcgagcggtttatgtggaattgtgttggctcgaatttcttctgggttctcaaattcatttcgtaactttcaaagtttaaatatttatatgtatacatatatttaag

SEQ ID NO: 26660 - DNA, 411 bp, Zea Mays
ggacctgctcgagctccgtaaaacggccgctgaccgaacccaaccggagtataaaaccctatcagacctcgcctccttctcaaccctcctgcgccgccacaaaggaacctcgatgtagcaagaggaaggggagtacaacgagagggagagagaggtttccgccgccgccggatagatccataccacggtggtggcagggccgtagtaaagcgcctggggtgaccgcgagcggctactgaagctatccgtggcatctcctggcgatgtaatccaacaacgcgccaccaatttctcgacgcctttccaccgccgccgcgagtgcctgtgccgccgtgggtagggttctgcgcgtcgccaactctggtaagaacctgcccatagactcacgtcaatccctgctacgcgtagcac

SEQ ID NO: 26661 - DNA, 1351 bp, Zea Mays
cgaggaattatgcatagggatatatacgaagcaattgccgaattaggtaaattatttcaacaattatgtgctaagactctaaagttagatgttttgcatacaatgaaagctaaaatcccagtcattttgtgcaaacttgagaaaatatttcctcctgctttctttgatgtaatgctacacctagctgttcatttgcctgatgaggcaatccttagaggcccagtacaatatggatggatgtacccagtagaaagacgattgttgacattgaaacggtttgtgaggaacatggcaagacctgaaggatccattgcaaaagcatatgtcgctaatgagtgtttgacagcatgctcaaggtactttgatgatattgacacacgacacaatcgtgaaggaaggaacaaagagcgtgttgatttgagaaaaggtgatttttctgtgttccagcatggagttgatctacttggagcaccaaggcttacatatcttgaagataattatgacagaatggtttggatatacaaggaagagttagcggatcaaggaactccttatgttcaaaaaacccatgataagcaattttctttctggtttaagaagcatgttttcatgtacaagtgaatgaaggaaatttgaatgatgaagtaccggatagtgaagattgtcaccacgtcaatacaagtttagttgatgagtttcgtaaaccaaggcaagacaatgtgcaaggagacgggacaagcgatgatgaagatgaaactatatggcaatatgttagtgatgatgaaagtccaacaattcttgtcgaggatgatgatgatgatagcgatgccgagtaaagactagaaagttgatggtggaagcgttgctgacctatatggatcttggtcatgaaaatggtgacccacatggatattgggtcactatgataggatggtggcaattagtgtgtgctaggatattaaattttattctagattttgggatgtcctaggtcttttagctcggacaaagtctatgcttgtgtcaaatatttttatctttctctatatgtctacagacgaagaaattataatatgtcagaactataatatgaatgagcaccaattcattgattttattcagaaatcatagtatccctttttcctgggcatatgtttcacttaatattgttttagtgtaggctgagtgaggaattgaggatgcatgcagtatgaatatgtgtaggcaatctgaaattctgaatatgtgcacgcaatctaaaattctgaatatgtggagataatctaaatatgtgtaggcaatctgaattgattttagtcttctggtgatattcacttgtgccattgaatat

SEQ ID NO: 26662 - DNA, 4717 bp, Zea Mays
caaattcaaaacctcaacgcccccacccaagctcgtggccccaccgcgcttagctcccagcagttcgagcctggagcatcctccacggctccgccgggtttctccttcgcgccgccgctaggcctcttctctcttgcgctggtacctggtagccacgtgcttgaggaaggctgcttgaggcagaggaagaggcggcagtgagggagacaaggagcgcggtgaccctggattcaccggatgcagcggcctcgaattcgagcagcgcgcatcactcacgacggagaagacgaagacgcggggtcgctttccacgattgccaaacgggccgctgttacggaggaggattaggagcacacgcggacacgccctcggctccctacccgaggaactgccactctctccgccgcgtccccagttcaattccccccaggctcccgaaaggcagggcaacccaaacggcatcggccgcccgacagaacgcggccggagcagttcgtcgcgccgcgcggcctatcaaaagttttcggacggagacgagactgggttctgaacccgacccgccgcagatagcctggccgcagtgatctctagcggggatcgagctgtgccggatggatcgagtggggctccaggcgttctgcaagcggcacggcctctctgccaggggctccaacgccgatctcattgcccgtcttgacgccgcgctcgggagggctgctggtgcggaggaggcggcggctggagtggcagcgaggaaggcttgtgtgaggcaaactggcggcgatgctgacgagacgaagaaggttacttttgtagaggtgggcggagatgtccctgtgaagctgtctaggaggaattcgctgggcgcacatgtccctgtgaggcggtccaggaggaattcgctgggcgcagatgtccttgtgaggcagtccagcagaaactcgctatgtgctgaggctcaagactgtgaactgaggtcccaggtcacctgttcgcctgttgttgccaagacaagggggaagtctgctcaagccggttctgtagaggtgggcgcagttgtccctttgaggcgttccaggagaaattcactgagagctgccgagtctgaagaagtagaagtggctgtttttgttgacaggaagcgcaagtgcaagaaccaggagaatgataagggtgttgttctcagcgctcaggttggagcttcgtccagagttacaagaagatcaagcttggcggtggctgctgctgtgttgcctcctcttgttgaaccgaagagagggaggggagaagcagctggcgttcagacttctactcaggtggaagtaccggctaggattacaagatctcgctcaatagcaccggttgtaatgtcacctactgtggttgagaacaagaggaggaagaatggagatgcacaaacaaatgtagagctgcctacggtttcagatgtgcctagaaatgatgctcctgtcaccaggtctttgagaaatagagttgtccaggttaacaacagtgtggtggacgcgaacaaaccggcaactaaagaacctgttaggggattgagacgaagatctgttgtctcagaattgcacgagaaagagaaagatgtggagaaacaattaattgtgaagcaacctgttaggcgctcatcacgtaaatctgttctacctgatatgcttgagaacaatatccaaagcggtaaatctcaagataatgagaaggaacagaaactaaaggaaccaattaggcgatcaaggagatctgttgccacagtgttgcttgaggaacaaaacagtggtcttcatgaggaaaaattgtcaaaacttactatgaggagatcaacacgtaaatctgttgcacttaatggtgttgaaaagacgagcatggatcacactgaaatagttgtgcagtccgaaactttaaagggaaggtcttcaaagaggagacggacaattgatccagtagaaatgatgcctgtcaaggaggcaaatgatgacatgattatcagggaagcaacaatagacacacacaaagctactcatgagtacaataagtctactagcagaattcaagaaagttgtcaggttaatgccacaagagaagagttctcttcaggtccattgcttgtaacagtaacaccgactaatgagatttacaccgtgcagagtatacatgaagtggtacctgggtcagaatctggtgacaatgcaaaggaaaatttagataagagtaaacagcctcaggaacatcatgacattcaagctgttgatagccatttatctgaaacaagaagtggggaattagatcaatcatcatgcattgcaggactagtaccacacaattgtgttgcctcagatgacaaagctttgatcagtggagatcgtgtagagcaaagccctgtatctggagaagggagagttggcttggaagcaaatgccattgagtctggagaaaagaacctaactggcatcatgtccactgctctctacaccaaaagtctgcaacatgatattgacatagtagctgaagagactgccaaaggtgacctcgaaaaaccttcactatgttcattagcacaaaagtgtaaacatcaatgtggtttgcttgaggaaatagtattgccctcaaggaacatgggatctttaccaaatgcagaagaatcaccatttggcctagagtctttgttctggcaggaaagcatacatgaatctgtggaatatggtgcacctgcttctgcaacaactcatactgaaaatggatttggtgaatcaaaaggttgccatgtcaagtctgcactcgaaaatactcatgtgtcagaacctttttcccaccatgatactgaagaaaatatttccaaaattggtggttgcatgcatacatcccagcaagataatggaatggaagatgctatcgagaatcctttaattagtttatcaactcctggttgcaagcatgaaggtgctttgtctgaggaagcagtgcacacaatgaaggattatgctggaacatgctcatcaaatcccagggtacccatgcagttgcatgacgaccttgcattcccaggtcctgaaaaatcaggagatgaatcagtcaatattgaggttaaagtacaccatggttctaatctgtctcagttaggatcaactgatctcttggatgatactgaattgcttcaccagggccataactataaagatcgatccaatgaggatatgctagagcaggctgcttctgaaccctgcacaaatggggatgatatcgtggaggctgcggctgctaccaaatgcttagaaagtggagcgatgctggttccatccgaagagagatcaaatttgaacgataggcagcttacccccaagctggaaagcccagacatcatggaatctggccttaactgtgataaagatgctcgcaatactttggacaatggatctgttgtggctgttgctggtaagagaactccatctggttctggtcactatgaacacaatgtctaccaagtttcaggcatttgtgctacgtctgaagctgcaccagtcggagtggtagaaactggaatagctgtggaaacgtcatccctggtagatgaccaacctaatcctgtgctggatggtgatgaagttgagaagcacagcttaaactgtgaggcagacactggtcggattcttggtactggatctgttacgagcaacacaacccttgtgcccaaggacggtcacaccatttgttgccaggaactggagctaccaaatggcttatcctcgtttctatttcccgaagaatctggaatttgtcagtatgcgagtgtctcaggatcagggccttgcctgcagcacgtaaatgaaagcaccagtacgcaagcgacttacaatattgaaacgctcaatcagcagcatcacgaggagtacgaccaaaccgctcgtggtatcctggctagcagttttcctgaagctgtagggattgaacagtcaggtctggcccctgctgcagaagcaccagtgttggcagtgccagatgggcagcctaacagcaagctggagggcaacgaagtggatgagcacagctgtagctatgatgccgagttcctgaacagagaagcgtctaaccttcacaaagatctgtttagtgaagatagtcatcgaagtcatctaccttctctgagatctcctcaacgatctgcctattttcacaacggaaatgattcgggttcagtaggagtctgtcaaagcagcaggcgaggaggtgtagacggactccgcgctaagcggcagagtttcaaagtttccagcagcataaaaggaagctacgtcgccaagactagcgtccctcgtccgaagccaggggacagcctgagccagtctgcgatagcgctgcgcggggtcaggaagaacacgaccgctgttgaagttggtggccatcctgtgagtttgaagccaaacgctgttcgctcggtcgccaaggacccatcatccagcagaggaccacccagggatagcctgagccagtctgcgatagcgctgcctaaacacagaaaggacgccactgctgttaagagcaagactaataataaaccttggctataataaggcagcaggcttacatacatcactactccgatttcatactccactgtacaaacattgtaatttgatggttgtgtggttccggatttattttcagcacggaaagaaggaaaaaaaagaaggaaatcagaaaa

SEQ ID NO: 26663 - DNA, 3020 bp, Zea Mays
attgagcccaatgccatcaaagggtccgagcctccgagggaagaaaggtccacacaggacactcctccttcgtctttctccttcctcgccgctctctgctgcattcgcgaacacgcatcgaccctacgactacgagtagcgagagaggattgatggcggcgcagctgcggaggtgatccaagatctgtactacgccttgaggacaaagggaggtttgacccccaaggaggaggagacgctcctggcttgcaatttacttcctggtgtttatttcatcgtgggttcagtactgggcactttcgcgatgttgttgggttcccacaaaggttgctcactccctcagctctcgatttaatatttgataatgttaaagcatgccattcctgagaaagcgataatattgtgtcaacaatctgcgagcaccaaattgtgttaaaaaacatgccaggagcatgactgcggccttgtatatcaaggttaaaacctaaaatagtattcaatagccatactcgtgcaaaccatccaggatggggattggggaggacagtatctctagataaagttcaaagaaccgtgggtcatctggcaagcaacattattccattattatggctgtattttgtgagctccttccctaaatgttgcaccatggatgctgttgttatgctgctatcaagtgggcacaccagggtaaacgaattatattctgcttttgttattgctcctacttttcaaggatatttgtatgcttaccctgcgccggcattctgccattgttattactgttaaaggatatctgtatgtccctaccctatccttttactagccacggtgaatatgttacttttggagcaatttggcttaatttatgtttacaaatctcgctatgctactgtgcatttgatgcatgtatgcaggcacagctccctcacatttgagtgtagccttgggccattcaaagtgctggtgcctcccgtgatttgttcctgagtgcaggcatgcttgagttgtagagcttgctgtagcaatattatataaatagtggtgcttgaacattatagttaatgttttcctaatcagtaaaacaagtctctatatggtcaatgcatttattggagagggacaatgcaagtcatcagattttgactgttgattcaattaagtgtcgtataaacaaaccgcaaaactgtcatttttaaatttttcttgcagacaatagctattggtaccaaatgcatgcttacgaaattctgttgtgcaggactcaaattgcttgggcgtccacctaattctccattaagatctttgactgtttatggtaaatctcaaggatatttgacctggtggtgatccctgtacaataattcatgcaaaggcatatccaagctatgtttagatgagagacaaattaataatttctgcatcattaatagtgaatgtggctcttttgtattgatggcaggatgagtgagtcaacatgattaggaaatacctacaatgaaacctacacagttaacaatgatgataattattcacatatctaatttctatctaacattgtgctggtaggccccagatgaacagttagccataaacaatactgctatagtactattggaatgtaataccttttttataaacattcaatacttatacatcttaaaagaggaaacacaggtagtatgtagaatacaatgacattaaatgtatgttactgattcattatgtatgatagtttttatgttcaaagtaatttgttgccactatttgctcatgaagttataacagatccatgctgtagttgaaagcaaacagatagcttgttaggttaacagagcagtagatggaaccatttggcataaaatattggatgcatcgacccttcaacattgatacgttgctgaagaatattttttttcatcctttcattgcaaatgtgaatttattgaagctacttctcaggctacggttttattgtcggaaaggcctgtgctaatgaaacctggcatcaattgcctgaactgcttttagacagggaagaaggacgcatgaagacagagctagctaaaataatactcaataagcatagtgatgacatatacctggttgaagttgtgagaagacacttttttgtcgagcatctgttcgatgatctgcatcaaggtcaaccacttttcaggtggcgcctacgacatacgtatgttgacagcacctttgtagaaagaacgaaggaagttgaagccagcaactctgatgatgtggctagatcaatttcaagagagacaattacaaacactacaccatttggagaaatgatggaggattcactggcttgtatactgggttctcccggatgcaacatggaaagcaacaatcccccagaaaagacagctaatgtcctgacgcgaagtgatctgcgagctcgcagaagaggtcgcaggcatcatcggcatgctgatgactagtttcctattgtgaatgttgtgtagaagtgctgtggaataccctagaccattaccattttatttgggcctcatgccccacagttaatctgctgtgcctggtcaaaatttctaggctggacaagagctgcttttgtaagctgggcaatcctgtatcgtgatgtatcccatggcccctgcattcttcacaaagcaaccaataagacggtatagacaagcgaaacgacgctgggtggtgtgatgtttgcagttcgtggtccacaggctgccggagcatacagcagttcattttcaattcttattatcatatattatggaagaagaaatgaacatcttcaggattgaacagtgtcgcgaaattgtagatgatggttccacaatcccaatgggaccgacagacaaagagacatgctgcttcctgctgtgagttttgtattgcagacgacactgtttatgtggagtttgaattctgttgtgagttttgcacggtagacgacactgtttatgtggagcttgagatgtgagaaggatgagtaagctattagagatagtttaaca

SEQ ID NO: 26664 - DNA, 2714 bp, Zea Mays
ttaacctttgatggcccagctgagagaaatgcaaaaatgaaagctgagatgaaggaaaagactatgagaatgttcctggtttctcagaaacacattgtttacaccgaaccacttgaaatacatgctggaactactattgatgtgctttataatccttctaatacagttctaactggaaagccagaggtttggtttcgatgttcatttaatcgttggatgtatccaggtggggtgttgccacctcagaagatggtacaagcagaaaatggttcacacctaaaagtaacagtttacgttccacgagatgcctatatgatggactttgttttctcggagtcagaagaaggtggaatttatgataacagaaatgggttagactatcatattcctgtttttgggtcaattgcaaaggaaccacctatgcacattgtccacatcgctgttgagatggcaccaatcgcaaaggttggaggtcttggtgatgttgtcactagtctttcacgtgctgtgcaagatttaggacacaatgtggaggttattcttccaaagtacggttgcttgaatctaagcaatgtcaagaatctacacatccatcagagtttttcttggggtggttctgaaataaaagtgtggcgtggactagtcgaaggcctttgtgtttacttcctggaacctcaaaatgggatgtttggagtcggatatgtatatggcagggacgatgaccgccgatttggcttcttctgtcgttctgctctagagtttctcctccaaagtggatcttctcctaacataatacattgccatgattggtcaagtgctcctgttgcctggctacacaaggaaaactacgcgaagtctagcttggcaaatgcacgggtggtattcaccatccacaatcttgaatttggagcgcatcatattggcaaagcaatgagatattgtgataaagccacaactgtctctaatacatattcaaaggaagtgtcaggtcatggtgccatcgttcctcatcttgggaaattctatggcattctgaatggaattgatccagatatatgggatccgtacaatgacaactttatcccggtccactacacttgtgagaatgtggttgaaggcaagagggctgctaagagggcactgcagcagaagtttgggttacagcaaatcgatgtccccgtcgtaggaatcgtcactcgcctgacagcccaaaaggggatccacctgatcaagcatgcgattcaccgtacactcgaacggaacggacaggtggttttgcttggttcagcgccggactctcgaatccaagctgattttgtcaacctggcgaataagctccacggcgtaaaccatgggcaagtgaggctttccttgacctacgacgagcctctctcgcatctgatatacgctggctctgacttcattctggtcccatctatatttgagccttgcggcctaactcagctcgtcgccatgcggtatgggaccatcccgattgtccgcaagactggagggctgatctctcgtgctgctgctcgtcagggctcttcgacactgtcttcgatgtggacaatgacaaggaacgagcccgagatcgaggccttgagcccaacgggtttagctttgacggagctgatagcaacggtgttgactacgcgctgaacagggcgatctcagcttggttcgatgcccggagctggttccactccctttgcaagagagtcatggagcaggactggtcgtggaaccgacctgccctcgactacatcgagctctaccgttcagcgtccaaattgtaataatccaaccaacggccaatgtagtgtgttgtctgcaggtctcagatgcagccattcagcttttgcaggttcctgggcattgctgtacagcctccttgtctttagttagctccattccccgaggagcacagtgcaattttttatcctcagttattatgcatagattgtctcagtagaatgctttcttcgggcatgtatgtttgtttcctctgttgttgaattctggtgttaagtcgtgtataggaatctacaggaaatgaaaaagtccatttcctgcttcaaccttttagggctaccatgcacatgagacctttcaaatgcaaagaatattaggactagactactagtctgtgaactctatttttttccaaggatttctattttttcaaggaaaaataaactaatttttcttcggaaaatggaaatctttttaaaaaatggggttcccaaactagcccgtagagtatagatctagaattggtctagtggtttctcaagaaaaaaaaacatacgccttttcttgtcatatgcttatttaagtttattttgtacaaactttgagatccttcaaaaacaccccaatggctggtgtagtgaccagtgaaataaagaggatcaatggggaggaatcccccacctctctcccgcagatgtcacccagcaccggccaacctcacctgtccagtgaaattaaggttggttgcgacgacagcccatcaatggaaaccaacctcgccccgtgtcgggatctaccttcctcaccaccacgccgatctcaccttccataggagctacctaggcactgttacctattataggtacatgacattgtacatctttgtatgaacttacatcaatgccaaaaatccttcaaacatggactatacagtcataggagggtatctttgtcttctc

SEQ ID NO: 26665 - DNA, 2372 bp, Zea Mays
caatccttcaccatcctaagctagccaagcatgtggaggctaaagatcggcgagaggccaagcaacccgctgcttcgctcgcccaatggcttccttgggagagaggtgtgggagttcgaccccgccgcaggcacgccggaggagcgcgccgaggtcgataggctgcgccaggagtacacccgcaaccgcttcacgcgacggcaatgcagtgaccttctcatgcgcatgcagtatgcaaaacagaaccttcataatacaaaccttccggctatcaagattgaccaggattcagacgtcacagaagaaactatactaattacattgaggcgtgctcttaatcaatattcttctttgcaaggacctgctgggcattggcctggggattacggcgggatttcgttcattttaccactcatgatatttgcattacatgtcacacgatcaatggatgaagttttgtcaatagagcatatacgtgagatatgtcgctacatttataacatgcagaatgaggatggaggctggggaacacataccttgggaccaagctccatgtttggcacatgtgtaaactatgcaaccttaaggattctaggagaggtgcttgatggagaaaatgatgcattatccaaagggcgttcttggattttgtctcatggaagtgcaactgcagcaccacaatgggcaaagatatatctctcgatgataggtgtatacgattgggctgggaacaatgcaatcattcctgagttatggatgcttccacattttctcccaattcatcctggaagaccttatctatgagccttcatggttgcaaagtattgcaatggcttatttgaataagtttatagaaccattatcaaatctttggccaatgaataagctacgagaaagagctatgagtgacctcatggaacatatccactatgaagatgaaaccagcaactatgttggcttatgccctataaacaaggcattaaatatgatatgttgttggatagaaaaaccaaactcaaatgaatttagacaacatctcccaaggattcatgatttcctatggcttggagaagacggaatgaagtcaaaggtgtatgttggttgccatagttgggaaactgcgctcatagttcaggctttttgctcaacagggctcaccgaggagttttgttcgactcttcaaaaagctcatcagttcttaaaaaatgcacaggttatcaaaaacattcctgattacaagagctactaccgtgaaagaactaaaggttcttggactctatccaatggagaaaacttttggcctattgctgatacaactgctgaggcacttaaggcaatactgttgctgtctaacattccttcagaacttgtcggggatccaataaaacaagaacgactatatgatgccgttgattgcctcctttctttcgtgaacaaagatggtacattatcatcagctgaatgtaaacgaacaacttcatgggtggagtttatcaatccttctgagagttttcgtaatatcatcgtcgactatccatatcctgaatgcacatcatcattaattcaagctttagtgctgtttagaggcaagcatccaatatatcgtcgtgatgagatagacaaaattatcaaaagtggtgcatcattcattgagaaagtacaacgaaaggatgggtcctggtatggttcttgggctgtgtgtttcacttatgcaacattctttgctataaaaggattagttgctgcaggaagaacataccggaatagtttggctattaggaaagcatgcaacttcttgttgtcaaagcaactaggaaccggtggatggggagaaaactatcttggttgtcaaattgaggagtatgttgacagtggcagtccacatggagtcaacactgcacaggcgatgctagctttactctacgctgggcaggtcgaacaagacccagcgccactataccgtgctgcaaaagaattaattaacatgcagatggagaacggagaatttccccaacaagaaattgttggcaacttcaactcctcacttttcttcaattacccgaactaccgaaacttatttcccatctgggctttaggagaatttcgccgccgacttgttgcaaaaaaaggttaagatgggtatcttaagctatttctaataattgtatttgggatacaagtatccatgtatattttatttttcgtgatgatgggaatgtaacacaaaataaaatttatatttagtacgtatatgttaatatttgtaagattatcacaaacaagttgataatcatcagtgatctggttcctcaaattcaataacaaggatgcaaaatgtttggtagcaagaatactgcaatggaatggaatag

SEQ ID NO: 26666 - DNA, 2236 bp, Zea Mays
cgttgtcttctctagcgacggcgaggcttgagcgctcacgtcccggcgttcccgtgccggtggccaagccagcggccgacgagatggactacctcaggacggtggttccgtcacaactcttggcagagcgcggctccaatcttgtcgtcatcaacccaggatcgggaaatgtgcgaatggggtttgctagtcaggatgtgccattcaatataccacattgcattgcccgacacatcaatccacaagagggcgaagaaccaagattctctgtgcgcgatcagatgctcaactgccatgctacttcatcgcagaatgcagagcgggagagtgcatatgatattattgcagcactgatgaaaatcccatttttggacgatgaagaaatgccttcaccgaaccaaccccttcctccaaagatgggacgtgttgatggcttctcttcgcagcaaaacagagacgataataaattcacttggacagatgtgtcagagagaattattaagccatccacaccattcgataggtcagtatacaaggatgctgaggaagatactctgccaagcacatctgatgatgataatggacaggactttaaagagaataagtataaagaaatgatatttggagaagatgctctgaaaatccctccttcagagtcatactgtctgagtcgcccaattaggagaggccattttaatgtgtcccataattattcagtgcatcaggttttagaagatttacgcactatttggaactggatactgacagaaaagttgcatatcaacccaagagacagaggtctatattctgcaattcttgttcttggggagacatttgacaaccgagaaataaaagagatgctgtctattgtccttcatgatttggggttcagcactgcagttgtacatcaggaagctctatctgcagcgtttggaaatggtttatctacaacttgtgttgtcaacattggtgctcaagttacacaagtagtttgtgttgaggatggagtagctttgccccacacagctctggcgcttccatatggtggagatatgcttgctttgggttcaacgtcgccatggcacgtggccaaacttccaaactgatccaatgagcaatcctatagatatgctaatgctcaacaaaatcaaagagtcatatagccaaataaagactgggagcattgatgcagctgtccttgttcattcatatgataatgaaaggtctggtggacatcagaagacaagactatcagcaattaatgttcctcctatgggtcttctttacccaagggttcttgttccagaagagtaccctccacctcctcgatcttggttccaagactatgatgacatgctggaggatacctggcaaacaagtgatggtctttaccctagtgggaatggtgggtttggcatgtgggacagttatccgatgtttcccactagattaaagaaatttgataacattggcctcgtagaggccattattagtagtgtactttcaacaggacgtgttgaccttcaaaagaagctgtttggtagcattcagttggttggtggtgcagcttctacagctggccttgcacaagtgctggagcaaagggttcgcactaaaatttcagcaaaccaatctattgagaaagttgaggtgttgcaatctaggacttatccattatttgttccatggaaaggtggagtgattttgggcgtccttgatattggtaaggatgcgtggattcatagagaagattggattaaaaatggtgtccacatcgggagtggcagaaaatataaggattcctattttcttcaggcgcaagtaatgtgctactacaacgtataacagtatcttatttccgagctacacacgaagacttgcacttatacaggttgttcgaccgtccaaaccatcctagaatatgattggtggactgcgattaaattgcgtacatgatgcatcagttctatgcatgctcgctgctgtctgttcggaggtcatcaactcgggacctggactaagggccttgtcgttcgctcaacccctatgaaaaagtttggctttctaaagatgtagtagaagtactcatttattccctgccaattgaacatttcaaatcttcgtatggtgttaatgaaaaatctgatgtttggattcgtatttatttccaatgataatgtatatgtgcattctcgactgttttggaaagaatgaaaaatcctcgtccgtttgcgta

SEQ ID NO: 26667 - DNA, 182 bp, Zea Mays
caagaacatgtatcgataagacgaggagcatgaaggatgccatgatgagttcgtgagaggtctaggccatcgtctcccagtcaactatggttgtggaggatcgttgtctccatatgttgtaattatataactattttgaacagaactcctattatatagtaaagatgtgatatccgtttctg

SEQ ID NO: 26668 - DNA, 358 bp, Zea Mays
cgcgcgtatcccaggggattcgacgtctcttctcccaatccaattcgtcccccttcatagtatatatatgcgacctcaatccttcccctcatgccatcgaagtttagtcacctcacgggtcgccaccaccatcgccgatgagagggagggaacgagagatctctgccgcatgcggatacttcgattcactatcgccgagctgtcggagcctggccgaggaggttcaccggtgggcaacgaaagcttttgtggcacgattgggcgtgaaggacgatcgtggcaagtggaattcctcatcgacgactgggaatcgccatcgtccacagccaaccatggatgggagtccatgttgcaagga

SEQ ID NO: 26669 - DNA, 1821 bp, Zea Mays
agacacgcggaggcgcgttcctccccatcctcggcaaccacgagtctctccttcctctcccattccactagattaccaccacctccacctccggctcctagcagaggcgcaccaggtcccactgccaccgcaaccaagcgcaccttgccggccgccgctcgtcctcatcttcaaatcccctcttgcacggctgcacctcctagcccgtagtgtggatccatccccacacggccctcgccaaatctactcctccagtcggcaggaaaggaacccctctctacctcggaggctcggacagagtgaacgcgccacccgccccggcgagcattgtccgctgccgcgcgccaccttccgctcacgggtgcatttgatccgtcccggccgcctacacgatgtccaagtcgggagcgctggatcttgcttctggcctcggagggaagatcaacaaggtggaagtcaagtcggccgtcgatgagtatgagaaatatcatggatactatggagggaaggaggaagcaaggaagtccaactatactgatatggttaataaatactatgatcttgccactagcttctatgagtatggttggggtgaatccttccactttgctcacagatggaatggagaatccttacgtgaaagcatcaagcgacatgagcattttcttgccctgcaacttggtttgaaaccaggaatgaaggttttagatgtgggctgtggaataggtggaccactgagagaaattgcaagatttagctcaacttcagttaccggattgaataacaacgaataccagataaccaggggaaaggagctcaaccgtttagcaggaattagtggaacatgtgattttgtcaaggcggacttcatgaagatgccgttcgatgacaacacttttgatgctgtttacgccattgaggcaacatgtcatgcacctgatccagttggttgctacaaggagatatatcgtgtgttgaagcctggccagtgctttgccgtgtacgagtggtgcattacggatcactatgatcctaacaatgcaacccacaaaaggatcaaggatgaaattgagcttggcaatggcctgccagatatcagaagcactcggcaatgtctccaggcagtaaaagacgccgggtttgaggttgtttgggataaggatcttgctgaagattctcccttgccttggtacttgcccttggatccaagccgattctccctgagtagcttccgtttgacctctgtgggacgcatgattacccgcacaatggtcaaggccctggagtacgttggtcttgctccgcagggcagtgagagggtctctaatttcctggagaaggctgcagaagggctggtagagggcggaaagaaggagatcttcacgccaatgtacttctttcttgttcggaagcctcttctggaatgagctcttggatcaccttttcagagagagaaggcaagtggtcatttcgaagaagccgaggagagggaacctggaatcaagaaaaccttcagctctcctgtgtaggaggaaagttaacgaacagtgtagtaactgttcagctttgtgtttattcagttgttttgctgcttgaggttattcgtttctaggtgggggttggaatccttttcgccataaacctctcagtggcataaataagatggtttgcataagagtacttcatggataccgtaagggctactactgaaagagaaatgtttaagcagcatggtatgtgagcaactagtgataattattccatccttttttttaatataaagcaggagttttgtcatgcgtcatgtctagggccggaaaa

SEQ ID NO: 26670 - DNA, 5497 bp, Zea Mays
aaaagaagcacatatgccatttgtctcatgcattatcaagtgacgatatatccttaatgcccctatgtcctaataaaaatatggagccaaatgatgaatcggcaccaaattatcaaaataccttatgatctgctgaaaaactatggaattcacatctttgacttcaatgacttgtatactttgacattgattttggatttctatggcaaaatactttatgatcagctggcaagctaaggaattcacatccctgatttgtatacttgacattgattttggatttacatggcaacataatttctccatctcttatgtcataaatgactgactaatgttgcaaagaatggattttaattgttaccgttttcacatgaaaattccctgttgcattgtgggtacttttgaagaagccacagacattgaagaatcctttgttcaacacagttatagagaaaaaattggtacgccatataggaaagggacatggcagaattttcaccttagtcatatcttgtatctttgatctgctcttcatatttacatttatatccatggttgaagttcattataaagtgtacgaggatgaaataatgaccactggccagtgtttgtctgaaatgaattcccaatctttctagttcactgggtggtgctatatctgatgaaacagtctggaaggatgatgattggttagccaagccaaaggttacttgcatgcgtgccttttctgatctgcaacattcacaatctgtactgtgtactccatgcccactagtatttaactacatgaaatcaccggcatttgtcatcatttatctggatgacctttgttctatagagacctgtgagaaccacataatgccatagaggtaatgtcgttccagagtttagccagagtttttagcaacagcaaaacccaaaacccatatgtaggatatttagaaacacggatggggaaatcaacatatattttattaatcatctacttccatgtgatgtagaagttcccttgcagttcctctctctctctctctcagaccaagagtcaaataagagcttacaacaaattaatggttgcaatgaagtttaacagttcagttatgaaggcctgaagattactgttgattgaagcaacactgttacttgacagcttcttctgttgcttgtgtttgcgctccattaaaatttggcattctttgacttgcctatatatttctttaattcaagtaaaagtagactatatgccccctcgttgaacagataagatgactgcatatcgttttattaagaagaaaggtctgaaacaggaagaaatcccaaaccacattcacacccacaacactctagaagactagaacatactttttctctctcgaaaacacaggagagctgcgcttcattatttaagaagcagcaaacaaggtcccaaaatgggccagcacaaagggtggcactttacagtagccagcacctgacatagacaaacttatccataaaaacacgtcacagcactcaaacacctaaatcaggcccatatcccggctaactcagtagccccagcaagggccaattcctggcatcctctccgatatctcgcagcacctgggacacatccgccacgccttcttcgaagatagtaattgcgatgtttccacaaccaccaagccactaaaatcaccacagaattgaactcatttccctgcggtttggggactcttctctctgcttgattccaccaatcctgaaaattgacctccctgggcattgggctaaggtgctgtaagttgattagagaaagaacttgaaaccagacctgtctaccaaacgcacaggccaccaacaaatgctgaactgtttcctctttctgatcacataacaggcaaagttcaagatgctcaagtcctcttctagcaagccagtccacagtccagcacctattgaggctcgcaagccaaatgaaaaacttacatttcggagggccccaggttttccaaacccttttagccggtttaaaggctactgaccctacgaagaacctttcatatgctgacttggaagagtagcacctggaagcagaaggggtccaaagatgcacgtcttgtacacccggagccaaattgaactcatttaggatgacctagagctgtagaaattccatctacgtttgagcattactgcacctcttatatgtctgacaccaacaaccattgttcatagtgtcctgtactgtttgtatctgctgaaccttactggggatgagcttgataagagagggtgccaagaccgacaaggattgcccatggagccacctgccataccaaaacgtgctgctagcaccatctcccaccgcagttacaagcgaagcagtgaacatagcaagaccagaacatactgaaaagaaagaccaaaagcaacatgaccaaaactaccacactattgcctgtgcccctcctaaaggtctcccaataagcttcaggaggccctttgctctagctgagtaccaaaggatgcactcataagttacagcttgcaacaccgttgtaaggcttggagtagagccgttaaaaacacagttgtcctgtcccaagccaccaatattgccagtgaattgaaccccttctgtagtccattgttacctctttaactgcctggtaggctggtaccactagcttgagaatctatgggttgatggttgggctgcaatggagacaaaagcaattttctgcaacctgcaaaatggtgaactagattttccaggcgaaaacacatgaaatcaataggtgctgtgtggtcttctcttcttcatcagaaggggcaagcagctgggtgggaagtcctcttttagtgatccggtccgcatttcaagaacggttctttactgcaagccaaatggagagcttgcagcaaagaggagcccaggacttccaaattcgtttccatggagcaaagcggatggaactaaggaaaaaggtattgtaggccgactttgctagagtaagaatcgttcctagtaagcctccaaacaagctgatcagcatcattctgcttcagcgagaaaccttccatcaagtctcataagcggagatattatgtaagaacctggacagagagctcctcttatgtcagctacccaacgatgggggtacatcacttgatgatcctcttgaattccctagttgatcatttttcagtttattgccaaatctagctgtgttcttgtggctgtgaaattatatctcccatgctgatacttgattcccttatctttgcttcattactacaccacagtaatttggatctgccattatgttactatgtaactctcatttgatatcaatcacagctgccacatacaaaatacaagtatgtttatctagataagatcttgattcatcaatcaccactgatctgagttttcgccactgcgatgcgaggaaaagacagatatctaataacatcttggtgaagatgttcttaggtcctttgctttctcttcaagtcagcttcctttgatttcattcctcaaactatcaatcacaggctgcagcacgtgtaatccgcatcggttcaagaacagatttcatgcttggtgatattttgcatcctgcgataaattgggctgataaagagtctcatctggatcctgatgaaatggccaagatgaagtctgcttttattggtaacctgccagaagatgttaatgaggagtacttgagaaagctttttggacagttcggtgaggtagtacgggttgctatctcaagaaaaggacaatgtccagttgcttttgttcacttcgccaaacgttcagagcttgagaatgctatagaagaaatggatggtaaaacggtgagaggacctggtcgagggccgtctttcaagatccaggtgtcagttgctcgacctacggcagacaacgacaagaagcgatctcgtgaagaagtgagaactagaagatcaaatgcatcaggagataggcgagattattctcatggaagatatggacacgattcacttgatcgtcaagtgaaagctccaagattatctaattatgtggccgatgctgctgacccctatgaatcagctgttaattcattaccttcagctgtcaaggaagtcttgcttcgaattctacgtctaagaattggtactcgatatgatattgatatccattgtgttaaaagccttgatgagcttcctgagtcatctgctcttgctgtccttaatcaggtggagacaaacacaacaaaggagattattttgcatcgttggttgctaagcaccaggctgagacctttggcttaacacatgcattacacggtaccacttatttgtcaagaaatccggaaatgcatagcaagcgatacccacatgaagattatgattttgtgacacccaggagcagtaggtacgattcgtcagcccatcatccttcaacatactacgaagacgatccaccagtgtctgagtcaagggttagaagatatgctgaagaaaggtccaccattgtaagaagcccagaaccacgtccgcgatatgacgaaacagacataagaataaacccagaaccaagattaccatatgaatcaagacacaacgccgaaaagcatctcgatcgaagatacatacaagagcatagttcaaatattgaaagaccagctgaagaagctctcctttctagggaaaggagatttctgcctgctgcagggtacatgccgaacccaggcggctcggatttccgctccaggtcgcccgccgaatattcagcacaacgccaacaaatgaggtttgatccattcacaggtgaaccttacaagtttgatcccttcacaggggagcccatcaggccagatccgaaccagcgccgctcaggaagcctgtactgatcagattagttggagcgatatgccagataagaccctgaaacaaagctagatctggataactcttcttcttgtctgccaagtgtctctgtgattttgcttgtgggctacagatcatgtaccccgagcaccatgtgtgatccagtcggactaatcatttcggcattgaaaagtcggactaactttttttgtgcccataacgctacgtattgtttggtagattaattaaaaattcatccggtgaaaagcaattttctggtatttttctggaggtgcagtaggcgtggtaatgcagaatttcaactgctacgtacactgcaagcgctgttttacccgattcgtctttacgtgttgccaaatgtttcattgacttcatagaactgatttcgactactttggatgctgagcaagggaccatgcctttctcacatatactcatctggagaatgtcaagcaagacggcccatctggacacatggcaagaagagataaactagctagctgcctcccaatgatgctactaccttctcttcgactgcttcaacgttcacatgcccctcccttgcatggcgtagtaaactgggttgcttgaaaaaacgccacttctaagcgta

SEQ ID NO: 26671 - DNA, 685 bp, Zea Mays
tcctatacaggcgaaactagagccactttaccagatcaggcacgttcaagcttaccttgcagtttacagaagattacccaaacaagccaccaactgttcggttcgtctctaggatgtttcatccaaacatatatgctgatggaagcatctgcttggatatcctacagaaccagtggagtcctatatatgatgttgctgcaatcttgacttctattcagtccctgctgtgtgatccaaacccgaactcccctgcaaactcagaagccgcaagactgttcagcgagaacaagcgggagtacaaccgcaaagtccgcgagattgtggagcagagctggacagccgactagtgcaggaggatgctcatcgtgcccgaaagggcacaataaggaaccatgaaaaaacatccttgtgtttgtggttcgccagacctgtcgaaacattgaagaactctagttctagtctgtcgttgtcatggttttggtctgatccagagcaccggttgctcatggtggtggctgtcgtaatgtagcggttgttgttgacatatatcttcttaaaatgatcctgcttgtgtacaaaaactatagcgtgggaatggtggttcgatggaccgatggaaccatgttcttgcattgaggtttcacaaagtctaaatggcttctttctttcttttttttattaaggt

SEQ ID NO: 26672 - DNA, 626 bp, Zea Mays
ccactgtccctgtctactatccagcgaaaccacagcaaagggaacgggcttggcggaatcagcggggaaagaagaccctgttgagcttgactctagtccgactttgtgaaatgacttgagaggtgtaggataagtgggagcctccgggcgcaagtgaaataccactacttttaacgttattttacttattccgtgggtcggaagtggggcaccgcccctccttttggctccaaggcccggcctcgccgggccgatccgggcggaagacattgtcaggtggggagtttggctggggcggcacatctgttaaaagataacgcaggtctcctaagatgagctcaacgagaacagaaatctcgtgtggaacaaaagggtaaaagctcgtttgattctgatttccagtacgaatacgaaccgtgaaagcgtggcctatcgatcctttagaccttcggagtttgaagctagaggtgtcagaaaagttaccacagggataactggcttgtggcagccaagcgttcatagcgacgttgctttttgatccttcgatgtcggctcttcctatcattgtgaagcagaattcaccaagtgttggattgttcacccaccaatagggaacgtgagctggg

SEQ ID NO: 26673 - DNA, 6885 bp, Zea Mays
cacgaccacaccagcagccaggtgcccggtgccgactcgacccgaccaccacccaggccagccagaagcccgtcccgacccggccgggcgcgcgcgtgcgtgcgttcgggcgcgcgcgttcctgcgcggattgggctcggcctccgctcgtcgccttccggccccacgcgcccctccccgcgagggctcgcccctccgcccccagtccgcctcccgcgatccccttctcccgccgctcgtcgcccgcctctttcctccccgctccccgcagagctggtgtgcacttctattacattacatgcatgtggagtaatttacctacggcagattgctgactaaaggcgctgaagtaaaccttccctcagtatacttcctcggatgtcacgtctgcccctctgcgtcatttatggctcagaactcgtcccgtcttcaccgcctcctcacattactagacactggttcgacacaagcaacgaggtttgcggctgcacgccaaattggagaaatcgccaagtcccacccccaggagctgaattcgttgctaaaaaaggtttctcaatatattcgtagtaaaaattgggacacgagggttgcggcagcccatgcgattggtgccatagcagagaatgtcaaacacacatcattgaaggacttgtatgcttccgtgcaagcagaaaaacatgcttccggtttctctgatggaagtgatgatgctggctcagcattgccacggactgatagtgcagcaacatctgatcttgcttttggaagctttgacataggcagggtattggaatttggatctcctctattggcatcaggtggacaggaatacgacattgctgatagtggcaagaatccagcagagcgtctagctcgccaaaagaaaaatctccggcgtcgtttaggactggatttatgtgagcagtttatggatgttaatgacgttatcaaagacgaggatcttcttgcccaaaaaaattattggggttcacatgtacagaataatggattccattcatttaattcaggtcataatattcagcagttggtttctaccatggtccccaggtatcccaagcattctaattttcgctctagacgattaagtgccagggagttaaatatgctgaagcgtaaagcaaagagtaatgcaaaagatcatacaaaggctgtatctgaggatgatgaggttacactgaaaggatctgtgccctccaatggagcttcttctgaacaagctggtgcacaaaatggtgtatttgatacagctgtcgaagaagacaatctggagtacaatgagaacggaagatggccttttcaacaatttgtggatcagcttattcatgatatgtttgatcctatttgggaagttcgccatggcaccattatggctttaagggaaattttgacacatcatggtgcttgtgctggagtatattttcctgatctgagcttgccttcctctgacttggatggtaaaaccaactttgactcccttaaaagggaacatggtatcgatctaaacgaagatgtccatttggaacaccttgaaccagcattaaagaagcataagaaagagccaaaatgtgctgaaagtatgatggattgtgataaggagttggttgacagtgattatctaaaaacggaaggagatctgagcaatgtgcctgatgtattaactgccgaaccaaattctactcatgtaaaagttgagcctgagttctgtgttgatgattcagctgacccctctaaaggcgtttcgacatgtaaatcacagaaaaaactcaactccatatcacatctgagttctcatattcttgctccagaaagttcaaaattcatgaaactgatgaaactagccaaatactcatatatgaagaattgggaatttcttcaggattgtgcaatccgcttcctttgtgtgctttcactggaccgctttggtgattatgtatccgatcaagttgtcgccccagttcgtgaaacttgtgctcaagctcttggtgctgtgctgaagtacatgcacccttctttagtatgtcatacattcaaaatcttgctgcagatgcagcacagacaagagtgggaagttcgtcatgggagccttcttggcattaaatacttagttgctgttcgccaggaaatgcttaaagatttgcttgactatatcattcatgcttgtaaagctggtctggaggaccctgatgatgatgtccgagcagtggctgcagaagccctgattccagctgccgactctttagttaggctaaatgaccaaattttgcatccaattgtggtgttgctttgggatatactgcttgaccttgacgatttaagcccatctacaagcagtgtaatgaacttgttagcagaaatatattctcaaccagagatggtcccaaagatgcttggcacagcagcttcaggggaaaagggagaatttgatctaaacgaagcaactcagattgctgagcaagaagacgaactaacatctattgaaaacccttacggtctagctacactgacaccccggctgtggccctttatgagacatagtattacttctgttcggcgttccgccatacgaacactggagaagcttcttgaggttggcaacactaggagttctgctggaacaaccccatctaaactctggccaacatcaatattaggtgatgcactgcaggttgtatttcagaacctacttttggagtcaaatgatgatattcttcagtcttctgaaagggcttggaaacttctacttcagtgccctgagaaggaccttgaatatgctgcaaggttatattttagtaattgggtacaacttgctaccactccatttggctcagcattggattctacaaaaatgtttttaccagttgcccttccacgaggaaatcgttcgagagctgctgcaaagattagatctgctaggctagaacatgagtacacaacaatgatctcgtttggttctacaggggaaagtatttcacatgaaaagcattcggacgttccctctattttttcgaatataattgttggctctgatcctgacaaatctgttactcatacacgggttcttacgtcaatggcccttgggctttttgcctctaagttgcccgtaagctcatggcaagtggttttaagtccactagcaaatcacctcatgtctctctcaggagtccagagacaagtggcttcaatgatcatcgtttcttggttcaaagatctgagaggcagagatcctgtatcagtgggtacattgctagcttttctatcttccttgaaagagtggctggtggacttattgacttgctctgatccagcattacccacaaaaggttctgtgcttccatattctgaactttcaaggacatacacgaagatgcgcaatgaagccaataatttgctccacttaatcgattcatgtgctgctttcaaagattatagtagcagcttaaaccttaacactgacgtgctgactgttgatgatgctatcaactttgcatcaaagcttttgttaccatctgaatctgatattccttcagaaactgagaacattttcttgaataacatagaatcagcaaaacaaggcctattgtctacatcaggttacttgaaatgtgttcagaataatttgcatgtgacagtctgttctttggtggcttctgctgtagtttggatgtcatgtttgcccagcaagttgaaccctgttattttacctttaatggctgccattaaaagagaacaggaggaagtacttcaagataaagctgctgatgcacttgctgagcttatatttagctgcattggccgcaagcctggccccaatgacaagctaaccaagaatctctgcactctaacatgcactgatgctagtgagacacctcaagctgcaataatcaactcaatgcaggttattgaggaccagaatttgctatcgattggaaagcgttttagcagtcatagatccaggggccatacaacgtctggtggcgatgaaaggtcaaaaatggagggttttataagccggcgtggatcagagttggctttcaagcatctctgtgtgaaatttggaccttcattgtttgaaaaccttcccaagttatgggattgccttactgagtttcttagacctgtaaaaacagaagatggtattccggaagatgatgcaagtattgcacagctgggcagatcgtatgaggataaggacccacagtcactcattaataatatccaggtcgttcgttccatttcacctcacttggctgagcccttaaggcctcaactgctaaatctccttccctctattcttgggtgtgttcgtcatcctcatgtggctgttagactagctgctgcaagatgcatcacatctatggcaaagtcattgaccgatgatgtgatggtactggtgatagaaaatgtcatcccaatgttgtccgatttatcttctgtctgtgcaagacaaggagctgggattctgttaagccttcttgttcagggtttggctgtggagttggttccttatgctcctttccttgtcgttcctcttctgaagtgtatgagtgacccagatggttctgttaggcagactgtgactcacagttttgctgctcttgttcctttgctgccattatcaaggggtgcttctttaccatgtggactaagtgaacgcttatctagcagtgctgaagatgtgcaatttctggaacagctccttgacaatacccaaattgatgatttcaagcttaatattgatcttaatgttgaactacgaaggtatcagcaagaagggatcaactggcttgcattcctccgtcggtttaagttacatggaattttatgtgatgacatggggctcggtaagacgctccaagcatctgctattgtagcaagtgacattgcagaagcacgtgcacggaatgatgaaaaaattctgacatctttgattatctgcccttctacattagtggcccactgggaatatgaaatagagaagtacatagacagctctatcttgaaacctcttcagtacgttggttcttctcaggacagagtgacactccgtagtcagtttgataaggttaatgttatcataacatcatatgatattatacggaaggatattgattttcttggaaatatcacttggaactattgtgttctggatgaagggcatataataaaaaactcaaggtctaaaataacgtttgctgtgaaacagctgaaagcgcaacaccgtcttatcttgagtggcacacctattcagaataatgtgttggagttatggtctttatttgacttccttatgcctgggtttcttggaacagaaaaacaattccaagctgcatatggaaaacccttgctagctgccaaagattctaaatgttcagcaaaggatgctgaagctggtattcttgcaatggaggcactgcataagcaggtcatgccgtttctactgagaagaacaaaggatgaagttttatctgatcttccagagaagataatccaggatagatattgtgatctcagtctattgcagctcaaactttatgacaaattttccagctccaatgcaaaagacgagatttcaactatagtaaaagcaaatgaactggaggaatctgcacctcaaccaaaggcaactcggcatgtgtttcaggcattgcagtacctattaaaactatgcagccatcccttgcttgtaactggggagaaccccccaaatcatcttgtggatcttctgaatgaaataggtctgggatctggcagtgagcttcatgagcttcaccactcacctaagcttgttgctcttcaagaaatacttcaagaatgtggtatagggtcagaaatatctagtcctgatgcttctacagctgttgggcaacacagagttttgatttttgctcagcataaggcttttcttgacatcatagagaaggacctgtttcaatctcatatgagaagtgtcacatatttgcggctggatggctctgttgatccagagaagagatttgaaatcgttaaagcattcaattcagacccaaccattgatgtacttctgctaacaacccatgtcggtgggcttggcttgaacttgacatctgccgacacattggtgttcgtggaacatgattggaacccaatgaaggaccttcaggctatggacagagcacatcgattgggtcaaaggaaagtggtgaatgttcaccgtctcatcatgcgtggcacccttgaggagaaggtgatgtctctccagaggttcaaggtgtcagtcgccaatgctgtcatcaatgctgagaactcgagcttgaagaccatgaacactgaccagctgcttgatctgttcacatcaacccctgcttcaagaaaagcaagcgacgagcagagtaagaggaaatctggtggcaaaggcttgaagtccattcttaatggtctggatgagctttgggatcagtcgcagtatgccgatgagtatgatctgaaccagttcctggcgaagctgaacggctgagccaccaccggctggctcgtgtacagtgtataaagcaatttggggcaggttaattttgttgttgctgttgtttgatagaggaaggaaaagattagatgctaacagatataggtggtggttggggttacgatctcaatttttttggtttccatcttcctcaatttttgttttgaggagttgtatatactctgctcacctataatcaaagctgcagctcttatcagaatttcccttgattggtcatggtgactgttccatgtactttgttctgccgcggccgtagctatatggactgctgcagctgcaattcatagaaacaaaatacttcatagaaacaaaatattgtagaagccgcatttggattaaag

SEQ ID NO: 26674 - DNA, 1711 bp, Zea Mays
cgcgcgttttattccggtcgtgccacgcccacgccgcagcgtcctcccgagctaaacgccacatgcgagtgatgataataaggaaggaattgaaggaagcgcccaaaccaccacagcacccacgaggccacgaccgcagtatcgccgccgccgtttcgtttccttatcgatcgtgcggcgcgccggcgggatatagtagctcgaggcgagagagagagagagagagagcagcgctagccttccgttcccattcgcgcgcggccgccacgattccgccgttcccgcagaacggtgctcggaaggggcgcaccgccagcagcctctgatcatccttcgcggggaaggaacggccgggggtctcgagcccctgccggccatttcgccccgcctcgcgggattcccgccaagccgttggtgtagcgcgtggaaggcggcgatctcgggcagggccggatgctgcacaaatggaaggccgcggatggcggcgggtgtgccggcgtcgcgggcggcgtcgaccagcgccggcggtgcgtggcggcgtcgctgtccacgctgatagcggctacgctggcgttccttgcctacgtcgccttcttccccgacggcggcgcgcacgggctgtaccggctgtggacgtgccaggactgcgcgggcgatctgggcgagtttcccggcgacgaggcggccgcggctgacggcccttcggccgcgcgcgcggcccgctcgccgacgacgctgtcgcacgtcgcgttcggcatcggcgcgtcggcgcggacgtgggaccagcgccgcgggtacgcggagctgtggtggcgccccggccagatgcgcgggcacgtctggctcgaggagcagcccgcgagcccgtggcccgcggcgacgtgcccgccgtaccgcgtctcggcggacgcgtcccggttcggggaccgcgcgccggcgtcgcggatggcccggatcgtggtggactcgttcctggccgtcgcgggggagctcgggaacggcacggcccgcgaggaggcgcggtggttcgtgatgggcgacgacgacaccgtcttcttcccggacaacctggtggcggtgctgagcaagtacgaccacgaggagatgtactacgtcggggcgccgtcggagagcgtggagcaggacgtgatgcactcgtacggcacggccttcggcggcggcggcttcgcggtcagctacccggccgcggccgcgctcgccacggcgatcgacggctgcctggaccggtacaggtacttcttcggcagcgatgagcgcgtgaaggcctgcctcagcgagctcggcgtgccgctcacccgcgagcccgggttccaccaggcaccgcggcggcagtgctgcaagacgaagcggacgaggtggggctccgtgctggaggtgcggatacggcgttgcggcagaggagagctcacgtcgccgtagaatagaaacaaccggtccgttttcgctgtgatttatccacggaaggccaacgaaaacagcagtagatatttgagtggagagtatctgccttctagcgacaacagatttgtccacgctgtgtataaaaaagctttacctacgcgactgatgagatatacaggtcacgtacacatacagtagcatatccgaaagtcacgttttgaaaacgttgcggtgctgtacaaattggaaaataaaatcgtcccgtagcattgtgaataatggtagaaat

SEQ ID NO: 26675 - DNA, 1395 bp, Zea Mays
cctgccccgcccccaccgtctcgactctcgactcctctttcccctccccgagcgtgcacgtctcgtcatcgccctactcgctcgccccatcccggagtctccccggctcccaaaccctagcgcctcccggacctcgcaggtgagggaggcggcgatgttcttctccggtgacccatcggcgcggcggcgggtcgacctcggcgggcggagcagcaaggagcgggaccgcaaggtgctgctcgagcagacgcgcgaggagcggcgccggcgccagggcctccgcctccagaacacctccgccacgaagatccagaaattcttcagagggaagaaggctttggaattggcccgctcagaggttcggaagaatttttgctcaacttttggggagcattgcgagaggatagagtggaacatctttggcactaattctgactttcttcggcaattactgttcttcttcaatgcaaatgaagacaatgacatagctatactttgtcatgtctgcaatttgctgctgcaatatgttaaacaaggcggagatgttgtaactctcttcactggtgtgaatggctcctcgctgcaacctcttgttgctcaccgagtaaaaaaatttgccctcatctgtgtgcaagcagtctatcaaaagaggcatgattggggcagccaacttttaacaacacctggaaccacatcagtgccttctgtgtcattactggaaactgtaggttgcttgataaatccaaaatttctttggaactgcaaagtagttggttatcttcagcagagaaagatctattgcttatttcgtggcattatcgtatctgtaccgcaaaatgtcagaaattctggtcattttgatagtgcatctgtgctggagcaagtgcttatgcttgttgcttcgcatgttggccatcatccctgttgttgtctgaaagtggatccaagatggagtttctcgtctcagcttctgtccatcccttttctatggcatcgtttaccacaactcaagaaggttttctccgttaacgggctcaacaaatattatatccatcaaatagcttgccttttgcccagtcttgttgatgtccttccaaacgatatatcagctaatcatccaggatatgcgtgcgtccttgcaaatgttcttgaagctgcaacctggattttgtctgatgcaaagttagcttctgattcagcggctgacatcattgctgtttgtacctcgttgttggatacgttgccagcagtcacaacacctactgaaagggcagatgacgatgatgagatgcccatggatgtcaatattaaaattaatcttgatgttgatttggaaagacagataactgcagcaattgattcaaagctacttcaacatttggttgtataattcat

SEQ ID NO: 26676 - DNA, 458 bp, Zea Mays
caaagataaggaggtggatcacatgtcagtttccagcaagtaggattggccaccaaggtcgtggagtatatgttgcccaattttaatgaggtgtttggactggaatgcgcacagtctgttactttgatggcaaaacgcaacgaagtaccatgggtaaggatgtgctggagaatgaaagcttctgtcttaaaacaataggatacaagaagcttgcaagtggttttgtgaaggcttttgtgaatcacttgaatcattagttcttttaagaatggttttgtaaagcgttagcaaatatgtgtaaaacacaataagatgtgtggcaaagtcagtgatctagttgtacagttttttatgtttatgtgatatgtggatatttcattgtgcaatgttaatgaactgtgtatgtctatgtgattatgtgtataaaatatatgttttgtggtgcttttgtgataata

SEQ ID NO: 26677 - DNA, 240 bp, Zea Mays
ctaaaacatgatcaaggagagtaggagcagacctgggagcgactggccatggagcgcggagaattctactcgccgacgtctgagaagggggaaatcggtgccacgacgggctttggtggaattgggaggtgaggttggggctatacggtcgcaaagggctactgattcaacgtgcaccactaatttggggagaggtggagaggattccgtgaatttgtgcttcaaccgcgctcactggtg

SEQ ID NO: 26678 - DNA, 249 bp, Zea Mays
gatgtttcatctcactcttgcattactcaatgcaggtgcttgttgctcatcaaggggagtgggaagtagcagcacatccaccttcactctcataataatgctgcccagacacaaccatgatttaattagaaacttcttgtcaaaggttgtttgtttttaactagtcgtgcgcactgattaattcagttcattgttgttatggttgtcttcccattgctagtagattattaatgtcttatatgttttctt

SEQ ID NO: 26679 - DNA, 3210 bp, Zea Mays
cctacgcctcgcatggtcggtcgcaccgaacagcacgaccagaccagttgcccggctcaccaaatccaggcgtggccgtgcgaccatccctcccctcatggcgtcatcggcggcgcgatccctcgcgctcgtcgcgtctgcctcggcatcgctcggcgtcgggcagcggtcgtgggctcgcttggctgtctcttcctcttcggctgggtcggccctccccaagctccgcgggctccgctcgttcgccgcctccgcagggggcgccgtgatggggaagccaggccccggggtcgttgacgccgacgccgggatggacgccgtccagcggcggctcatgtttgaggacgagtgcattttagtggatgaacaagacaatgtcatcggccacgagtccaagtataactgccatctcatggagaagatagaagctggaaatgccctgcacagagctttcagtgttttccttttcaactccaaatatgagttgctactgcaggtattcacacaatactaactatggttgtcttgctttgagatgtaatgtaagttccacttcatgttccttgaatcattggctgcagttctgagttcactttgttcgttttccaattaagtaggatatacaacctttttgctattttgcttggagtaggctctgtgtgtgatttacaaaaaaaaaaagattcgctgtgtattcaaaatgggttagctacttaacgtagttcatgatttcgggttgggatgcctcataaatcaatccatctcaatggtggtggcagaggtgcttgtcttagatgggtcatgatcaaactagagtttgggtgtcttggcacatatgagcgtgatgtttggcatgtgcatttattcaagcatgatattatggataggttcaattgaaaattgcgaaagggtctctagttgagttggttaggtggcttgagtagcactcctcacgttctttgtttgacctctcacgggagcgaatttcaggttgggtttagaaaaatcccataccctgttccatggcaaagctcatgtttaaggttcgatcgggttgttctcacatgggctacggtgccactgtgtatgggtagtacaggggttatctcaatctgtttgagaaggccttcttaacgcaatggctggaagctgtcttgcccccacctctcctcccacaggttaattttttaggtttgactgaaaattagaaataactttagtttgtgttctgatagttctattttgactgaaccccggatttggttgctccatgctttaggtggtgacaggtttttctttgcctgagccaattttctgttccctaaatggatgatctcgttcctgacatagaatggtcatattgaagcaatcctctcgaaattctcattttatttttcttgaatgcttcttggcttctttccatattgaggaattgtgcgttatggagcaatcttcataaaaatgtttcctttcttggacatggttattaggtaggttaatatcagggtgtagtttacaacgataacactactgaataaaaaaactcgacccacgggggtaagacaacccctaggcattttattaagaagaccttctcacgcaggtcgagaaaacccctgaaccccgctccacccatacacagaggcaccgtagcccatgtgagaaacgaccgcgaccgggacagagccttagacctgtgctttggcgtgggacaggcgaggtttttttaaccacagtctaaagttcgctcccacgggaagttgaacccaggacccgaggagtgctactgagaccagttaaccaacttaactagaggccctttcgtgataacactactaaatcacttttactttcatgtaatgcctcacctaacatggaagagcatggatctctctggaaaattgtttatacttgtactaaagaaaatatttgtaacattttaggaaggaaaatgattagccattttggaattaaggtccttattaagagggcgcaatttcaattttaccacataaatttggctgagtagaacatatcttgctttcgctcaagagctgttagcgagtttctgctggtgaaatagttactgtccaataccagaccactggcttttaggattttgttcatgaatcttacatgtctttctgctctgtacgagaaatttactttatgttcagttatgtctcatcatatatgtaaacactaaacagtttcacacactccaaagcagaagctcagaacagtggacatgagtcatttgttgctggttcttctgcctttgttttatgttactgcattgctatttctctaaactagcttgtctaaatcaaagggtatttcctaagtctgtttaccgcagaagatattgtaaaatcatatcctttacagcaaaggtctgcaacaaaagtgacatttccacttgtctggacaaacacctgctgtagccatcctctctaccgcgagtcagagttgattgaggaaaattgtgcaggggtgagaaatgcagcccagcgcaaactatttgatgagctgggaatagtggctgacgaattacctgtcgaccagttcattccgcttgggaggatgctttacaaggctccttcagatggaaaatggggcgaacacgagttggattacctcttgttcatggttcgtgacgtgaagctcgacccgaatcctgaagaggtggccgatgtcaagtacatgaaccggcatcagctgaaggagctgctcaggaaagccgatgccggggaagatggcgttaagctctccccttggttcaggctggtggtggacaactttctcatgggctggtgggatcatgtcgagcaagggactctgcagggggcagcagacatgaaaaccatccataaattgtaaatcttctagatcgcttaagcacgagtcttgccctgttgaggaataagcgcttgtcctgctgtttggtgctggaggaataatcgataaaattataacagagtgatcttaattctggaacgtaactattaacattgaaccccatctgtgatgtgtaaatttctacctaagtatcgagacatacaaagaaaaagggggcacgccaagtcaattaggttaggcaaattgatacatactatacattcaaaggcaaaggccaaaggatgtttggaagtgaagtttcactgtcttgaaagaatactgcatgtttggaagtgaagtttcactgtcttg

SEQ ID NO: 26680 - DNA, 954 bp, Zea Mays
ggtgtgtcgggtgtgtccccactctccatttctcagcgtgcgcgctctcttctctctcttttgtggtaactggcggcggccgacgccgacgccctagctcacgtcttcgtcggtcccttcccagccttcgtcgcgtccttcgccgtcgacgagaacacacgaggaaacacttgcaggactgaagaatagagaaacatgtcgtctggtggtgtgaaagatttttaccggcagaaaaagaaaggaggcgtggcgaagacagcttcatcctcaaagaataagacacggcattacactggtggggcttctgttggtgcctcagatgcagctcagacatcagctctagtttctcatggctcctgggatctcaaagatgactttggtgatgaagaagagcagctgcgacagtttgacgtggacatgaagtttggtccttgcatcggtgttactcggcttcagcgctgggagcgagcctctgccatgggcctccagccaccagctcatctccgggacctcctactgcacgcggcatcgacaaagaatcgcggtggcggtagcccctctgtcgagtgcctttgggagggtaaagtctagaagaaatatcttctaatcccccatcccaggtcaacttcaggtggttaactggagacgcttgttgtaccatgcagcctcttgttgatgtatgttggcactcgtttgtttctccaaggcacgtgttcggtaacagtatatagatggctacctgtgcgtatgttggcgcacttcatgctgaattctcttctcgtattgagatcctgttgcgttgtctgtatctgagtgcgtcaagcacgcacatgaacacatctcctatgtgctgccagttgcattgtgatcgaccgttttgggtgctgcgatttgacgcttatttagcagtcaaatcacgtgggtagcggtccatctacctcacgagtgtttttt

SEQ ID NO: 26681 - DNA, 1098 bp, Zea Mays
atgacatcactgcttagtcagaaatagtgagaggctccaactcgcaactccgcagctgagcacgccgaaaagctcatcagtgctcatcccctgctggcccgttctcagtcccagtgagaggctccatgaagatcctggtcgcggtgaagcgggtggtggactacgctgtcaaagtgcgcgtgaggccggacgggaggggcgtggagacggccaacgtgaagatgtccatgaatccattctgcgagatcgccgttgaggaggcgctgcggctccgggaggccggcgtcgccgctgaggtcgtcgccgccaccgtaggccctgcccagtccgccgacacgctccgcaccgcactcgccatgggcgccgatcgcgccgtccacgtgctccacgacccggaccctgcgcggcccctcctccctctcgccgttgccaagatccttcgcgccgtcgcgctccaggagaagcccggcctcgtcatcctcggcaagcaggcaattgatgatgattgcaaccaaactggacaaatgttagctggattgctcaagtggccacaaggaacctttgcctccaagaaaaacaaaaagctactgttgagcgagaagttgatggtggaattgaaaccatctgccttgatctgccagcagtgatcaccacggatttaagacttaaccagccaagatatgcaactttgcccaacataatgaaggcaaaatccaaagttattaagaaagtcgccgctgaagaccttggcgtagatattagatcagacatggaggtgattgaggtcaatgaaccaccaaaacgaaaagcaggggtgattctttcatgtgtcgacgagctccttgacaagttgaaaaatgaagcacgtgtcctttaaccatttgtatattattcctcgctgaatatggtctgacgttcatttatttaagttctctctccaaatgttcagacttcagaccatttacaaataaaataagtgttaacatgaaccaattaagatactacccctgaaacatttacctgctgaattccttccaaatagctgtttacttgattgtgtacaggctaagctatctcttttctgaaatttggaggaat

SEQ ID NO: 26682 - DNA, 8984 bp, Zea Mays
cgggtcgtggatacccgttggcatctctatccagaagagacccaattgcccagggccgccgccgcgccgacctcgccgtcgcgcgctttgcttctcttgcccccctgcccgtggcctccgccccaattccagcgggacagcctcgatgagccgccaggatcgtcaccagtggcctcgccctaaccacggatacgaccctcgcgccgccgccgccgccgcgcaatgaactccgctgccctagctgcctaccaactgcagcagcagcaggctcatcacttcgcctcccatgcctaccaccaagcccctaccggtaacaccatgcaccgctctaccaaacccgccgccgctgccaaacctgcgccgccaccgggcaaccagcaggccgtgctggaccgggctcaagaggcggcgaggaaggctcgggaggagctcgtgaagggtggggacggcgtcacggcgtggaaggtggcgcaggcggtgctggtggcgctcaaggctgattcgtgggactccctcggcgtccagccccaggatgtgcctctcctgcgggatctcttcctaatcgagggcaaggtgaacgcattcatccattgctatgttgcagcaagaaaaattgtaacggtttatgatctggaggttgagatatgcaagaatgagggggttgtgcaatttgaagagctgggattgggacctttccttcagcacccgcttgttgcacattattttttagtgccagctgatttgtctgtggtgcctaagctttgtagcgaggaaattatcaataccctgctgaaatttgtggacaaatctaagaaaaaaatcacaattgaagattttttgaaccatcttgcagagaaaaaatcagtctctgggaaggaaaaacttggtgtgcgggtacaaagcttggggttgcatatttccttactacgacaggccaagcaaacagaagtgtctgctgcgaagcttcgagcaaatatgagtggatctggtaatagtagtcaggagaaggatttgttgaaaaatgcaagtttccatactcacaagaaggctttggacaagaggttcatttctttaactaatcgtataaaagagttaccaggcatcaataagcatatccattttgattcgaccgatgatgaaactaatagttgtactggttctgaggatggtaaatctgatggcaatgagaatgagaatgaatgttctattcttgacaaaaaggatggtgataagcgtgtgaatagctgcccatatccgtcaaaaactgaagaactggaaaggcttggtttgaaatctgaaattaataaaaggcaatctttagagaatagcaagccaagagacagtgggaaaaaggggaaagtaagtgaaaaaagaaaatatgaagaaatcgggagtcctagctgttcgttcaagcagcctaagaagcagcaaaagttgcaaaaacatgaagcatcaccgaaatgtttcctaagtataggtaagctggaaaattttgtaacaacatggaaggaaacatgtcgtgaacatccagttcaacaggttttggaaatgttagcaaattactatgggagaacgatatcagggaagaggagaattagaaatttcttctcacagtacccaggcattggccttctcaatgttgctgttaaatcaatgggatgtggtctgctggatagcatttacgatgtgatacagcttgctgatgagaatgatgtagcttcaagccctcctcctaacaccaccactgaagttatggaaattgagcctccaagtaaagaaaatacaggtagcactaatggagcccatgagaagagtgaagacaacatgactgcacatggtgttgctattgatgatgtcatcaggaggatttcagaatatattgaatccaacagtaaaatctctggtgatgtggctttgcaagtgagggcacttaatgattgtgaaacatgggtaactactcaattttcagcaaatcaattcagtgctcttggccatgggacattccttgagtttttggacaaacattgtcaccagttccgaactgctttgagtagtttctttaaggagggtccttctaattcttcatctctggaagtttctgtactgcagcagcaaattgaatttttactctgtcaagctgagagtaattggctggaagatagtgacttttcagaggatagttttgttatgcttcttaaaaagcaatttccaacaataagctttaatattgtgcaagacaaatctgatggtggagtttctggctttattgaggggcagaagaaagacatacggacatatagtttaaaattttccatctctttgttggagaaacgatggtctggaactttgccaagtagacatgggaatgttgatgaactggggaacattgtcgctgaacaatcttgttaccataccacagtttgctcacgagaggcaattaattgtttactgagggctcctatgctgtctgatctgcatctttggtcccattgggattcgctatttgctcctacactgggctcctttgtacattggttgctgaatactggtccaattcaagagctcgcatgcattgcgaccacagatgtgtcaagaaagctctcaggcgtctcctggaaggttgatcaggtctgatagcttgccaaacattaataacactgttcatttgatcacaaaatttgtacttgattgtcttgatcatctaccttcagaattccgtagtcttgcagcagacatactattggcaggatttcgggttgttactaagaactggcatgcagttatgttgcatgaagccactgaaaacgggcagctttgcatgcttcatgatattggtttgtcacttggagttgtagaatgggttgaagattgccataggttgtgtttaactgatgaagttcatgtgcagacagaaatgcattcttctgccaagcttgcaacacctgcctctgtgggagccacccatgaagattctaacatgcatatttctagtgatgttaatatgatggataagagaaaacaattgtttcctgtcataaatgatcgggctggtatagataaggaagacaataagatgttaaatcctgctggaactgaggcagatgttgcagaactacatactaccagcagatcttctatgatggaagaaacaagtcttgaggaagcatctcttgttattgagactatacgccgtgaagagtttggtctggatcaggcactaagtgacactgagaatagcttgttaaagaagcagcatgctcgacttggcagagcattgcattgcctttcacaagaattatattcccaggattctcatctacttcttgagctggtacagaatgctgacgacaatacatatcctgaggatgttgaagcaacattagcattcattctccaagaggatggtattgctgttctaaacaatgagaggggcttctctgctgagaacattagagcactctgtgatattggtaactcgacaaagaaaggatcaaaccagggttatattggaaataaaggcattggatttaaatcagttttccgggtaactgatgctccggagatccattcaaatggtttccatgtgaaatttgatatcacagatggccagattggttttgtgttgccaactgcagttccaccttacagtaccacttcttttagtagaatgttatccgttgaagatgacaaggatgcccattcattgtggaacacttgcattttacttcccttcagatcaaaatttagggagtgcactggtatgtgctccattgtgtctttgttttcagatctgcacccatctctactgctgttccttcatcgactaaaatgtatcaagtttaagaatttgtttgatgacacacttctgattatgagaagggagattcttggtgatggtattgtgagaatctcgcatgggattgagacaatgagttggttggtggtcagtaagaggctacaaggtaccattgtgcggcatgatgtgtgcaccacagagatagctgtggcgtttactttgcagcagactgaggaaggagattatgaaccttatttgaagcagcaacctgtgtttgcttttcttcctctaaggaattacggtcttaaattcattcttcaaggagattttgttttaccatcttccagagaggaagtggatgcggatagtgcatggaatcagtggttgttgtctgaattcccttctttgtttgtaagtgcccaagaatctttttgtgctcttccctgttttcagaggtgccctggaaaagctgtcacagccttcttgagttttattcctctagcaggagaggttcatggattcttcagccagcttccacacttgatcctttccaagttgcgtctgacccgctgcatgtttttggatggctctactgtgcaatgggtctatccatgcaacacacttaggggttgggatgaacaaactaaaatgttattttcagaaggcttacttcatgaacatcttggtcttggttacctctcaaaaaatattgttatatctgataagttatcaagagccctaggtattcatgactatggaccaaacattttgctagatgccatctcatctatttgccgaattgatggttgtattgagtcattgggcctggaatggctttgtgcttggtttgttaacctttatctgacattgctgtctcattcttctcaaaatgtttcctcagcaagaaacctcgaagacattcttttggataaagttaggaaaataccatgcatcccactttcagatggttcatttacctctatttcagatggtcgtatatggttgccatatgatgttgccagttccattcctgaatgcagtagcattccgaattttccagctctatatggtaatcttcgaactgtaagtccaaaccttctctctgcatgctgcaaaaataaatacctcatggaggaagtcagaataaatgatctggcagacatgctccaaaggatcggggtgcggaagttgtctgggcatgacattgttaaaaatcacatcatggtgtccttgcgtaacggtttagatgctaatgtggctgatatagtgattagagagtatgtgagctttattatggttcatcttcagtcttcttgcaccagctgtaactttgaaagaggagagatagtgtcagaactacggaagagtcctatcttccttacaaaccatggatacaagagcccagctgatgaaccaattcacttcagtaaagattatggaaattccgtggatgttactagactgcttcagaatgtagaaataagttggattgaacttgatagtagctatttgcagcatcatggttcacagtcgtcatcatttgcacgggaaaaatggaggcaattttttgaagaaatgggtgtgactgattttgtgcaggtagtgaaagttgaaaaaactttatcccaagttgattctattctagcaggaggactttctctagctgatgtatctacaaaacaatgtacagtgtatgactgggagtcaccagaattatctagaattttatcaatattttcttcaaaaagatgcaaggaaaattgtgtatatcttctggaagttcttgatagattctgggatgatcattatagtgcaaaatctaggatcttcacagatgctacacattgtggtgaaaacagagcagttgaatcatcatttatgaagtgcattcaaagcttcaaatggatagcatcaagaatggatgaggatcttcattatgcaacagatttattctatgattgtgaaaatgtccgctctctttttggtagtgtggctccatatgctgtaccgcaggtatctagcagttcacttaagaaggccattggattcaaaacagaggtatcttactgtgatgcattgatggtcctgaagtcttggataacgtcaaaggttccctttagagcaagtatgagccagatgtgcaaattctataccttcttgtctgaaggcgtggcagacgcaaagattgacattaaacgggagttcatgtcgtctccttctatatttacaccactacagcgtcctcgggcaagtgaggttattcctggaaggtttttggcgccagaagacctctattggcatgacccaacaggatgttctgaaataacagaggatttcgttgcaacgaaaaacagaagtatgttcccaagaaaaatgctgtctgcagcctatccaaacctttatgaattatttactctgacatgcggtgtaccaaaggccccaacaacatcaaattatgttgagatgctgctacggttgtcaaccattgcattgccttcacaggcaggaaaccatgtcttttgtgtatttgtgagatgggccaagtgtatgcattctgaaagtgacaagatgaatgatatattgtacttgaaagaatcccttcagaaattagaaacaacaatattgcccacctcagccgataaatgggtctctctacatccttcttttggccttgtttgctgggtagatgatgatgagctaaagcaacagtttgttaactctaatgatgtttacttcatacaatttggcgacctttcttctgaggataagcaaatgttgtatggaagagttgctgctttaatgaaaagcttaggcatccaagcactttcaaaggttgtgtatcgtgaagcaatattttatggtacatcagagaacagagaaaaggtttccttgatttgttggctgttgccatacatgcaacgttacatctataagatgcatagagatacttatatcaacttccagaaaaacgacatcatgaagattagcaacctgcaagtagtagttgttgacaagttattccacaagtatgtactgaggggactcgagagttcttctaagaaaagattccaatgtcattgtcttttgcagggagatactctatatgcaacacaagaggctgactcacattcagtatttttggagctttctagaattttctttgatggatcccatgatcttcattttgcaaattttctacacatgatcaaaaccatggccgaatctggcactcatgctgagcaaatagagacttttatcgttaataatcagaatgtgcctgagttacctgagcatgaagctatctggtccttctcttccttgtctgcagccaaacatggttcagcgaaccaaggtggtgctgatacccagggggttgatttccaacctgtccatgaatttagtattcccaatcatcagaaggcacaggtgatggtttctagttggcctctaaactattggagaacagcacccgtcttcagaacacctctcataaaccagcatgcaagcatgcaagaggcaaaggtgaatgatgctggaccttcatcaaacttaaacatgcctgctatgtatggacacaccgaagatagtttgctttctgctgatcttgaaagggattggattatagaagagaatccaagaactgaaactacattgtttggagatagttcatcggaaatccttgatgagcctcagatggtgatgtctgctgaacctttccatgcacctgcttatttgaacttggaggctggaaattcaagcccaacggttcatgtcgagctaacaaattccgatgagaaactggccaatcttgcagaagacaagaatcggcgactttcagatgcaagccagttaagaacaggttcaaacccaatggttgatgttgagctaacaaatttcgatgagaaactggccaatcttgcagaaggcaagaatcagcgactttcagatgcaagccagttaagaacaggttcaaacccaatggttgatgttgagctaacaaatttcgatgagaaactggccattcttgcagaagacaagaatcagcgactttcagatgcaaaccagttaagaacagggaggcttggtgaagaactggtcgagaaatatttggccaaacagctaggttccaacaatgttaggtgggtgaacaacagaattgaaaccggactgccttatgatattgttataacacacccagagggtttcacagagtatgtggaggttaaaacaactgtatcttcaagaaaagattggtttgacgtctcagcaagggaatggcagtttgccttggagaaaggggattcatttagcattgctcgtgtcatcttaggtacaaagaaagcaagtatagaaatgttgaaaaacccacacaagctttgtaagcagaaagcattgcggcttgctctcctgatatccagatcggcagcaacctagactaaaatgtcggttttgttgaggctagcaccgatcatccttctgcagattgttatgattactctgactaataatcaacatgaactggagtgagcatctgcatcttgataggtatttgctgatccaagttagcagattcttctttttggagagagatggggtaccgggtacggcatgagtgcaagacaacatacagttgagccgctctatagtaggctcctctttctattattctaactcgggtaatcttctccaatggcggctctctaccatgtctcttgttacatacaacttacgctctgcctttgtaacccattctggtattttgttgcataatgtatgtgattttgtcattagatttgtttttcaatttctgccctagacatcgtcccataggttgattgtgtaactaaacatgaaactgtacataaatggatggaatttgattttaccatgtacatgaaatttgattttgcgtgcggcggctgcctggtctgtgcgttctggtctctgtgcgcagggcgcggcatctgcccggcagcctgctcgccggctgctcggtgagaaaattggctagttgggtactggttttttttttcaattgataaaaaaacaggatctgatggagccttttcatttttgttttactttccgtctcttttatcagcagttgaaaggcgatcacttattctcaatttggtggaatctcctttatcagtaattgatagttgaaaggtggtgacttgttttcaat

SEQ ID NO: 26683 - DNA, 4132 bp, Zea Mays
atcacacggccgtgaggagcaactctgttcctcatctcccgttcaccccgcgggcgcagggcgcgctctctcctcgtggcgatcgccgaccgtagcggccgctgcccgggttttcgtcggccgcttcgccatgtcttcgctggacccttcgccagcgacgagcacccaacagcagaagcaattggagagtttggtaaatctactgacgcagggaagcaggttctaccgcaaagcatataatgaactgttctcaggtgtaactactgagcaggatccggattcatcgactaatattcctgagtatatgctttttgggtggcatctcttcttaatgctccatttgagatcaccagaattgttcaaggacctggtgtcctgcatccatggattagttgctgtgttggccatacttttgattcacgtgccagctaaatttaggagcttcacgattgaaggctcttctcacttaatcaaacaaactgagaaaggcgtggatcttattgcttcattatgtcataactatcatacctctgaagaacgtttgaaagaaatgttgcacaagtctcacaatgcaatagaagacattttccatatgaaagcactaagtgcttcagagtgcaaaccagaaaatttggataagatagacacagatgacctgatgtatttcaaaggtctgattgatatggaatgtttccagtcaaatttggaaaaaatggagaaactatgtaattctaatagctgtaaaggggagcttgattttaaatcaattttgatcaataatgattatattccctatgatgagaactcgacgggggattccaccaatttaggacattcaaagtgtgcctttgaaacattggcatctcccacaaagacaataaagaacatgctgactgttcctagttctcctttgtcaccagccaccggtggttcagtcaagattgtgcaaatgacaccagtaacttctgccatgacgacagctaagtggcttcgtgaggtgatatcttcattgccagataagccttcatctaagcttcagcagtttctgtcatcatgcgatagggatttgacaaatgctgtcacagaaagggtcagcatagttttggaagcaatttttccaaccaaatcttctgccaatcggggtgtatcgttaggtctcaattgtgcaaatgcctttgacattccgtgggcagaagccagaaaagtggaggcttccaagttgtactatagggtattagaggcaatctgcagagcggagttacaaaacagcaatgtaaataatctaactccattgctgtcaaatgagcgtttccaccgatgtttgattgcatgttcagcggacttagtattggcgacacataagacagtcatcatgatgtttcctgctgttcttgagagtaccggtctaactgcatttgatttgagcaaaataattgagaactttgtgagacatgaagagaccctcccaagagaattgaaaaggcacctaaattccttagaagaacagcttttggaaagcatggcatgggagaaaggttcatcattgtataactcactgattgttgccaggccatctgttgcttcagaaataaaccgccttggtcttttggctgaaccaatgccatctcttgatgacttagtgtcaaggcagaatgttcgtatcgagggcttgcctgctacaccatctaaaaaacgtgctgctggtccagatgacaacgctgatcctcgatcaccaaagagatcgtgcaatgaatctaggaacacagtagtagagcgcaatttgcagacacctccacccaagcaaagccacatggtgtcaactagtttgaaagcaaaatgccatccactccagtccacatttgcaagtccaactgtctgtaatcctgttggtgggaatgaaaaatgtgctgacgtgacaattcatatattcttttccaagattctgaagttggctgctattagaataagaaacttgtgcgaaagggttcaatgtgtggaacagacagagcgtgtctataatgtcttcaagcagattcttgagcaacagacaacattattttttaatagacacatcgatcaacttatcctttgctgtctttatggtgttgcaaaggtttgtcaattagaactcacattcagggagatactcaacaattacaaaagagaagcacaatgcaagccagaagttttttcaagtatctatattgggagtacgaaccgtaatggggtattagtatcgcgccatgttggtatcattactttttacaatgaggtatttgttccagcagcgaagcctttcctggtgtcactaatatcatctggtactcatccagaagacaagaagaatgctagtggccaaattcctggatcacccaagccatctcctttcccaaatttaccagatatgtccccgaagaaagtttcagcatctcataatgtatatgtgtctcctttgcggcaaaccaagttggatctactgctgtcaccaagttccaggagtttttatgcatgcattggtgaaggcacccatgcttatcagagcccatctaaggatttggctgctataaatagccgcctaaattataatggcaggaaagtaaacagtcgattaaatttcgacatggtgagtgactcagtggtagccggcagtctgggccagataaatggtggttctacctcggatcctgcagctgcatttagccccctttcaaagaagagagagacagatacttgatcaattataaatggtggcctctctcgtatatagctcacagatccgtgctccgtagcagtctattcttctgaataagtggattaactggagcgatttaactgtacatgtatgtgttagtgagaagcagcagtttttaggcagcaaactgtttcaagttagcttttgagctatcaccatttctctgctgattgaacatatccgctgtgtagagtgctaatgaatctttagttttcattgggctgacataacaaatctttatcctagttggctggttgttgggaggcattcatcagggttatatttggttgtcaaaaagtactgtacttaattcacatctttcacatttttcactagcaatagcagccccaaattgctttcctgactaggaacatattctttacagcttctccatcagactgatgatcccatattcagtgtgctgcaagtgatttgacatatgtggcttatccttcaggacaagatatttttgtatgctacacttcccaaattgcaattaatccagaagtctaccttgttttattctattagttctcagcaacagtgaatgaatatgaatcagtcatgctgatagatgttcatctggttattccaaacaatctgacatcgcatctctttctgcaagtgagatgaagaaaacctgaaatgctatcaccatttaaaacattggcttctggaagttcaggtgattagcaggagacgttctgacattgccattgacatgtacggtagtgatggcaggagacgttcttaaacagcagctgctccttcagcttgtaatgtctgattgtattgaccaagagcatccaccttgccttatggtactaactgaatgagctggtgacgctgactcatctgcataatggcagatgcttaaccatctttaggagctcatgtcatgattccagctgcaccgtgtgcaaatgtgaaggccctgcaagggctttccaggccgcaccaatcctgcttgcttcttgaagatacatatggtgccacctaaataaaagctgtttctggttatgtctgtccttgacatgtcaacagattagtgttgggttgcagtcatgtggtgtttaagtcttggagaaggcgagaagtcattgctgccagcattgtgatcgtcaggcacagaagtactcaaaagtgagagctacttgttgcgagcaaacggagggcgatataggttgatagccaatttcagttctctatatacaagcagcggattttgtttagagttagcttttgagatgcatcatttctttcacatctgattctgtgtgttgtaactcggagtcgcgtagaagttagaatgctaactgaccttaattttcaccgaataatttgctagcgtttttcagtatgaaatccttgtcttaaatt

SEQ ID NO: 26684 - DNA, 2620 bp, Zea Mays
gccgccgtggtccgctgtcgcacacgccctcctgcccctctgctcccctcccagatcccgtgatccgctgccgtgatccgatgccgcacccgccatcaacgccctcctccccctctgctcccctcccagatctcgtgatccgctgcgaggccgccatcaacgccctcctccccctccgctcagctcccctcccaggatctcggcgcgctttcatcgccgccttgatggtccacggctgcacccacatacgacatcgcctgtccgcacgcaagcttctgcctgcgcccacctgtgtgcatagatgtgtgcccccgcccacctcttctgcgcccaatctttacccgtcgtccgcgccgctgttccatcctcgcacccacgcccgagatccacatgtgccgcaccccagccgtgctccggatgctgcaccgcccttccatcctccgcatgcagcaccatgttggccgccgccctgaaacctcgctaccacggagctgcaagcccccgcttccaaaccagcaccatgcagacttccaatttgttttttgtttggagcactgttgattttttctcgtttttttgagaacattacattgcccgtctttcactgttcaacttttcttaattaaccatttacatttaccaaaaacttattcaacttttcactgttcaagttcaatttgttttgtgcagtattgatctgttgtgcagtgtatactttgaggttcggttggccgatcttgcgatcgaataccaaaaacttgtgcggtactctgttgctgaataaaacttggatcaggttaccccaaccccaatggcatttaccgagccgatggaggcgaacctgctacgccaagtgctggactatccccccagtgctctgtccatgtccatccctccttcagcttcattgatggttgcactgctctactatactataagtgaattgagttaaagcattttttgttcgactactgtttggtgcatgcaacttaatatggctgatttttagtctttctattttagtttataaattgtcaatcacagggattaaaagagactaaaagtaaggtttcaggttctatttctatccatctttaattaagggctgaaacgatactgtcttgattcctaattcacctaatattcctagaccaagaacgactcgggttaatggtcagggatgccaaattgtttcagtaaaactaagcaagctcgtatgatgattatgtacctacttgagaacaaattgtctaaaacatatctgctactacacttcagtaaaacaattgatcacacacaagaagttcagatcagaaagcaggctgtcgctactcccgtcaggttctcggatggttcccgtcaagggctgaccatggagaagagcacagtggtggtcagtgtccctgttgttgtcatggccgagactgctgagaccgactacagctcgagcttctctattcatggttacgaaatgtattggggttctatatttttggtgctagacttcttgtcgtggattcacatttgctacctggggatgcagagtcccagaaagatgttgggaagggtgataaatcaagggataagggaactgctgagaagtttgcaatatatcagaagcatcgttcttcgttggcagacactgttcaattcaggaggccagctgctccaacttccagtgtgaatgctgatattgtgggaacatccactctgcagtctgcatctctaccgaaacaagaaccctcaacagctacatccaagagctatactttcagagaaggtgatagggtgcgttatatgggtccagctcagttatcctcattgtcacaaaggctcctctccttttgctggcttcgctgttggaagcgagacatcatgtggtgtggataacgtccttgcagagcacgtgaactcaaatttcactctaatgccagctagctgctacatagtgcacttctgtatattatgagaagagagtggctcttcactcccatcggattgacaaaaacacactcggacaaccagtgctggtattaatcgagatgtcgcatcaacaaacgctcatgcagagccagattctactcctacagtcctacgtctacacgagacgacacaagtgcatctataattgatcttttcttttcatctactattctcaacagacacagcagaactgcatgccagcagaggaatgcatatctagtggagataaactgtaatcggccgcctggatgacacgataggaccacgcgtaagaacaaactgggaccaaataataaaagacgaacggagaaaacgtgtcgttgcagatgcccaggttgtcgcactggctccgtcactgtctgatcgagtatctgcaaagtagggattaggtttgtcaccgttgactttacatgcgcctgcacattattctcaagtagtagtacttgtaatcacccctaggccctagtcaatgtgcacgagggaggccaacgtggcttcgcccttgctttaaaatctgactgttttttttcttcactttctcataagaacgtacttttcctgtatcagtcgcctagatagttattttaaacttttacaagaattacagcgggaggtggtgataacgattacagttaaa

SEQ ID NO: 26685 - DNA, 983 bp, Zea Mays
ctctatatgaacggagacaaggcagccgccgccgtccccattaacatcaccgagacctatcgccgcagaaccaccgaatccacggcatcggagagtgtagaggttagtactaggcggaggtcaagatggtgtgcatccggcaggcgactatcgacgacctgctggcgatgcaggcgtgcaacttgatgtgcctgccggagaactaccagatgaagtactacctctaccacatgctgtcttggccgcagctcctcttcgtcgccgaggactacggcggccgcatcgtcggctacgtgctcgccaagatggaggaggacccctccgagccctgccacggccacatcacctccctcgcggtgctccgctcccaccgcaagctcgggctcgccaccaagctcatgtccgccgcgcaggcagccatggaccaggtcttcggcgccgagtacgtctccctccacgtccgccgatccaaccgcgccgccttcaacctctacacctccactctcgggtaccagatccacgacatcgaggccaagtactacgccgatggagaggacgcgttcgacatgcgcaagcctctccggcagccgcaacctaagaagcaccaccatcaccaccaccacggccccggtgggtgctgctcccacgacgcacctacggcgacgactggttcttctcctcagtcttttagttcgccggataagaaggctaacacttgacggatgaacatagatggagcaatgtgcttagaaatttcttgctttcgatgatgatttgcctaattgtgaggtgtagacaactccaagttcctgcttgccagggagaacctacttggagtcctacattcaaatgagttctatgggcactttctgaggtttaaatgtttgcctatgttatgatcagctcatcttatctttcactgttatatttggaagcttatgaatcaaatgcgtccaatttttacctccacagtaactgcagcc

SEQ ID NO: 26686 - DNA, 3015 bp, Zea Mays
ctctcgtcgtccagggaaggatgcaggatgctctccgtccctcccccaccacctgaggaggaaagcaagaaatttttaaccaaccaaacgcaccaccgcgtgcctccgtgattcccagcccaattaacccggaacagaagagaagagctcgccacgccaccggtgggatcgccggacacctacgcgggcctggccttgggatccccggaacgcggggcgtgggaaaccgaggaggagcatgtcgcgggtggcgtcgctgtcgccgtccttgtcgggcgacgaggtggaggtggaggaggaagaggaggacgagggcgtcgacggctaccgcaagggcggctaccacgccgtccgccccggggaccagttcgccgccggccgctacgtcgcccagcggaagctcggctggggcaacttctccaccgtctggctcgccttcgacgtccagtcacagagatacgtggccctgaagatccaaaagagtgcgcctgagtttgcgcaagctgctcttcatgaaatcgagttcctgtcagagatcaccaagaaggacccattgaactgcaaatgcattattcagctgatagatcacttcaagcacacggggcctaacggacagcatatctgcctcgtctttgagttactgggagatagcttgcttaagctggtacagtacaaccggtacaaaggcatcgggcttgatagggtgaggcaaatatgcaagtcgatcttggtaggtcttgactacttgcacaatgagcttggcatcatccactcagatttgaagctcgagaaccttctccttctctcgaccattgatccctccaaggaccccattcgctctggcctcaaaccttgccttgagaggcctgagggaaaccctaacggtgaagctgggattaatgcgattgagaataagctaaagatgagagcaaggagggtgcttgcaaagcttgctgagaaaagaaaatcagctgtggaatcttcacgctcagaaaggagcttgggtggaattgatcttacatgcaagattgtagactttgggaatgcttgctgggccgacaaacaatttacagattttattcagacaaggcagtaccgggcaccagaggtcattctaggtgcaggatactcgttttctgttgacatgtggtcatttgcgtgtatcgcttttgagctcgcaaccggagaaatgctatttacacccaaggaaggccatggatacagtgaagatgaggatcacttggctttaatgatggaactacttggcaaggtgccgaagaagattgcaaccacgggaacacgatcaaaggaatattttgaccgccatggagatctgaagcggataagaaggctgaaattatcatccattgaacgtgtccttgttgacaaatacaaaatttctgaatctgatgcccgggaatttgccaattttctttgcccattacttgactttgcaccagagaagaggccaacagctttaggttgcctaaagcatccatggcttcattataacgaggataaaacttgtcagtctcttaacaataatgatgccaagaacattgacctggcccaaagcccagggagcatcaccagcggatattgtacaaatattgatttgacgagcaaaaaaggcggacccactggaacttgtgataagactgctgatgcaaaatataacaccagaagcattaccagcaatgctaccatgaacactgatgtacagcccaatattggaagcattgctaacggacttgccaaaaatgttgatgtaaatccgaacattggatccatcactaatagagatgccaagagttctgatatgaagccccacattggaagcatcaccatcagtaacgccaaaagctctaatgtaaagctggatacaggtaacatcactgatagaaatgccaaaactgtcgatataaagcccaactctgacatctctagcagagatgacaagagcagtaatgtggacaccaccacttccagtgttatcaacaaagatgcgaagcgcagcattagaagtgtcgttaattcttatatcaagaatttcgatgcaaagtgcaacactggaagcactgctaacagtgatgctagggacccatcagatacgaaatccagcactaaaattgttagtagtgctgataatgctaagtgtgtggacataaaaccgatcagtggaagtgataagagcaatgacaccagtgataagagcaatgacaccgtcgatgctaatgtgaaatccaactctggaattgttgcaaacagtgatgctagcaacaccgatgtacagactaacactggaagtgtcgacagcagcgatgattacagcattgactcaaaaccaaacattggccgggttgctgcaagcatacagaggttggagagcagtatggggaaatacagggccgacctttctcaagattgaggatctggcaggtaccagctggcgttattgtatatctctattcctgctgactgtacaaagttttgtatttgcctacagaacttacacggagtagtaacagaagattgctgttcctagtatggtggatgcactggaaggggaagaattatactctgaccagtcacacgtcatctctcttgattatgttcatattctgccctcagtgaaaaaaaagagatttctttatgtcatttaacaaggatcaccatttatctgagcaagggtgacatttttgtttggtttatggtgtgaggtttgcttgtaaaaagcgggacatgtgttgtataaaactattctttgttcattttgtagtgaaacaatcatatagatgaaatgtttttttttcactttaggctggttcagttaggagtggatcggaggggattaagggctactttggtgactagtgaaataaaggggatccctaggggaggaatcccttgctattccctaggatccctttcatttctttaatcaccaaagcagccttgaaaaaaattaaatcccttcctattcaaaattgaataggaatagttttaattctgttc

SEQ ID NO: 26687 - DNA, 4979 bp, Zea Mays
  misc_feature (1)..(1): n is a, c, g, or t
ncccgtctccgtctccttctcctcctccccgtcgccgtctccgagtctccctctatttctctccgcccttgttcttctcctctctccctctatcttattacctcaagtagaagtagtatatattttttgtccgccttttcaatttttccttttatctccctgcgtctcttcgtcgtcctcctgctgtggcggccgccggcgatccccgatcggcgatactcagattctagttgtccattgtgctgcactgcagcagtagacaatcgtgtttttcggtgttttgtctgtctctccttgatcattcagatgcctgtacagctcaactgctatagctagctgtatatatctggttgaagaggactaatctagcaacaatgtcatcgcttcagttattgcaactaacagaacgggggcgcaaccttttgtcttcaagaaggagaacacttgcaattgtttctggtgcagtacttgctggtggagctttagcatatgcgcagtcaggtcgatggaaaaaacaccaggaagcaaattcttgcagtgatgcaaactcacatagcagtaataacggaagaactagtcagaacggcattgatggtaaattggttaaaacaaggaaaaagaaaagtggactgaagtccttgcattttttggctgctattttacttaagaagattggcccgaatggaacgaattaccttattggcttgatactaacagcagtcttgcgtacagctgttggccacagattggcaaaagtacaaggatatttattcagatctgcattccttcggcgtattccgacctttacacgtctcattattgaaaatcttcttctatgctttctccaatccacgttatatcagacatcaaagtacttaacagggtctttaggcctgcgcttcaagaaaatcttgacagatcttgtccatgctgattattttgagaacatggtgtactacaagatctcacatgttgatcatcggatcacaaacccagagcaaaggattgcaagtgacataccaaagttctgctcagaattaagtgaccttgtacaggatgatctggctgcaattgtagaagggttaatatacatctggcgcctctgctcttacgcgagtccaaaatatgtgttatggattctggcatatgttataggtgctggtggtacaattagaaaattttctcctgcttttggcaagctgaagtctacagaacaacagctagagggggaatatcgtcaactccattcacgattgagaacccatgctgagagtgtggcgttttatggtggtgagaacagagaagcatcacatattaagcagcggttccgggcacttgttaaacacttgaatgttgttcttcatgaaaactggacgggcagagatgttgagcaatctccgataccacaccagcgtgataatatcactatttcaatctcttggaaccatttctattagttcaaggcgcttaaatattctcagtggctatgctaatcgtattcatgaattactggatgtctcgcgtgagctatctggtggccgtgatagattgattactcaaaattcttctgatggaaattatattagcgaggcaaattatatagagttttcagatgttaaggtggtgacaccttctgggaatgtcttggttgataatttgaaccttcatttggagtcgggctctaatctgttgatcactggtcccaatggtagtggaaaaagctcccttttccgtgttcttggtggtctgtggccaatggtatctggtcatattgtcaaacctggtgttggttccaatctcaacaaggaaatattttatgtgccccagagaccatatacagctgttggaacgcttcgcgaccagttaatctatccactcacagcagaccaagagactgaaccacttagctatggtggcatggtggatcttctaaagaatgttgatctggaatacttgctagaacgctatcctcttgataaggaagttaactggggtgacgaattgtctcttggtgagcagcaaagattaggaatggctagactgttctatcataagccaaagtttgctatcctggatgaatgcactagtgctgttacaactgatatggaagagcgcttctgcaaaagggttcgagcaatgggcacatcttgcataacaatatctcaccgtccagcattagttgcgtttcatgaaattgttttatccttagatggtgaaggagggtgggatattcaggacaacagaaatggttccttctctcccgaagttgagtttgatgtgctgaaggcatcagaaagtgatcgcaagtctgatgcacttaccgttcaaagggcttttatcaccagcacaaagggaaatgcgtcaatgaagcccaagaaacattcttattcaacagaggtcatagcatcttcccccagtatggagatagaacatacagtacaatcatctattgtcacacaattgcaatgctctccaagacctttgcctgtcagagttgctgcaatgtctcaaatactggttccaaagctatttgataagcaaggagggcagctgcttgcagtggtacttcttgtattctcccgcacttggatttcagaccgtatagcttcattgaatggaacaagtgtcaagtatgtcttggagcaggacaaagctgccttcattcgtttggctggcactagtgtgctgcaaagtgcagcaaattccatcgtgtcaccctcactgaggaaccttacttcaagaatcgcccttggatggcggattcgcatgaccaatcatttgcttcaatattatttgaaaagaaatgctttttacaaggtattcaacatttcaggtatgagtatggatgcagatcaaagaatgacacatgatgtagagaagttgaccaatgaccttgctggcttgcttactggtatggtgaagccattagttgatattatttggtttacatggagaatgaagcttttgtctgggcgaagaggggttgctatactgtatgcttacatgttcctaggtcttggttttctaagagctgtgtcccctgactttggggatcttgcaaaccaagaacaagaacttgaaggcacgttcaggttcatgcactcaagattgcggacacatgctgagtcaatagctttctttggtggtggatcaagggagaaagctatgattgacgctaaattcatgacattgctcaaccactcgaaggttctattgagaaagaagtggctttatggtatttttgatgattttgtgacgaaacagcttcctcataacgtgacatgggggctgagtatgttatatgctttggagcacaagggagaccgagctttgacttcaactcaaggagagttggcacatgctctgaggttcttggcatctgtggtgtcacaaagcttcatagcgtttggtgatattcttgagttacacaagaagttccttgaactctctggtggtattaacaggatatttgagcttgaggagcttctacaggcatcacaaagcaatcctgtcatgccttctgatgccacaaatgccggttccgaagaaataatttccttccgtggcgtgaacattgtgacaccatcgcaaaagctattggctagccaactgtcttgtgatgtatctcaagggaaaagccttcttgtgactggtccaaatggtagcggaaagagttccatctttagggtgcttcgaggcttgtggcccattgcttctggtagtcttagcaagccatctgaaggaatttttaatgttcctcaacgtccatatacttgtcttggaaccttgagggatcagatcatataccctctctctcacgaggaggcaaagttgaagatgctctcaggcgaaacaagtgacaagtctacagcttccgagctgttggatgatcacctgaggacgattctagagaatgttcgcttgctgtatcttctggagagagaaggttgggatgctaccactaactgggaagatactctatccttgggagagcagcagaggctggggatggctcgtctgttctttcactgtcccaagtatggcatcctcgacgagtgcaccaatgccacaagcgtggacgttgaggagcatctgtacaggctagcaaccaacatgggcataacagtcatcacatcctcacaaaggcctgctctgattcccttccattcgttggaactgaaactcattgacggcgaaggaaagtgggagctatgttccatccaccaataaccgattgccatcaaccagtttatttatgttcaccggagtagggtatttacaagttgcaacgcacagaggaaaaaaaactcgtccactcgggtgtagagtgtgtgacggagtcttttttttttttggtttcccttttcttttctttttctctcccctttgatggaaatcttgcgatacggaaagggagggaggaaggaaatatacggcaggaaaggaaagtattaggagaggttatagatgcaggcttcgtcatttgggatagcatagtacatgttcctggcatgatatgccagcctgattgatttttatacgagatacagaataagttaaaataaaaatggatatggcacaaagtgtgcccttgtaaattaaatgggaaactaatctataggaaattcatcctctctgtgtcgcccttgcatcgaacgtatcccaatccatatgtaatggcctaatgggaagataccgtatgcaatcactcatatttgcgagaaaaggaatcggcaattaaaatactacacattctgtgaggttgtggtgtttggaattctagtttatgctattttagtggtaattatctacaatgttctagaagcaagtcacttttatgatgcgcccgctaacaaggcaagggtattttatagttagaatctaattgacggataccgtacgacaccctaactaaatttaatactcataaaaaataaatttaatatcaaagtactcataaaaataaatttaatatcaaa

SEQ ID NO: 26688 - DNA, 1171 bp, Zea Mays
ctaccatgggatgctctaatgctttcatgtttgattctgaactgaccatgccaaaatggtcatactctatgttccacctgcaaaactcgggtgcacaaccgctgcccaacttgtcgacaagagctaggtgacatcaggtgtctggcattagagaaggtggctgaatcacttgagctcccctgcaaatactactctcttggatgttcagaagtcttcccatactacagcaaactcaagcatgaatcacagtgtaattttaggccatacaactgcccttatgctggttctgaatgctcagttgttggggatatttcttttcttgtggcacatctgcgagatgatcataaagtggacatgcactctggatgtacatttaatcaccgctatgtcaagtccaatccaagagaggttgaaaatgcaacttggatgctaactgtttttcattgttttgggcagtacttttgcttgcactttgaggcatttcagcttggaatggcaccagtatacatggctttcctccggtttatgggcgatgaaaatgatgctaggaactacagctatagccttgaggttggtgcaaatggcaggaagatgatatgggagggaactccccgcagcatccgggacagccaccggaaggttagggacagccatgatggtctaataattcagcgcaacatggctctcttcttctcaggtggagaaaggaaagagctgaaactgcgagtcacaggccgtatctggaaggagcagcagaatcctgactcaggagcctgcattcccaatttgttcagctgagctcagtaacaagaggatggatccaggtgtatattgatacggccgatgtgtttgtgtgagcgtgtgcctgtgctttgcgttttgtcctgccaagctgccattgcagcccgccctaaattagtcagggcgtatttactgttggcaggataatgaaaatactggcttactccttttgtgggctgtgactaagctcccatgaatctcacgataagcatttttctcgatccaatggtgtatactgtatcgttttgggctgaaggctgcagcttttttgctgttatgtttgtctcggtgtatttgtgtgtctgcaaataaagtattgaacagtaactgggtaccttgcataaggtttggttggctgttcacttgccta

SEQ ID NO: 26689 - DNA, 1049 bp, Zea Mays
tggctgcatctaactaccggcggggccaacgaccttagcttctccttcccgcatgttctcgtcctctcctctcctctccgctcgtcgtccacccacccctcgtgctcgtctcactcttcacctccagctccggatctgaaacgccgagcaatctttcgtcgtttcgagtctcatccagagcttctcggtgagtgcgacaattgggccggagaactgggaaagcctcgaggagacatggatgggttgcccagagagctgtgcctcaagatcttccacctcctggatcaccagtccctcgcctcttctccccaagtttgcaggaaatggagggcgttgacctcggatgatgaactgtggcgcaagctgttcaacgacaggtggggagcggacgctgcagcgttctacgcgccggagggctccaagtcttggaaggacgtcttcgccgtgcaggaccggtgcgaccgatacggactgtaagccgccactcgcccatctgctccagctccactgcttccgattgccatcagcagctggtgttactgctgtcgaccaacagttcagccgcctcctttccctttgtttttgtttggcctgtgagtgtgtgtgtgtgacctcctttccctttgtttttgtttggcctgggtgtcaggatcatcagggaagggaaggactactacctgatctaccagggcgagatccagaggtacttgggctcccgccaggacacggatggcgactgcggcgaggacgcgccacggcgggacgctggagacgagcatcggcagatatccgaccggatcctgttcttcctcggggatctggagaaagcctgcgccgacgccaaacgtgttaaggcctgaacacgcgctacccttgtgcccctgatcatcatcagcacaatattccacgctgagtcttgttaatttgtgcatgtctcgtgcatagtttctcaccatcaattcatgtagttggaaatcatgctcacatcgacactgaaattataattcaagtacagtcgtttagagggtaaaactacctgatccccacaa

SEQ ID NO: 26690 - DNA, 1332 bp, Zea Mays
cagattcacatggttgaagggggcccgaacgccgcgcttcggagtccgtcttcctctcggcctgcgcagaatcgcaggagacgggtaaaatcccgctgattcgctcggtcctcgcccgtcggctcgctcgaggcaccggctccgacactgcttggcgatttcccccgtgcgacccccggcgatctgagcgcgtgactccgctgcccgccgccgggctccttctccgcgccagcggtcgtcccccctcctcccgcggcagccgtcccctccccgagggtcgacggccgtgccctcctcgagggtctaggtaaacttttcgatctattgcgatcccagagctctgccgccgttgaaaccacgggctcgtggtaacttgttgtcgtcggagggatccccgatggccgcggaggcagatcagaaagtcgtggtgcacgtgcggtcaacgggcgatgcgccgatcctgaagcaatccaaattcaagatttcaggacgagataagtttctgaaggtcatagagtttcttcgtcgacaactgcatcaggatacactgtttgtctatatcaacagtgcattttcgccaaacccagatgaactgaactttggaattgatgggaagctagtggtaaattatgctttatcggcagcatggggctaagtctgtcttgcagcaaaatgggaaaaaagtactaccattccgcatgacgattgtaaatcacatctagttttagtactaaatcagacactgcaaatatcctatagagcttatgcatagttcaacactcaacctactttgtggttaatattatttttttagtttgatgtgattggacattcctatttgctccaacagtgcacatgaatcaaccagtgctggagaaaacgtcgtcttttgagccaaagcaatttataaagcacaagccgaaacgagaaagctgtttgcctctatttacaagggaattgcggattccattctgtaatgcatcgcaaatactagtttagttcattattgctgcaacaactttcctgtaatgcaccgcaaatactccgtttactctaactttcctcttcctgtctagatttgcatttgctttttaaattgtgtacgcctgacacgtttggaaaacatggcgacagacgtctgcccttatctaagtataacaatattttctggacgtcctgagttacacatgttccagcgtgtagagaacattgtgatggataacgtggttacacctacttcaaataatatttactcatatataccacatcgtccagaagcgtacacgtatatctgcattacacggatcacaaaaaacccgagccttttccctg

SEQ ID NO: 26691 - DNA, 1191 bp, Zea Mays
aagtggaacaattgcaagcattgatttattgacaggaatgctcaacctagattccagttcattgtcatgaaccgcaggaatacagataatctagttgaagatctcttgggagattttgaataccaactccaagctccttatattatgtaccgaaatgctgctcaagaagttataggaatttggttttacaactctcaggagtgtcaagaagttgcaaatctttttagcaggattctgaatgctttctcgaaggtgccaccaaagccgaagattccccctgttcaaagaggtggaagcagcacctgtgttggttgatggccctctagaaccgcaaacgtcaaatatcatgtcaactactactcacattcaagaggatcctttatctgcatttttcagtgcagctgcaaatgctggtggcaactctgctgtagctgttgcaaggcaaccaattcaactttttggtgctactccggtggctacacatgcagctactagtatcactacaatacaatcgccaggcttgcattatttgcttccttcacaagcctcatcggtttctgggatgcctgctgatgctcatggttctataggaaggtccacaaaccttgtaaatccatcacttttctcaccattgacgtcttcacagacaacaatggtgtgcactaattctgtagtagcaattgctccacctcaacatcctcagactgctcagcagccgcaaagtgctcccttgcttcagccttttctattacctacggcttcaccatctccaccatatgggactccattacttcaaccatttccgccacctaatccatcgccatctcttgcgtctgcaccagtcttgagcccagcactgtctagagacaaagtccgagatgcattactgagacttgtggagaacgatgaattcatagatttagtctacggcgagatcatgaacagacagtaatggattttcaaggtacagtcctctccatcaggctagcttgtgcttggactctgtcattatctgttgtctaggctatttcaagttatcctgtaaattcattgatgaaatccttcggtttgtggagcttgtgctattaatgtacttttgacatttacaaaatctgtgctgtgttcgtggtgcagaaaagttttgttctgagtattatcttgaaacttttgttcaaccaaccttttgagaag

SEQ ID NO: 26692 - DNA, 746 bp, Zea Mays
gtcggttgcaacggccaagtctgccagatgagggtctgtaacagcctcgggctataagtcgtgctccaagccctctggttaacacctctgcgctcccaactcgagaccaaggaaaaagagaagggggacgagtgcggctgtgggcgggattctgttcgaccgccgattcgaccccggggaagcctctggttaacacctctgcgcacccaactcgagaccgaggaaaaagagaagggaaagcatagggtggcggggaaggtatcgcctcggaaggactcaaatcaacggcaattcctcgccggacattgctttccgtcgtgaagtcgctccgctctgtggacaggctcgtcatcaagccaatcgcgagtacgctacaggatatggttgatggtgtgacttggccttctaccctgccaccgggttggacggttgagtgggatgctgcctcgacaggagaggagcaggaggagaggggataggccttgccctattcctcagtattcgacgtcatcgattatccgctgcactttaattatgaactagttcccttttatttaaaactcctatttatgtaataactctagtaccttaatttgtggtttcatgttttattgtattctctttgtgcctcaccttcgcgtgagctagtggtattcgatccttgggaagtggctttatcagactagatctgagggactgacgggttattccgatttaagtgtgttgctgcctctaaggtgtgactt

SEQ ID NO: 26693 - DNA, 752 bp, Zea Mays
tgcgaaagggcctctagctgagttagctaggtggtctgagtagtactcctcaggtcctgggttcgactccccgtggggcgaatttcagctgcggttaaaaaaaatctcctcgtatgtctcacgccaaagcatgccaaagcacaggtctaaggcctggttgtaattgttctcacatggccaccagatcgcgggttcgagacagcatccccatatttgcaggggaaggcttctaccctgaggtgcataagcacaacactagtcaggcagatagtgctattctcgctctgaactgcagtggcattgttcttggaacgcttcctgttagggtgagcccatcaaagacaccagtccgctcgcgatcgccccgtgtgacgtcatactgaattcggctcatctgaagccgtcgtccagggcagcaaatttctgggcaacaaagccctagtcgtgtggccttagagactgccgcatcgcggataagtaattgtcgttgagcagagttctcgttggttaaagtccagtctagtaggaggcgcagagacccgtctgtatggtcgctgggagatctatcttgacctcctttttctgttctttttggtcttagttatcgtggttggattctatagcagccttgacaggcattcgaacaacaatgtttatggttatcctatccgctttggactcttaagcatgttttcccagtctttaaatattaagagatagtttggtaactatattttttcgagggattcata

SEQ ID NO: 26694 - DNA, 2106 bp, Zea Mays
cgcgaaccgactcgccgtcccgtcccgtctcgcctcgcttgcttgtccccatccggattactcttccgctcccttcccctcctcacctcaccaccatctccagctccatccgcaccaacatctccaccaaccgacacggcgaggagatgaacgcgtcgcagttcatggacaagcagatcctcggcctcgccgcctccgcctccccgtccggcggcggcgcggggggcggtgggggtgtggatctcagcgatctgatgatcccgatcccccaggaggacggcgaggaccgtctccgtcgccggcgtagcagtagcagcgtcaacggcacatcagacgacatgctacccagctacgatttccagccgatccgcaccggcggcgccaccgccgccgcccccgtgtctcaggcctcgtggggatcgctcgactccaaggcaccctccgcctctgcctctgcctccgccgccgcctcatacaacctcaagagtgctggtatattggagccacatgtgctgaagaaagttagtcatgaggaagacaggagtaacttccctacagttactatcgcagatattgatcgaaccatgaagaagtactctgataaccttttgcatgcactggaaggtgtaagctcaaggctttcacagatggagggcagaacacaccaactagaaaactctgttgatgagttgaagttaacaattggtaactataatggtagcactgatggaaaactcaggcaccttgagaacatgctcagagaggtccaagcaggtgtgcagattttacgagacaagcaggaaattgtcgaggcgcaactccaccttgcaaagctccagacaaccaaaactgatgcccactcatcagaaaatagtgggtctggacatgctggctctcagccggtgcctcctccacaagcagccattcagccacagcaagtcttaacccctttgcaaccacctgcacttcctgcccttcctgctccaaatgcaccacttccaacgcttcaaagccaaccaccatcacagtttccaagtcatttacaacattcacagccgaccgaaaccatgcaccagcagtatcaagctccgccagttccacagcctcaggcccctcctgcacctcagcaataccaatccccatcccagttccctcaatattcacagccatctcagccttcaaacgttaaccctccaactccacatgtgcctcctgcaccccagcaaccagaggaaactatgccttacccaccgcctcagagctatgcacctaatgcacgtcctccttcaccttatatgcaaccgcctagtggacctgctcctccttactatggacaacaaaaccctaccatgtatgaacctcccgcaggccgggctaaccctgggccgccatcatcatacggttctggtggctatggaccacagggtgggagtggtttctctgactcatatggttacgctggatctccttcccaccgcggcaatgctggaatgaagccgtctacaccttttgctcaatcctctgggggaagtggcggctatggcagtggcaggctccccacggctcagatactaccacaagcagtgccggtaagctcctccagcaccagcggtgcttcaggcaatagagtgccacttgacgatgtagttgagaaggttgccacgatgggattctcgagagagcaggtgagagcaaccgtgcggaggctgacggaaaatgggcagaatgtggacctgaacgtggttctcgacaagctgatgaacggcagataagttgagcagtagtgccatttcaacagtatgtgtatagtatggagacttgggaagtgtcagctgaaccgattttctgtctgcaactttgtaaacctggagaactctgatgaccgaacagccgctcatcctgattgccggtcatggttgctccacctgaaatggaaacagcccagtgtgcctgtcagtgaactatagtattattgcaatctgaatacgttattcatttgatgtatatgtggtgctgatgatattttaaaacatataccgtggtttcttgtgatatgttaataagaagcctttactgtgttttttaggctgcgctacagaaaaacgg

SEQ ID NO: 26695 - DNA, 2491 bp, Zea Mays
cagaaataattgcctcccttcattggcctcatctctccctccctccttgacccatctgcgacttcccctgcattaaggatgacctcttctctctaggtcttacaaccctagacgtggaatcaggatcagtgtgcacggggaaccagcaacggcagcacgtacgtggaaccggcaccgacgaattgcacggggcagcagacaatcgtcgcctccttgactccatccgcgaccttcctccatccgtggtgccagcaaactgcacgagaagacctaggtcaggtgtcctttactttctttgatactgctttctttaaccacttattacttgttctatgtttgataataaattttaggcacagatgtaagtcactactagttgcccatgtttactagttagttgttcatgttcactagtaggtagccaaaagtactcaattaagttatgcttgttaattttacctaggtgactcggtgctagccacactattacaagatgcctcctagtcgtttgcaggttggaacaaaaacaacagaaggacataaccaagcagtgcagcgccttagacaagttatgagaaacaatgcaaggctgcaacaactgggaattcctggtttatgcgacacactgccaaaggcatattcctttcatcacaacaaaaataagccaaattttacaaataatgaagattcagaatctgattataatccttcatcaaatgacactggtgaagaagatttacttgatgatgacaatgttcagggctcgaaggattataatatgaggactacaaacatgtctaatggtgtaatcaagctacgcactaaaagacttcttgcagagaaagaatctattagaattacaaggtcaaaaaaaactgctgcccagcctaatggtactgaagtgtttgacaacaacgatggccatacccaggctacagttcaagctagtgaccctgctctatttgacgagtacacccacatggctaatggaggtcattccattgctcgccctgatgggcacaacctgatgggaaacaaagataatgtaaacatccaagttgatgacaacatgaccagtggaggtgaagctagcatcgagcctagtgtacatgtacaactaggtgaaaatgatcgatgggaaaggggagttaatatgggacatggtctccataggatgaaccgagctatgcgtggaaaactgccggttgttattcctgaagggaggataaggcccgtggcacctcttgttgctgcaaagttttcaactgaatgcaatattgcagttaggaaccatgtgccagtgtacaagcattggaaggattacaagaaccataatggcatgtttaacctatttacagataaacttagtgcaaagtttgatatcaacacaaatgatgcaccagtccaaaaggcttgttcccaaatgatgaaaaatgctataaggcaacaacggtacagactaaagaaaaaattctttgatccttttccactacatttggtgacaaaaacatcaccaatcagatcgatgagtaatgaagagtggaatgatcttgtggaatattggaagagcccaaaaaggatggagacatcacaaaagaacaaagataaccgatccaaagttaaatttcatcaaacaacgggatctcgtagctatatggttcatgtagaaaatttgggagataaaaacattggtcaagagcccgatgcattagatttgttcaaggagtgtcattacagcaggaaaaagaaatgttacacatctaccgtgcaacaagctataactcaaatggataacaagcggtctgcaactacagaaggtgaaaaatcaatgtctgcaactgaagttgttgctaatgtgcttgctgaaaatacaaagaagaatttgttccttcaaaatgtggggatacaaaatgttggtcctaggtctagtctgagaaatattgaagcacagttggaagtggagaagagggcaaacagtgaccttaaatctattgttgatgctcaacatgaacaattggatgcattgttaaagcaaatgcaagaaactgaagaaaataggatcagggagcaagaggaagtgaagaagaagcaagctgagatggaaacaaagatgcaacttgtgttgagtcagattcattcaagattgagatagtatttatgtcatgttgacaactttttttgttgttgcaacaactttctttcttttttatggaaccaactataatgttttggatatgatgtggtgttctggttggatagtctttattgtttgggattgtccatgtgaagttctagttggatatttgaatttaaatattgatattttgtcattataattgttatgttatgtgctgattgtgcttttgatgtgagaatgaaattattgaaaattattatgggctgtagttataaatggtcgataaaatttctagattttagccttggcaaaaataattaaactgaataaaataaatgcacaaattaaaatcaa

SEQ ID NO: 26696 - DNA, 3310 bp, Zea Mays
gtccatccagcccacagctggggctctcccacccaccaacccgacccaggactctcccatcgctcatcgcccgtgccctgcggtgttctactcactcccagctgcgacaatccccctcatcgcccgccccccctggtctcgtctctccttcgcgcatctcaccgccatctcactcccgaaccccccttcctttgcttcccgcgtctaatttagcgccagaacatttgaattccccgcaacttccgcttccagcggcttctcgaaccttccggaggcgccgccgatcgaccccggctccatccccttgcccccctagggtttcgcgttcccctcggggatgggggacgccgccaccgccgcagcggcggcggcagcgtcgcccgcttgcgccgcgcggaagcggcggcgcggcgacgacagcgcggggctgaggcgggtggcggagatcgtgatggtcctggccgcggccggggaggtacgcggcgggaggcagcccacggccgcggagcgcgcgctggcggccgaggcgcgggagactctggccaccgccgtcgccgagagggccgtgcggcccaaggatctgttcccgggggaagcggtgcgcgcggtcgtcgaggatctcgggctcaaccgctccaaggacccagctgccatggggtttcgcccgcccaaggcctccatcgccgataggctcatgcttactaagcgcaagatggaagaagtcaaggaagctccagtggttagcgcacctcaaacagtcgtctcaagtggaacgtctgagttccatggtttgaatggggctaccaagtttggtgttggagttcctaggaacccaccagttccatctttagctgctactggcccattaacctctacatccccagttaccttgaagccaccaggatcatctcctgtaaaaccagttgccaactcatcagttgttcctctagtcaatactggtccatcaaaccttaaattggacaaaaatgttagtggtcctctgaatttagcattcagtggagcaacggtcgtccactcaaacaagtcaactttagacacatctgctaggcccgatgtaaatgctgtacagagttccaatcagacggtgaaaaaccatgacacaaaaccagtggcagttcaagccgcgacaggtaaccctgttatgggtcatcgtgctacaccaggcgtggcatttgctccaccaaaacctactttcatcaatcacaatgagatagcaaagaatgttctacaatttcttcaccaacctgcaaaccatcctagctggactccaccatcaactgagtacatgcattctcgtttgtgctgtcaaatatgcaaagttgatatcattggtacagacaatttacttgtttgtgatgcttgcgagaggggagtacacttgaaatgccttcatcagtatggcaataagggcgtccccaaagctgagtggcattgttctgcatgcctgactcagagtaagggaaaacccttgccaccaaaatatggcaaggttacaaggactgtagttgcatcaaagactgctccacctggtggtggagcacagctttctttgcaggaatcagcagaaaacatggctgcaaaggaaaatcaccaaaagttggctgcaaatggaaatcttatgaagccattctccattcatggtggcagcacagtacccgacagtaatgtattggcactgagtgctgtcatggctggttcacaatcacaattagtttctaccttgagaccatcaatagtcgttaaagctgaaacaccctctaatggaaaggaaggaactgggcaaccatgcaatactgcaatacaacctaatgtgcgatcatcttctcttaacaacagattgagaagtgattcctgtttgaaccctgctgattcagcaaatgaaatcatgcatggtaagcatgctgcagaaatttctggtgttgaagcaaaggtcaagtctgaagcaaactctgaggttgttgtgagtacagatgaggaattggttcatagcagtggaacatcaatcgaaactgaacgagccaaggttgtcgctattgaagaaaacagggcacaatcaacctttgagacagataaaatgaaagttggggaaacaactatcaacacaggaacaacagatcaatgcatcaatactgaagaaaagctccccagtttagcaacttctgaggcacacacaatcactgacgtgaagatgactagcaatacaggaataccagtacagcaacacaacattgctactattgaagagaagacccagattgatgcagtgtctgatccacatccacatgcaatccaagatattcaagatatggaaatgggcaccaacaatggaccacccatagatcaaacaagcagtcttgttgaagaaaacccccctggacaatcctcttcaattgctgatgcgtgtgtcactgctaatactggaataccaacagatcaaacacagcatccaaatgagtcaactgaaaatgcagtaaagaaatctcccaacagagaactatataaagaaaaaccgggctgcaacataacctcagatattacccaaaaagtaacttcaaatggcatcatgtgccctgaggacaaaactttatgtgttcatgaagataaagcagtgggttgtgacacagaagcaaaagaagaaaactaatttagtagcaggttgcatccaattttcattttccagatggaactgttctgaatctaccattattttaccaacgtcagtgattgactgtgttctctacattctcttggacagcattatacatttagccattgccaaccatttttccaggaggtatccattgcctcctggtgtagtttagagaatcccagaacacaggaaatataatcgtgatgttgtactttatgtagattgataatcttgagttcctgactattgaattccatttccccctttatttgttccgtgctcatctggaatgctgtaactagatagggtttagctgagttaggactggattatcaagtcataataatgatacgtgccttcgccatcccttcggaccatgttccaatgtgatacaatctactaccatgcaatatatcaccatcagcctgctaacgcacgccactagctttaagtttccaatccttctgtcagtttgtaatgtttgcagctacttcatccgtttcaatttacacttcctatgtccaatctaatggtgtgtttggttgaaatgatgggatgggatgggacgattgtttggttcatggccatcaggtggggcgagttcaggtttccgtaggcaccaacgcgtcctggaggtcg

SEQ ID NO: 26697 - DNA, 2839 bp, Zea Mays
cccctccccctccactccgtcatctcacaacccaaagagaaacagccaaatcacagctcccaccacggcgccgccaccacctccagccccaccgccacggcggccggtgcaaccctttccgtcgcacccattgcgtgcgcagccgccctcctccccaccgctcggctcctgcgcgggcgaatgggttactcatccgccgccgccgccgccttcgccgtccttcccgccccctccccatcgtcctccgacgactccgacgacgccaataccctccctaccaaccccatcgtggagccggaagtagcctccccgcaccaaactccgcctccaaagctgcagcagctggagcgcggctgcaacttggcaatgacgccgctggggcgcgccggggacgtcgaccaggtcgtccacctcttctccgacctcatgctctccacctcaagcgccggcgtcccgcccagcgtgctctgctacaacacgctcctcaacgcgctcgtggaggccggccgcgcggtggaggcccgcagcgtgttcgacggaatgctcgcggcgggcgtggcgcccaacgcgtcgtccttcaacatcctcgtcaagctgtacgcgtggcggaccgccgacttccatcttgcctacgaccagatccacgccatgcggcgccacgggttgctgcccgacgtcggcaccttctccacgctcgtcacggggctgtgccgggcggggaagcttgacgaggcctggggcgtgctcgattggatgctgcaggaagggtgccgccccatggtgcacacgtacacgcccatcgtgcagggctattgtcgtcagggccagatcgaggaggctaccaacctgattggcttcatggaggatgccggttgtcctcccaatgctgtcacttacaatgttctgataagggcgctgtgtgacgatgccaggttcgctgaggtcgagcaggtgttagcagagattgaaactaagggccacgagctcagtacggttacctataatatatacatggatgctcttggcaagaaaggcatggctaaggaagcactcaagcagtttgaggccttgcaatgtaaagggctgcatcccacagcttttactttgagcatcattctaaattgcctttgctgtacctcgaggttttcacaagccatttccatcttggagaggagcacagacttaaatttctgcgctgctgttgttgcttacaacactgtgatgagcagactgtgtgacatgggcagatggccagctgttctggagctcttggcagacatgatcaagaaatgtatcatacccaacacacgcacgctcaacattttcattcatagtctttgcatcgctgataagctttctgtagctatgaaactggtctgtaatcaagggtttcctgcaaatgctgtgacatacaatacactcatccattcgttttacttaagaggagaggcctatgaggcggacaacatgtttgcgtacatgacagaagtagcaaatattgctccagatgaagtcacctataccataatggttgatggattatgcagacaaggaaaatttgataaggctactgatttttttaaggagtctctgaggaataggcttaggctgtcaaaggatcttcttactgcccttctaaacgggcttgctcgcagtgatagaaacacaaacatccttgttgtattccaagaaatcgaaagacagggctttgtccgttgttacttgatatttggtgatacagttagatcaatctgtcaggttggttttcgtcagcacacaaagatgtatggtctgccttttttgctggaaggaatgttgggacctggcaaggaagtttacccagcccataagggccaaggaaagggaaaatgatcgcaagaaagatggcaactgatgaacttcagttcgctctgaggtacaggcaggaatatacaattacactatatttgtcacagtatccagtagtgggagttcagaggcaaaacgatgaagatggaatttgtaatgaggagcaccacctttgggatttttttttgcaaagcacacacatgggaatagccagattgcacagcaggtagctgtattaatctctaatattgcacgctgggattacccaaaagagcggtatgtgtttatgatacagtctgccaatgttctaatttcccatcatgtgtttatggccttgtttcaaaccccgaagtaggtggcgattaaacattttgccatggctctgaagaattatggagagaaaactcagacgagtccttcaaagacaggcaaatcgctaagttgatttaagcaaggcagaaatccatccatattgtttcgttcaccaaagtgtgcttccagctacagttgactatggcagaagattattatagatcctgaacggactgactgctcgaggagtttcagtactggactgcaggtcccacagagggtcaatttttaatataccctgatgaaagctactgaacccaggtccaatccacacgccggatcgggcaccaaatccttccagctgcctggatcagcgcctcaggggagagaggaagaagctgcaatggaaggaaaggtttagcagaattggtatttaggggctgcacacagccaggtatgtgcgttgcagtcgggcaaggctgttatcgtctatgttgttgttctagttgccggcatagaattatactgccacgtgatgatggctcatttggattatatatgcaaaagcaaagtcattatcttccgcctaattaagttgtttctctcccaaatcagaccttccatccaaatatagcaaactcggcttaattgagcagtcaaatattctttgtcctctcca

SEQ ID NO: 26698 - DNA, 1933 bp, Zea Mays
ccaaaccctagttgtgcatggatagcccctcacgccagccgccaatgccccaatcccgtaatcgcagcctcgccccgctcgcatcttcctctccctctcagcactggtgctcaatctacaggttgtcccgctccctacacacccgccctccggtgtgaacctccatgacgtccacaaccactctccgatctgctgtcgtgacctcatccagccgtgctgtggcagtggatcgaagttcgctccagctctgattgggggaaaatgactagggtatcaagtggaaaaacataatggtccaggttctactgcggcacctctttcaggctaagcatctaaacaacaatatgtaaattatccttttccaataaaatacatgcttaaatcgtggctgctaggcgaatggtcctactttggtcatcaaatgcaggttagcttaactttttctaatgcattattatttgtggtttccatcaaatgtacgttagcttatcttttagcaaatttgtagctgatgtcaattaactttttagtggaattttatctgctcattcttatattcaggaattccactactatatgtgccacttgaagttgttatgtcaaaataatatggtgaaaacgagcgtctattgggatctattttttatcttgcaaatgatcttcctgaaggaggtaatatattcttagatgaggtatatatcgtaatacttatagcataaacactcaagccactacaaactgccttcgtccccttcatcactgctaatgaccgtgacttggagacccgacagcggccctcgacgttgtcgccgccgagcccatgctggttccaccagtggtccaccacccggatgtggtccgccaagacgagcagtaacggtggcagcgaggcgaggtggtagatccagcaccgcttctgcacgaccatccattcctccacccagagcatgtacccaggcttgcctctcctcggggaacatgccgaggtcgtccgactggagcagaaggcgacatcgctcaacaagctggtcgaggagcagtgcgagagcataaacgatctcaagtccaagagccatccgattctgggcccagaacactttgccaaacaaaaagttatcgctcttcatccttgataggctacagaagaaggatacatatgctgtattttcgtagcctgttgatcctgaagagagggaagctgaaccttgttcttctgccatcatctagcatgcggcttacctttgtttgtgatgatggttatccagagcaactagctctcttgagcaacgactttgaattttcggaagttatgattgaagaaatatcagctgataattctggacgctctttcctaatcagaatttcagaatctaaagtgttttactactggtgtgctgagaagtcgaaggaagattgaatggaacttcttgcaaaggtcttcaagggagaagcggcttaaaatgtgtgagcaggtattttcggactcgtaccagaaagggaaaagctacaaaggttgacacagcgccgaagctgtgaagcaggaaagcttcggcatgttcgcagaaaagggaaccgacttaaagatgaaaaggccatttagacctcgatagagtgctatagaattatcaccaaatgtaaagggcatgtatgtaattttgtatgggttgtaccccgtgcctataaataggtgaacagtacccccgtactgttcacgttgacttggcatttgcttttgcgtcacacttgtattttcatctccttccaaaccgaaggtacatttataatttgatattgtctctatttctctataatgatataataaagttaaatgaatgatgttatatgattattcgtgctatcttttatgtttcatatgcttcgtctttcattaatgtatactgtgatgatgaaggttcgtccttcatgaccttcg

SEQ ID NO: 26699 - DNA, 1795 bp, Zea Mays
gcacatcctactgacaaaccggtcccactagctgctgatgcgcatccatccggcaactactcacgctcaggtcgccgtcgcgactcgcgccgcctctcggctcgctagccgctacgctatctacgccgccccggcacctcccatgagatgagagccgcagccgcagccacatccacagccgccgcgctcctcgcccccggtctaaagctctgcgcgggcggcgcccgcgcgcgcgtctcctgtccctcccgctcccgcctcccactccaccgcatcgccgccatggcctccgcccccaacccctccttccgcccggaggaggcacgctcccctcccgccctcgagctcccgaccccgccgctctccaagttcaaggtggcgctgtgccagctctcggtgacggcggacaagaatcgcaacatcgcgcacgcgcgcgcggccatcgagaaggcggcctccgagggcgctaagctcgtccttctcccagagatatggaatggtccgtattcaaatgacagctttccagagtacgcggaggacattgaagctggcggagatgcggccccttcattttcaatgatgtcggaggttgctcgcatcttacaagtcactcttgttggtgggtccatagctgaacgttcgggaaacaacttatacaatacatgctgcatctttggttcagatggcaaacttaagggtaaacatagaaagatccatctttttgacattgacattccaggaaagatcactttcaaggaatcgaagactcttactgctgggcagaatcctactgttgtagacacagatgttgggcgaattggtattggtatatgttatgacatccgtttccaggaattagcaatgttgtatgctgcaagaggtgctcatttgttatgctatcctggtgcattcaatatgactactggaccactgcattgggagttgctgcaaagggcaagacaaccagctgtttgttgcaacatgcggcccagctcgagataccagtgcaggatatgttgcttggggacactccactcttgttggaccttttggagaggtgattgcaacaactgagcatgaggaggcaactataatagcagaaattgactactcactgattgagcagaggaggcaatttcttcctctgcaacaccaacgccgtggcgatctctatcagctggttgatgtccagaggctgggttctcattagcacagggacgaagcaggagagcagttgactctgcaggcttgctcgtactacttcgttcatgagatgcatgcccatgcccatcgagagatcgatcaacttgatgtgtgaaggtggagaggacggaataaagcgactatagtttgtaccttcagcgctagtttggcaactctattttacaagagattcttatttttctaaggaaaaattgattaatttttcttaggaaaatagaaatcacttgggaaaatatgattgccagactagccctcagtgtaaatgtctccatgtcaagggcggtattgcccaaggtaggaggacctcggctacgtagatcgtagccttgacccgtggttgccggcagggttatgcccccacgccgagctacccgtcgacaggagaagttctcctggtcgccggtttagagaagagaggaagagacttgataggtaattcttgattgatttccaagtgccaccctacatggctatatatagccggcagcttacacaaatggagaaggttctccttgattgaagatctaatcaaaataggaaggatactaatcagctagctactttctctcct

SEQ ID NO: 26700 - DNA, 1323 bp, Zea Mays
cttctacaggtttgcgcatattcgtaattaactcctcatggtttggaacaagtatctgcattgttcacagcataacatatctaccgtgctttccaaatatgcacttagatctccagctaatgatgctatataagtgttctccgtatcctatggaaacatctttttttttttgcaacattttagccatcttagataccattcaattaggtgagaaactagggggaaaatcatagttgaacttgagtgtggtaataatttcttttttctcggacaaagtttggcttctctcagatcttgtaaactgacatgactcacttcgcaggaagaaatctatgatgaaacagatgagtatgttgatgtacataacaagatcaggataaacatgttgactccaggcaaatcgctgtcacctgctatatctcctggtggtgggcccttatctcaggggtttcgaaggactcctatggcatctccgttctcaccataccaccatggtagttctgtcttgcgttccccggcttcgaaccatggtcagtcacctgggactttaccgacaatactgtcccctggaagatcacctactgcacagacacctgggcaaagttcaccaaacggaagtcaggtttcaataaactccaacggtcaacataaaaaggacggtgagagctaacatcccagaagattggttctcggatgaaggtctcgtctcaagacggcatgcgtgatcaaattatgacattgctagcgtaggattaagctgcgagtataagtagcacagctctcttggcccatagttttgatcgcttgcctgtacatatatgcttcagcatccggacctttagtatgtcctaatcctcgctctgtattgtagaggtcacatcttatatagttataatatatctggtgagggggaaaagagctaagcgttggactgaatatattaaagaaaaaatcaagctgattttgcgacttgtgatcgatcactgttttcatggactcggtggagacgataacaactcagatgcatatcaggtcaagccgatggttgctgtcagttcagcagcatcaatagagaatgatcagagtgttgcagtcacccatcttctaggttcgtagcgttgtatacccggccgtatgcttgcgacccaaggcacgcacgcggcgatgctcgcactcccgctgcctctgcctggcttctagattccagccgtgccccctgcccccacgcagacgcagcgcactcgtccgttggttgtttcgtgagccgaagatccaggcctggcctgccgccctgccgtgtatcgctggcggtgcgtccctgcg

SEQ ID NO: 26701 - DNA, 2157 bp, Zea Mays
ccattctaaaaaaaatccccgatctactacctttctcctcctctctcacggtctcacctctagtttccaggatgacaaaatatgggatcagattcgattcgtgagcctgtagaacaaggatgctcctccaatccatactaaattgaacccacgcagcagacatccgcgcgcagtacgtccccttcgcgaagcaccgccatcctcaccacgccgccgagtcgggcggcgcatgcgccatggcgttcctattcggcgcattcctgggcctggtggtgggcgtggccgtcgtgatggcgttcgcgcgattcgagaacagccgcgccgagcagcgccgtgagctggctgctacagctgcagctttctcgaagttgactgtacaggatttgaggaagctcatcccacccgagttttatccatcatgggtttcattcacacaaaagcagaagcttaaatggctgaatcaagagctgacaaaaatctggccatttgtcaatgaggctgcatcagagttgatcaaaacttctgtggagcctatttttgagcagtacaagtcattcatcctggcctccctccatttctcaaagttgacacttggtactgttgctcctcagtttactggtgtttcaatcttggagagtgatgattctgccatcatcatggaacttgagttgcaatgggatggcaatcccaatatagtacttgacatccaaacaacacttggaatttctcttcctgtacaggtgaaaaatattggattcacaggagtacttcggctcatatttaaaccgctggtgtctgaattcccctgttttggagctgtttgctgttctttaagggagaagagcaaggtggaatttaccctcaaggttattggtggcgaaatgactgctattccaggaatttctgatgcaattgaggggacaatacgtgatactattgaggatacactgacatggccgaatcgcataattgttcccattgtacctggagactatagtgacttggagttgaaacctactggggtattagaagtaaaactggtggaagctagggacctaaagaacaaggatcttgtgggaaagtcggacccttttgcattgatatacatacgtccattgcatgataaaacaaagaaaagcaaaacaattaacaatgatttgaatcccatctggaatgagcactatgaatttgtggttgaggacatatctacgcagcacttgactgtaaaaatttatgatgatgaaggactccaatcatcagagatcattgggtgtgctcgagtagacttagctgatatacagccaggaaaagtgaaggatttatggttagatcttgtgaaggacctggaaattcaacgagacaagaaacctcgtggtcaggttcacctggagctcctctactacccttacgcgaagcatgaaggggttcctaatccttttgctaatcagattcaactaacttcattggagaaggttctcaaaaccgagtctaatggatatgatattaatcagaggaaaaatgttattatgagaggagtcctttcggtgacggtcatatctgcagaggagttgccacctatggacattggtggcaaggctgacccatttgtggtcctgtacttaaagaagggagaaaccaaaaagaagacaagggttgtgacagacacgctaaatccaatatggaaccagacatttgatttcatggtagaagatgcactgcatgatttgctcatggtggaagtatgggaccatgatacatttggaaaggtgaattccaagatacctttgtcttgcaaggtgccaaatcgggaaaactaaacttgcatttcaagtggacgccacagccaatctatcgtgatcgtgacagggatcagtgagacttgtaaacgaaaaaggccgataaacacttatccccaacggtgctatgtatattagtcgttctgtatttacaaaatcccacggttcttatagccacgtgaccaaaaagagatcaacccaccgacctgtattttctcctttgtgatgcaagtcagcaagtgcatggacctgtatatttgagtcgttaatgaataggaaatgctgttactatgctgcaagcacatatatgcttagtggtgccgtggtggtggttgcttctgtgctgctgtttgttcttccg

SEQ ID NO: 26702 - DNA, 3797 bp, Zea Mays
gccagagcccaagatgggggaggaaggagctgaattatgttggtccatagatgccaattcgtcatccgtagctagaccatcatcttgatcatcttgttgctgttgaaaacctaatgaacgttttcttgagtaaactttcagtgctggcatttgaactggtggttttgtcggtcttcaatctcacttcatcatgcatagatgtggaggtgatccccatctcagatggcccagtggggggctggggcgagacatgcatttagggagtcatgatgaggcgagctcagcccccagggaatgacggcggcccagcagttgagttacgctggggcaagcctttctggatcaaaacaccatgcccgcaccttgaaggatgagaaatccctcacactctcagtgtccggatgcaagtcagaaatccagcaagattcatgcaagatgtgctctgccgttgaacggaaccaagcatgctcaggaatacctctaatttcaacatctcagtgtccggatgtgtgaacctcgactaacgtttgaatagaagattaaaatgaggtcctctgagcatctttccatcattgaaaacccttgtagctgaatcttcatcaggtaaaatcaaaaggaaatcttctggtttggtttggtggatcgtcaatgagtccaaatgaaggtaaaaaactcgcaccacttcttccattaccaacataccaggaatcaacggtctagtcccaaccaatgtgacaaacagagctcgtcgaaatgccacctcttctcttgccatagcagtagaagtccaaaacgcatgagtggttcacaggccggctggacgcagcatctccacaacgaacctgcaaatccggggaggggcagcatcaacagaagggtccagggaagcctgtcttgagctagagcaaggctcccctacgcctcttccccgcatggatcgcttcctcttcctcttgaagcgaaaccccccatgattatcatcttcggggttccgcaatgggggtctctccagtaacaacctcctgaggagatatccttcaccacaccgatcctttggaatggggaccggaactagcacccaccggggggagggcttccttcttcatagagagacgctgccacaccgaaactctcccttcccttcttcccagacgctgccacacgtcctccttttgatcttcaaggaaggaaaggcagctggcagcctgagacacttgaaacacctggtggagcgacgacaggctgcagcaagatgggaggagaaacagttgtagcacttccctcagagatccacaggggaccctcaacgaggaaaattcaacactgcgaaacttcctcctacgttcaaccacctgccaaccgtccttgtccagtcgcgacatcgccgggctgctcgaacctgtgaaggtgcgtgggggccaaccttcaccgcacttgaggctcttgcactcgatgccgagggagaggagatgcgggtagaagagatgccacgcagagaactggatgtcaaagcttctttataggaaagaggagctagactggacccgcccgacgaagagacatggccagacttactccacctctgggactttgaacgtccaatgtggagagcctggcagccgaggaggtgggaggctttcctgctcatttatcctgcccttgtttttaggttgatggcatgttgggaaggcgggagaaccctggagaacatgaagccatgcggaagatgaaaaatgagtttatggtgaactgggatggtctgagaacaagggagaaagaacgtgtattagtacttgctgcaactaacaggccatttgatcttgatgaggctgttgttaggcggcttccaaggaggttgatggtgaatttgccagatgcatcaaataggagaaaaattcttagtgtaatactagccaaggaagatttggcagacgacgttgatctagaaactatagctaacctgacagaagggtactcaggcagtgatctcaagaatctgtgtgttactgctgcacaccgtcctattagggagattcttgaaaaggaaaagaaggaattgcaattgagtttcaagtggatttgctcacatgcaggagagagcttcagcagaagcagaaaatagatcattgcctccgtcacacactagcaatgatgtccgtgcattaagaacaagtgatttcatacatgcgcatgaacaggtgtgtgcaagtgttccctcggattccagtaacatgagcgagcttgtgcaatggaatgatctctatggagaaggcggatcaaggaaaaagacaacgctaagctacttcatgtagcttaggttataaatatattgggagaagtgccctggcacaaagcagcaatagttggaggcggtgcagttggaaaaaaaaagctatgctcatctgccagacatccatatcaaagagaattgatggttcaggtggagcggaatagaatggaatggaatagtatacatacacatggttgctgcctctgctctgggccatgcatcatgcatctggacaggacggctatcctggcttgcagttgccctatgcagttttgagtgcaatggtcaccatctgtgaagcacggataccacagagatcctggccccaaccactcttttcacaaatggagctgaggacctttggagttctaccaaaagtgatcttaaatctttgttctttgactttccgttttgtgaacggaaggccccactctgctagtatggattgttgatcctccgtttctctggtactgactgaactgctcatacaaaactcgttcaacaggcagaaatgctgcctggtggccttctagagtgcttctttgacgccgcagagagcacatcaaaaaaaatgtgtttgtttcgaacgatttgtgctgcattccattcacggcgatatcaggtgccgttgtttgtgtttggttccgcaatcaagggagtgaaagccattagcacatccaatcaaacaaatagcgatatctctttcactgtaccagttagcgctggtctcggatgctattaacattgctgttgtctgtctcggaaccaaacaccgcctaactcgtcggctgttaaatatttctgaactgaattactgcacttggttggggtttcatgcttatcaagttggcttatatagccaacaatactttgtgcagttctgcatcctctgcctgcttatgcgcgatctcattggctgagcggtacgaagataaaacggtagctaatccgaagcgatggcttctctttttctttctacggtattttgtctctatgaattacagttacagcagtcagaacagctgatttaaaaccgcagcgaaaaggctgattgccttgcccatttttgggtgggtggaggttaatacagatttctgtaatttttttactttaatattgtttgacatattgtgcaaggcaaatgatttcctaatgatttgttctacttgatattgtaatccatattgacctatatgctatgctcagttccttagagcatctccagtacttgatattgtaatccatattgacctaggggaaaaaaaggagaatttaacctgatgacactggtggactatgctatgctcagttccttggaacatctctagtagttttgtaaaaaaatctctctaaagacagatgtaaggagttgctacataataatagggagtaaaaatatctgtactctcatgtagtctttatttttagttaccaaatattataaattatgcctgctgaaactcctctccctcacgttatagaaagttttatgtttttccaatcaaac

SEQ ID NO: 26703 - DNA, 1356 bp, Zea Mays
gcaagatggccttttgccttagctgacacgccggtgacacgctggactgcctatttgacacaccagacccgaactgagtccctccaccgacccaaaccctagcgcgcacccacctccctccccctttcccggcgtgcggtccggcgttggagatgcgggcgctgctcgcggacggcgggatggcgctggcgatggcgccggaggttaacgagtcgtcgggcggtgctgcgttgtcgcaggggctgttatggtgggcgtcggagtgccacggggtgttgtacagccttgcggtgatgctgccgtcgctggccttcgtgggattcctagcatggcaggcgcggcggagcttccgtaggatcagctacggccgctctcacgtcgtcgtcgtcgcgtactacgcgctcctctgggtcgtcgccgtactcaacctcctctggtgcttcctgcaggcatggcaatgtatgcctgacagggcattttcttggaatgtattgtcactgttcacaaaatcaggaatgttattcttggaagtcagtttgatagcctttctacttcaaggaaatgatgccagtggttttgaatctttggcacgaacctttgttatctctggagctgtagttgcagctgacgcattgctcaagactatatatgtttttggcttcggtgttcctttgttcattgatgctgatcaaggaactggtgggaaatggggcctatggattctccacaaacttgtgcttactggagtttatgggttgattgttttcatgcatcattcaagatggagaaacaggctgcctgcaaaaccagcatactacaactatgtatgtgcgatgttgctattgaatggtgtatcactgtttggatgtttccttgttgcaagtggagctggatttggtttatggttatataatctcacaatcgtatgctatcattcgctttaccttcccctcctatatgtgactttcttagcggactttttccaggaggaagacatgctcctagagagcgtttactattctgaaatgaaggatgctgggttctttgatgctgactgggattaatcggtggctactgcgctctatgaccactccaatgtgaattacgatgtgtttctatctgtgtactctcaacgtagaacagaaaatgtatgtagctaaccgtggtaatgaatggaaatatgtaaatattactggcgcatacttcagatttcaagtgatttcaacactgagattgccaccccaacggttggtgataagttcacgtcagaaagtgctatagcgtgtttggtttgagggtattcccttctcactcctcattttcttatttggtttatagaatgaaatgaattttctt

SEQ ID NO: 26704 - DNA, 748 bp, Zea Mays
accagagaacactcaagtctcccaactgcccgcctgccgaggttggatgtggctccaccagctctgcctccctacttcctctactgctgcggctactgctacatcatctatcgtgcctgtttttctaggaatcttaatggcatcaggctgacattttgttcaactcattaggagcagatgcgacaggatcacaagtaggaggagctgcgacgatgctgtagcgagagacatgggtgccgaggtcgttgtgctgcggtggtggcaggacaggaaggaaacgaaaaagcaggagccagggttgttcaacaacgtgaccgagtcgctgaggcgaggaagagtaaggtgaaggcactcgtcgacgcctttgagactgacagagcgtcatctcgctgcaggaaaccagcaagcctgctgctgctccagctatgaaagtaggtgtcgtgccatgagtgcttcttgacctgcagtgtgcatgatcacctttcttggaattttaaactttttttggttgttagtgaccgtaaaagtggcgcttgttgaggtttgctcgttcccatgtaaactgacttttctcatgggagttttcatacttttgtagtgctagaaaaaggaaagtctgtacaggttttgtgtctatgcaaggcttgagaagttggcattgtactgataagtgataagtaaacaagttattgtaatgatttaaactagattgttttgaaaggaaatggaatgcataaagcaaattaaa

SEQ ID NO: 26705 - DNA, 201 bp, Zea Mays
tgggcctgtttggttcagcttttttctaaccagcttttctgaaaatctggctgtagggagaatctggctgtggagagaatctaagtatcattacgattacatatggaggaagataaagttgttcatagggctcaggatctagaaagtgacagattcctactattacaacgactgaaccgattatgtgtttatgttgatttt

SEQ ID NO: 26706 - DNA, 705 bp, Zea Mays
gtttgctgacatggcaccaatatgctggtggttttgactttacaggtgccattactggcgctttaaccacacccctcgatgtcatgaagacaagattgatgattcagggacaaacaaaccaatatagaggattcattgactgtgctcaaactatcatgcgagaggaaggtgctggcgcattttttaagggtatcgagccaagggtactatggattggcattggcgggtcgatcttctttgctgttctggagaaaacaaaatcggttctagctgagaggaatacccgtaggtgagaggatgaacgaaagctcttggcatcgtgatcatttccctatggcacgaggcggaaatgcgcctggccagattttggagccccagtttcccattctattctgttccgtttgagctacgttgatggagactcatgttgcgtgatattccctctgtttttttattcgtcgctttttagtttaaaaataaactagcagttgacaaatattcgagaacgagataatactagctaagatagttggccttttcaggcattacgatgagcctagagtaaggtaacgtagaaacagcaacaagcaaactagcactacaacgatagtaaggctgtcttctatcttttatttcaaatattacttgtgaactgtataatctataatacaaaataaagttttacgtgactgcgtgatcaaagcc

SEQ ID NO: 26707 - DNA, 127 bp, Zea Mays
ggcggaattggagctggcaatggacggctcagggtcggcgctagctagatggagagggaagggagtccaggagcacgactttatagctggatccgaaatctggggcacgccatggccaggaacgcgc

SEQ ID NO: 26708 - DNA, 2216 bp, Zea Mays
tttgcgttgcctgcttccttcctccctctcgttgccatatactagcttccccggctcgtcgagcctgcggccactaaatgtcctcgaaactgaaccaccacgaactgtctatctgcatccatctcttggccacacccactgaccgcgccacaccacacctgtggctctccgcctcgagatgctttacacggtgtagctggcaagaagccaggaaccttccctgttccctcccgggcgcaaaggggctcacttttaatttcctcgagaggggactgcctcctttctccggcggcaagccttctcctgccttgttgcctgccactcgggctgtcctccttcttgattcttggcaccgtcggtttaatttcgcgaaatggcggcaggggtgtcgctcaagatggccggcttctgcgtcgtctgggcgctattctggctcgccggctccgccaccgtgagcacgagcaccaccgccttcgccggcggcgaggcggtggtcatggacgcgcggtccgtcgtcgccgtcaccgacaacgacttcgtttgcgccacattggactggtggctgccggagaagtaggactacgacacctgcagctgggggctggcctccctgctcaacctgcgttctcccccttgaagctccgcctgggcggctctctgcaagacatgtacgacaccggcgacgctcgccagccctcctgcgccccgttcgcgaagaacgcgtcggccatgttcggtttctcgcaaggctgcctgccgctgcgtagatgggacgagctcaacgccttcttccagagaaccggggcaaagattgttttcgggctgaatgctctgaatggccgggtccccatgcctgatggctctctaggggggccatggaactgaactaccacgaacgcggcttctttcattggctacaccgtgagcagaggatacgatgtacatggatgggagctcggaaacgaactgagcggcagcggagtcggagctcgggtcgacgcagaccagtacgcagcagacgtgatcgcgctgaaacgcatcatcgacagcacctaccaccagagcagcagcccggcaaagcctctggtgctcgcgccaggaggcttcttcgacgcggcctggttcacggagctcgtcggcaagacgaagccggagcagatggacgtgatcactcaccacatctacaatctaggccccggggtcgacgatcatctggtccagaagatccttgacccttcttacctcgacggcgaggccagcacgttcagcgatcttgaggggatactgaggtctgcaggtacgtccaccgtcgcctgggttggcgaggccggaggggcttacaacagcggtcgccaccttccacatgattggttggtgtactaagaagcgtatggcgcgagccagcctcgtcgagcagagaagctcgctctctggatctccacgtatgcaggctgaagcgctctactgtggcaccgcctcatgggcaccaaggtcctctctgcgacgttcaacggcacgaacaagatccgcgcctacgcacactgcgcgaagagatcgggaagggtcctctgctcctgatcaaccttgacggcaacagcacgaaccgcatccacgtcacgagccaaggcgcacaggcacagagtgcgcggagggagagagcggggggacgcctggtcgcttccctttccctgcgcttggcggagcagccgagctgctcgcaacaagagaggagtaccacctcgctcccaaggacggcgatctgcagagccagcaggtgctgctgaacggccatgttctggcaactgacgccgacggggacatcccagagctggagcccgtgcgggtggatggaacgcagccggtaaccgtggtccgtgggcccttactcgatcgtgttcgctcacatccccggcttctacgctcctgcctgtagctagaatttttacaccccagccttttccttcctggtgtgtatcataggttcggataaatccgggcgaacggcgaagcttgttcgcctgtccgtgcgtgaagtaaagctgcgaggctgaaaggtgtgcgatttgtcattgtttgggaaacaagtgttcggataatgtgtgagcaaaggggaggaaagtggagatgaaaataataaaaggaaaaaaaaggtttcgaatttttctctatgtctctgtcgttttggttgagaaagcagaaaaggcgacagttgcctc

SEQ ID NO: 26709 - DNA, 730 bp, Zea Mays
atcgaatcacatatataaattaatctaggctaaaaggatggatgttgtatggggagagactgctggtgttgaaggtcaattgttgctgttgtgccctctcctttttctattgcaggtggtggtctgtgggatcctgctgatttccatggcaattggcaacttcgcaaacacattggatacattgatggccaagtctcggttcaaagcgaagatgaagaaatcaaagggcaaacgggatcttgacacgtgcccctcaccaacaggttcgtcgccgacagattcagcaaccagagcatgaaaaggtcaagagggccagttgcttaccctatgaccattgcccgtgtttaaccagggctggtcaccattgtaaatcattagtgttttctggccatcagcccctaatccttactgtctctgtcagagctcatactcatgtaagcatcaggcaactaggttgctgatggtcctaggctgaaaaaggatactgagaataaacttctggtgtttgtttatacctatatcctgaacatggagtggagtagatgagctttaggactgcaagtcttagcaaaattttcccagtatagttgtgaagctgtgagacatttgtcacaatgcgaagctgtatacaggttgaggcactatattgcttattattctgccctcggtgtatgattgatgaaatggagagtgcagaacagcgctgacactcagttccccatgattgcca

SEQ ID NO: 26710 - DNA, 116 bp, Zea Mays
gtcacatctttactatataacaggagttctatacaaaataattaaataattacatcatatgaggaaacgatctagcaacccaaagttgactgggagacgacggcctagacctctca

SEQ ID NO: 26711 - DNA, 565 bp, Zea Mays
tagcgcgcggactccgtcagcttaaccccgtcaatcgcagctccgagcatggcgagccacgtctcggattcttcgccacgcgtagaccacctctacctagctacaaaggcgggccgaattctcccgcacctcctcttctctagccatccgtgagccacagtcaaccaggggcgcgagattaagttgtgaccaagtaaagagagtcactgccgtaggcaatcctgcttgcttctcgccgtcgcatccttgggggtcgtgcccaggggtttcgctgggtctcgtggatgcgttccatggcctcgccggcgggaatcgtcgtgcagtgaggggggaattgctcaccgtcgtgctacaaccgctgcggatccgcgggtcgtgtggacggcatcagctgcgccatcgaggagaagagcatgtggttcaagaggagccacacaacgaggagtttgatctgatctaggtggcgtctccgagttgactttcttgcgctaaggatggattttaattcgatctatatttatattttattttgtaagacttccgctatgtaataagtactctgatt

SEQ ID NO: 26712 - DNA, 934 bp, Zea Mays
ctttttgcttcccaatttatcctgcttgtagctccgataaaacatgttcatggtatcattatgtattcgttgcaaaccatacatcgatgatagatttcattattctggagcaaatgacagcatttgctgtcatcatgcagaagcatcctggatgggttggatttattcagaagactatcttggaaagtgtcggttgcatctggtttaatcgtaatgatctccgggaccgtgaagttacggcacggaagttacgtgatcatgttcaacaaccagacaacaatcctctgttgatttttccggaaggaacttgtgtgaacaaccagtacacggtcatgttcaagaagggtgcctttgagcttggctgcgctgtatgtccaatagctatcaagtacaataaaatatttgttgatgccttttggaacagtaagaagcaatcttttacaatgcacttggtccggctgatgacatcatgggctgttgtgtgtgatgtttggtacttacctcctcaatatctgagggagggagagacggcaattgcatttgctgagagagtaagggacatgatagctgctagagctggactaaagaaggttccttgggatggctatctgaaacacaaccgtcctagtcccaaacacactgaagagaaacaacgcatatttgccgaatctgtcttgatgagactggaggagaaatgaagggacgtaaagccgtacaagtgcacttcgttagggttttacatgcagctaccttgtaattcggttggcttccagaaaaaaaaaagtcagtgattaacaccgaagcattgtgctctcgtgagatgctgtgttggtcttaatatattgacggtactgtaccatggtttaaatgtgattattgaagcaatgtgaatggattagctggctaagaaaggaagtaaattgaattgtttgaa

SEQ ID NO: 26713 - DNA, 1469 bp, Zea Mays
cacccccacccgatcccgatctcaccgtctccaccccgaccccctcccaccagtctccaacagaccaacagcatctaatcaatcaagacagccccgtgctagctcacccgccggggctcgccacgatgagaggcctcctcgcgtgcgccaccctcgcccgccgcgccgccgcctcctccgcgcccgcgcgcgtccgccacctggcgggcgccgcggaggcggcggaggccgagctcaagaggacggcgctctacgacttccacgtcgcccacggcggcaagatggtgccgttcgccggctggagcatgcccatccagtacagggactccatcatggactccaccgtcaactgccgcgccaacggcagcctcttcgacgtcgcccacatgtgcggcctcagcctcaagggccgcggggccatccccttcctcgagtccctcgtcgtcgccgacgtcgccgcgctcagggacggcaccggcaccctcaccgtcttcaccaacgagcagggcggcgccatcgacgactccgtcatcgccaaggtcaccgaccaccacatctacctcgtcgtcaacgccggatgcagggacaaggacctcgcccacatcgaggcgcacatggaggccttcaacaagaagggcggggacgtcaagtggcacatccacgacgaccgatcgctgctcgcattgcagggtcctcttgctgcacctactctgcagttgctgacgaaagaagatttgagcaaaatgtacttcagtgacttcaagatgattgacatcaatggatatgcatgctttctgacgagaactggctacaccggcgaagatggttttgagatctctgttccgtcagagaatgcagtggatcttgcagaggccatcctagagagatcggaaggcaaggtgcggctgaccggcttgggcgcccgtgacagtctccgactggaggcaggcctgtgcctgtacggcaacgacatggagcagcacatcacgccggtggaagccggcctctcatgggcgatcggcaagaggaggagggcagagggcggtttcctgggcgcagacgtgatcctgaagcagctccaggaagggccaaagatcaggcgcgtgggcatggtcacgcaggggccgcccgcgcggagccacagcgagctggtgagcggctcgggggagaggatcggcgaggtgaccagcggagggttcagcccgtgcctgaagaagaacatcgctatgggctacgtgaagtcgggaatgcacaaggctgggacggagttgaaggtggtcgttcgcgggaagtcctacgacgccgtggtcaccaagatgccgttcgtgcccaccaagtactacaagccctcgtagattatattcttgtacagagggacgccttgcgtttctcttttgtcgttgcggcttgttcttggcagattggttaagcattgcaactgtaacttctgtgagattaaaaaaaaaaaa

SEQ ID NO: 26714 - DNA, 1517 bp, Zea Mays
agtggcgaagttggagctgctttcgttgtggggaaattgacccttgcaagagtattagtgatgaagatattcgcacgaccatccagaattctgggggtccaaaaggggctatgtttctgcccgaggtaccatttgagattcttgtgcggaagcagataggtcgcctacttgacccaagtcttcagtgtgcccagtttatctatgatgaattaatcaaaccacagtgcttaatcagcgaacttcagaaatttccagctcttaaaaagcggttgagtgaagtcgtttgcagtttcttgagagatggtcttcgacctgcagaaacaatgataacccatatcatcgaaatggagatggattatataaatacttcgcacccaagctttgttggaggcaccaaggttgttgaacttgcaaagcatgaagttctacctcccaaaacatcagcttcactatcaggtcgtaaggatggtactattgttggttctgagatacaattagcagccgaaagaagccaaaagtcacgtgctgttttcgcaagagatgcaatcagaagagtaacatctgaacaggcttctgtggaagcagaaacaagtctgactggtggtaatcagataggtaattcacaggttggtgagagttcaagcaaattaccctcaatcattcctctaaaagagccacccattaccttgaagccatcagaaactgagcaggatgcaacagaggtagccgttgtaaaactattgatcaaatcctactatgacattgtaagaaaaaacattgaggatgcaatcccaaaagctgtaatgcactttctggtgaaccatacaaagcgggatctgcacaacttcctaattcgcaaactatatagagagaacctgctcaatgaattgatgagggaaactgatgaagtacttatgagaaggcagcgtatccaagaaatgcttgaaattcttgaacaggcacataggacacttgaggaattcccctttgaagttgataagcttgagaagggctacaaccttactgaacatgcaactggcctgtcaaaaatccatggagtcagcggggacagcacaaatgtcatttacacatcctcccctaattgctactctccacatcgagcgtctcatatggtcctatagagcagcatgtaccagtcaccaatggagcttacctttccgcaacagtggtatgtacctgttgccaatggagcttgcctttccacaccagtgttacgcgttaccgatggagcttgcctttccgcagcagtgtatggtagtcaccaaatgacctttgatcccaattcttgaggtttttaagcaatgagcttgagagttacctgtaaattctagttttgctagggagcaaactgctttctagtagaaagctatttgctggtagagaactttaattgtgtattcttgaaattgtcacagccgacatcaatgcggtagtgaatatgggcaacaaggtagttgtatagggctatatccaacataccaatttgccctagttat

SEQ ID NO: 26715 - DNA, 1598 bp, Zea Mays
tctcgccccacctggcatcgatgcccgcatcccgtcatcctcaccaacctcgcggccacccacctactcgccaacgcaatccacgccccacctgacattcgaaggccacgccccgccatcctagcccctgagcccgcaatccccttccattggtggcatcacccatgcgttgcgtccccgccgtcgtcctcgccccattacgagtggaaggaggacgtccacatgaccacaccaggcaaggccatgcccctgcccgacgccaccccccagaccccccctctagaagcctagcgatggcaccgtctatccgtgcgagatctccgtgcttgaggtatctctgtgtcgagggaaagcgagtgctcctctcctagcctaacctcctctgaattcatgtcccaaccttctcttatttgtgtgtttatctcgtctacctgggttgatgttgtttgattccttctcctttttgtttgggaggtcgccaaattccatcccatctctcagcgtcgtggtctccccgatatggatgggggaaggtaatttgttttttctttgttaagaattgctagactctatcctccggcctctggcctcttggaaaatctaaaaacgatgtatttaattatgcattttcgtttgctttgctaaactctgtacctctacgagcttttccatggtaggatagcttgtgagagctactcgatgagctgacctgaaccattatgattgctggaatgaagctgcgctgctggtttccctccttttatttagtttttcatctccataattgttctttttgtaaaaaaatggttcttcttctatacaaccttggatttttttgcatttgtttttaggtttgcactggtgccgttggcaatatttgtcttcctagcctataaatactagaaaacaaggataacaatagatgcattcgagaagttcctgtgaatgtagcaaatgcttgttctgatgagatatgcatacacaaacatcattgctttcattggccatttcagagacaagctcgaacaaggaggctacgggcattgctttatgtttgtgacgctaaaggatctctatccatcattgtttccatattatcatggtattattgccttcaatattattctctatatcaactacagctaccgtggaggagttgatagtgaagatgcccttaataaccatgcagttcctgagcctgctcagtcatccctgttctctcttgacatacatgaatatcctaatcttaccgttgttcttgttctgtcctggcaaaaatacttgatgcatttgtttatgttttgtaatgggacatcactgctcaagtatccaaaagcttgggaaattgcacatgcactgcacgcgtggcggagcctcttcgagtttccatgcagcacgattcgttttccaacgcgttgccgctgcatgaaacgcaatgaaggcaagccgtcgcctggctacctccacccgctgcaggctacaaacatccgtgacaccgaactcttcggcgtccacgtctatggcaccgacctcgacgtcgagatccttaacgccaagattgctgccacgtgagcgttatcttagcacgtgaatccgag

SEQ ID NO: 26716 - DNA, 1281 bp, Zea Mays
tgtggacccctctcccactcccctccggccctcccctcccacctcacatcccttcttgcttctcgcctccccacccttcatccacccgccgctcctcaagccccaagctccggcgatatgtcacgcttcggtcgatccggtccgccgccgccgatccgcgacacatattcactcctcgtcctcaacatcaccttccgcacgactgctgatgacctcttcccgctcttcgacaagtacggcgagattgtcgacatctacatcccaagggaccgcaggactggcgactcgcgcggattcgcgttcgtgaggtacaagtacgaggacgaggcacagaaggcagttgataggctcgatgggagattggtagacgggagggagatcatggtgcagtttgccaagtacggtccaaatgctgaacggattaataaagggagaataatggagccagttccaaggcccaggggccgttccagaagccgcagtccaagacggaggtaccgtgatgattatcgagatgactaccaggatagagattatagaaggcgaagccgtagccagagtagagatagatacgcccgtgacaggtacagagatagggattaccgccatcgtagcctgagtcgcagtttgtctcctgcacgaagaagccctagtcatagccgcagccgcagttacactcctgatgattacaagaggcgtggcaaagacagcgcatcacctgcaagtaggagccctagtcgctcccctcctcgcaagacgccaccttctcctaagagatctcctgtcaggcacaatgatgaccggtctccacgctcacggagcccttcaacataagcacaattcacttgcaaagcatcttgaacagctcaggatgaatggacttgctctgatcctatgtgtgtgtggctatgcttgtgctcaatgttacatggagtgaagatatgctggctgatatgcggtcaacatgcacgtagcttactgttgaagttgatataatctgtgctgtttgcgttgttgatgatgatggctgatgagatgatggaactgcagctgactgcacaatttgctgctgtctgcacctattatgctgacaatgagcaactcatggtcaaccatattattggtggtggagaaataaagaccacaaataacagatctatttgtcggttgggaaactggaagaaatcatgcgatatgccttcactctggttggacccatcaaagcacaacacccaatgattaccatcgagagctagatcagaaataacctaggcaagccct

SEQ ID NO: 26717 - DNA, 2290 bp, Zea Mays
aaaagtaccctcgatctccaaccggttcaccactcaccactcaacagccctcccctctcatcatctcctccccccgcacctgcacagcctctcccgccgcgcgccgcctccgcgcgccatccagacgccagtgcgcgtcgcggtccgctgcccgcggtgcgttcaccctctccccatctcccttttcctctcccgcgcgcccttccctacgcgcctccgccggcgacgagtgcccaccagctggtgttacacacgtgtaacaatacattacatggcgctagtacagttcaatggtgccttgcttccccaactcggtgaaaaacctcggccgctatcctcgccgcctgcagttgcaagggctacctatgccgatgcaaggttcctggcaccgaaaaccagttcaagaggtagaggtaaacacctgctatcacctagttatagtttgcattcacagacctcttctgaacaaataaaccatgtaccgtcgtcaagatctcgccagaaaaggggctcaagttttgtcgtcagagctgaagctgatttctataacgtacttggtgtctcaagaaatgctagtaaatctgaaatcaagagcgagatcctggtgctgaacaaaagttcaaggaaatcagcaatgcttatgaggttttgtctgatgatgagaagcgatcaatctatgataaatatggagaagcaggtctgaaaggtgctggcatgggcacaggagattactcaaacccgtttgatctattcgagtccctgtttgaaggattcggtgggatgggtggaatgggtggcggtcgtgctgcccgtaacagaccaatgcaaggtgatgatgagagctacaatctggtactcaatttcaaggatgcggtgtttggtgtggagaaagagattgagataaccagattggaaggctgtaacacctgcgatggaagtggtgctaagccaggtacaaaggcaacgacatgtaaaacttgtggaggccagggccaggtggtctcctccacaagaacaccactcggaatattccagcaagtctccacctgcaatacctgtggtggcaccggcgaattctccacgccttgcaacacctgttcgggcgatggccgagtgcgaaggacaaagaggatcagtctaaaggttcctgccggagtggattctggaagcaggctgagggttcggtctgagggtaatgctggccggagaggaggccctcctggggacctttatgtcttcattgacgttctctctgatcctgttcttaagcgagatgggacaaacattctctacacgtgcaaggtttcttacatcgacgcaatccttgggacaaccgtcaaagtccccactgtcgatggaatggttgacctcaagataccttcagggactcagccaggcacaactctggtgatggccaagaaaggtgttccgcttcttgggaagtcgaatgctcgcggagaccagcttgtgcgcgtacaggttgagatcccgaaacggctgagcagcgacgagaagaagctagttgaggagcttgcaaacctgaacaaggctcagacagccaatagcaggagttgatttattgagcaaatctttttaggacaccatgcttgtggtcacaggcaattttgatgcaaattgcagtgatgaaaagagttggtagtggttcaacacttctacgaactaaagaggtacactggagcgaagcgtgtcatgctcatgccatatctgtggcctcgtttctaagctattggaaaccaagtcggtgaccactggacgtcttgcaatagcttaacatatacgactttattagccattttttgttacacggctttttgtattcttgagagccttaggcaaaatctctggtagtggaatcaggcttagacttttacatttcttgcagaaatgctgcaccattgatggaatatgtaagctgcaccatggaaatgtgactgcagttttatggtttgtgatgcgtcgggggtttattgttttgctcttcaagttcgttatctaaacaatacatttatttgcccctggcaggggcagctgttgatttgaagctgcctctgcgcagagcaggtgcatttttgtggtctaggcagctgttgacatgaagctggttgttctgtgtttgcaactacttgggactctaatttaattttgttcctgtatgatgtttttaataaaatcgcaaatgctttttttctgcatgcacatgcgtaaaggcatccgcatgcacagtaggcattacaaatccggttggaaaggacgaaaatttgtccaaaaa

SEQ ID NO: 26718 - DNA, 1336 bp, Zea Mays
tcctctgatcggggcttcggcttctggcgatctgaggtctgaccatggccgcgccggggtcagcgatcaagcacaccttttcttctctcctgaagcaaaaaccaccaaagactagtcctacaaaatctaggggttctatggctgtttcaatgagggaggtggatcctgtttttcaaggtgcaggtcaaaaagatggattggaaatatggcggattgaaaagttacaggctgttcctgttcccaaggaatcatatgggaaatttttcacaggagattcctacatagtactgaagacaactgcccttaagaatggttcttttcgtcatgatatccattattggcttggcaaagataccagtcaggatgaagctggtacagctgcaattaagactgtggaactcgatgctgcccttggtggaagagctgtccaataccgtgaaatacagggaaatgagactgagaaatttctttcatactttaagccgtgtattataccagaggaaggtggtgttgcatctggtttcaggcatactgaagtaaatgagcgggagcataaaacacgattatttgtctgcagaggaaagcatactgttcatgttaaagaggttccttttgcacgagcatcactcaaccatgatgacatatttattttagatacaaaatctaagatattccaattcaatggatcaaattcaagtattcaggagagggctaaagcacttgaggttgtgcaacatcttaaagatacaaaccatgaaggaaaatgtgaagttgcggcagttgaggatggaaagttgatggcagatgctgatgctggtgaattctggggtctctttggcggatttgctcctttaccaagaaagacattttctgaactcaacgggaaagattctacttccacttcaaaattgctttgtgtaaacaagggccaatttgcccctattgattgcgaaattctaaaaagggagctattagattcaacaaaatgttacctactagactgtggttctgaaatttatgtctggatgggtagagaaacaactcttgaagaaaggaaacgaggcggctcagctgctgaggaattactacgtgaaggaaaccggcaaaaatctcatattattcggctcatggaaggatttgagactgtcacattcaaatcaaagtttgataaatggcccaagaaagctgatgcagttgtgtcggatgaaagcagaggaaaagtggcagctcttcttaagcgacaaggatttaatttcaaggatccagcaaaagctgctcctgtaaagcaagagcctcaacctcagattgattgcactggcaacttacaggtagccga

SEQ ID NO: 26719 - DNA, 5471 bp, Zea Mays
accacagcctccgctcaacggcaggagaatcacggcgagcgcgtgctcgtgggcacccctctccatcaactggggtgcgcgatcgatcgatcaaaaccccaatccagccttctatttccgatcgagacgcaaacgaagcaggtagaaggccaaggccagcgcagacacggatggcgatgggagcgacggttcgcgcagcggctgcagatgccatggtgacgttcttgtgggtgttgtgcgcctccgcgctcgatgtctccatagcagccgtcacgtcgtaccaggggttgcaggagggcaccggccactatgcgctcctcgtcaccacgtccctcctctcggtgctcctcttcaccttcgacctcctctacggtgtgctcggtggtgccagcttcaacttcactgactttgccacctcctattccgccggactcgatagcccctccctcttctctgttgcgctccacttcctggcacggactgtcgtggtggtgaagaggaccactttgcgcgtggctcggaaggatgcctatatggcagagttagatttgtttgctaaaggattgcatgaaaggctggttcctttcctgggtcactgtcttgataaagaagaagaaaaggttcatgtgtataggtttgtccaaaatggtgacttgtcaagtgcactacacaaaaagtcaagggaggaagatgaaggcttgcaatctttggactggataaagaggttgaagattgcaacgggggtagctgaggctctttgctatctgcatcatgaatgttctccaccgatggttcatagggatgtgcaagccagcagcatccttcttgatgataaatttgatgtacgccttggtagcttgagcgagcttcctgcaattgaatcagtcttgaatgctatgaagagcaatacaaatcagcgagtatctccaatatttgctcttgtcctatgccctacaagagagcttgctattcagcttacagctgaagcaaatgtcttgttaaagtaccatgaaggaattggtgttcaatctcttattggtggcactagattcaagcttgatcagagacgattagaatctgatccatgccagccagatcatctattagatgaaaccaaccgtgctggaagcaagattagggtggaaagggctgagcgaagctcctacacgtttcaatcacagttagatggcggtgcacagttctgtgtatcacaagaggcatctaggttgacctcgctcttcttagtgttcatgcccactgcgcaagacaacaccacaacgccgatggagttggaagatttcatcaggctcgactcgatctggatgagatggactctgctcgctgaggaccgaacaccgaagccaggcagccagccgaggaagccaggcgacaggcgacgccaagtcgagaacaccctaggtggtcgctcgcaggctgcgagtgagagccgtggcggagtcgccgtccttgcccacggaggaggacacagccgccggcgcagtgggatggcgacgccgacgcccatgcccggaagcgaggggacgctcgtggcggtgatgccgcggtccccgtccccgacgccggcggaggcggggacctcggcgaccgagacgcccgtgctaatattcctttacttccacaaggcgatccgcgcggagctcgaggcgctgcacggcgccgccgtgctcctggccaccgagcgcaccggcgatgtcgcggcgctcgccgagcgctgccgctttttcttcagcatctacaaacaccactgcgatgccgaggacgcggtcatctttccagcacttgacatccgagtaaagaatgttgcagggacctattccttagagcataaaggagaaagcgatctttttagccagttatttgatctcctggaattggacatacagaatgatgatgctcttcgtagggagcttgcgtcatgtacaggcttttctttccttcctctccctgcttctgttctgctgtttatcaggctggtctttccattgctgacaaagaaattttcatgtgaagaacaagctgatttagtgtggcaattcctctgcaacattcctgtcaatatggtagcagagttccttccatggctttcaacttctgtcacatctgatgagcaccaagacatccgtgactgcttatgtaaagtagttcctgatgagaaacttctccaacaggttgtattcacatggatggaggggaaagcagcaagagaagtggcagagagctttgccactggtaatttagtaagaaatcatagtgctgaggatgtctcagaccatggggagatttatgtttgttcacagcaagaatctaaacttgggagtaaaaactgtgcagaatctaatggttctcaagccgacaggcatcctatagatgatattttatactggcacaacgctatccgcatggagttacatgatataaaaaaagaaacaagaagggtgcaacagtctgggaatttttctgatatatcagccttcaatgagaggcttcagttcattgcagatgtatgcatctaccacagtatcgctgaggatcaggttgtttttcctgcagtcgatagtgagctgtcctttgtgcaggagcatgctgaagaagaacacaggtttaacaatttcaggtgtttaattcagcaattccaaatagcaggagccaaatcaactgcactggacttctactcaaaactgtgttcacatgctgataaaatattggagacaatcgaaaaacacttcagcaatgaagaaaccaaggtgcttcctcaagctaggatgtttttctctcctgaaaagcaaagggaactttcgtacaaaagtctgtgtgttatgccattgaaattattggaacgtgttttaccatggttggtgtcaaagctgagtgatgagcaggcaacttcatttcttcagaatatacgattggcagcatcaccatctgaaactgcactggtcactcttatctctggttgggcatgcaaaggccgggacaaatccaaatctggagaatatttatgcttaacatcaggtacagcaagatgcctgtcagatgatgtagatgatcagggaaaatgccgatcattctgcccatgtgcttcacacaacagctcagatctttctctgcagctacaaactgaaaatggttctaggccaggcaagcgaggaaaagatgcagtatcttttcctggtactaatggaagctactgctctcaaactgctgacattgatgcaagtccatgtagcaaaaagccttgttgtattcctgggttgagagtaaagagtagcaaccttggtattggttccctggcttctgtgaagtcctttcgctctttaccatacaattctactgctccttcaatatattcgagcctcttctcatgggagacagatgcatcattgtcttgttcggatggcatttcaaggccaattgatacaatattcaaatttcataaggcaattcgcaaggatttagagtacttagatgttgaatctggaaggctcattgatggtgatgagtcttgccttcgccaattcattggaaggttccgtttgttatggggtctttacagggctcacagcaatgctgaggatgaaattgtgttcccagcattggaatccagagaaacattgcacaatgtgagccattcatatactcttgaccacaagcaggaagaacaattattcgaagatatctctgatgttctctttcagctttcacaactacatgatagccagggccatgcccagactaaagttaatgaagtaaagcaaagctgtttccattcatctaatgacgttgattttactaggaagtataatgagcttgccacaaaacttcaggccatgtgcaagtctatccgggtcgccttgactaatcatgtccatagagaagaacttgaattgtggccgttgtttgacaaacatttttctgtggaggagcaagataaacttgtaggtcgtataattggttcaacaggtgctgaggttctccaatctatggtaccctgggttacatcagctctcactcaagaggagcagaacaaaatgcttgatacctggaagcaagcaacaaaaaatacaatgtttggggaatggctaaacgagtggtggaagggagctggaacatctgattcttcagcagaggcaccctctgctccagaagatagtcatttacaagataagcttgaacaaaatgaccagatgtttaagcctggctggaaggacatatttcgaatgaaccagagtgaacttgaggctgaggtgcgaaaggtttcacgagatcctacacttgacccaaggcggaaggcctatctaattcaaaatctcatgacaagccgctggatagctgctcagcaaaagttaccggaaccaaattctgaagaatgtagtgatgatgctagtatacctggatgtgcgccttcatatcgagaccaggagaaagaaatttatggttgtgaacattacaaacggaactgcaaacttgttgctgcatgctgcaacaagctgttcacatgcagattttgccatgataaagttagtgaccatacaatggaaaggaaagcaacacaggaaatgatgtgcatggtgtgcctaaagattcaacccgttggtccgttctgccaaaccccatcttgtaacagactatcgatggcaaagtactactgcaacatctgcaaatttttcgatgacgaaaggactgtgtaccactgcccgttttgtaatttgtgtcgtcttgggaaaggtcttggtgttgatttctttcattgcatgaaatgcaactgctgtcttggaatgaaattaactgagcacaaatgtcgggaaaaagggctagagacaaattgtccaatatgctgtgacttcctgtttacatcaagtgccgcagtcagagccctcccttgcggccacttcatgcattcagcttgctttcaggcatacacttgtagccactacacttgtcctatctgctgcaaatctctgggagatatggcggtgtattttggcatgcttgatgccttgttggctgctgaagagcttccggaggaataccgtgataggtgtcaggatatactgtgcaatgactgtgagaggaaaggcagatgtcgatttcactggctataccacaaatgcggctcctgtgggtcgtacaatacccgagttatcaagactgacactgcagattgctccacaccaaattagctggagggaacatttgtgcttatttgtagcctttttttttctcttatgtaaatatcttctagcgggaaggaaaaaagagatgtcctgtaggatagttaacataatttcattcgtagcgatatcagttttgtaagtgtagcagtttacaatttactaggtctagtgcgttgtactgccaaaatggacggttctgctggacaaaggacataatccgagaaaataggctagttagaacaattgctcgcgtgcatgttctacatatttcgcggt

SEQ ID NO: 26720 - DNA, 4257 bp, Zea Mays
gaagattgtgcctatatcgattgttctagttttgaggcaaataacatcccacggtctatccgttacctatccatttccatgcaagatcattgtgctcagaatttcgaggaacaaatgggaaaactgaaagaaaagatatacattaacaatttgcggagtttgatgatatttggaaaatacattatgttacatctgctcaatattttaagggacacatttaaggaaataagacgtcttcgtgttctatctatattcatatactcccatagttccttgccaaacaacttttcagagcttcttcatctccgctacttaaaacttttgtcaccttattactcagaaatgtcattgccaaacacggtctcaaggttttatcacctgaaatttctagatcttgaacaatggggaagtgatcgttctttgcctaaggacattagccgccttgaaaatctatgccattttgttgtttcggaaaagattgattccaatgttcctgaggtggggaaaatgatcttcttacaagaattgaaagaattccatgttaataaagagagtgttggatttgagctacaagaattgggtaaactagatgagcttggagggaagctcaatatatacgggcttgaaaatgtgagaaccaagaaagaagctaaagaggccaagctgatgtcaaagaggaatttagttgagttgggattaatttggaacatgaaacaagagtccaccgaagatgatatcctagatagtatccaaccacactctaatgttaggagtctttttattgtaaatcatggtggtaccctcggtcctagttggttgtgcagcagcgacaccatatacatgaaaaacttggagactctacatctagagagcgtatcgtgggctaaccttccacctattgggcagttctatcacttaagagagctaaggctgagtaaaattgttggcatatcacagattggacctggcttcttcgatagcacgacagaaaaaagtgtctcacacttgaaggcagttgagtttaatgatatgccagagcttgtcgagtgggttgggggagctaactggaatctgttctcaggaattgaaagaatcaagtgtactaattgtcctaggctgacagggttgctggtttcagattggtctatttcttctatataagacagcactgtatggttccctaatcttcatgacctttacatttatgaatgcccgaagttgtgccttccacccttgcctcacacttcaaaggtatcccgtattcatatgggagacttttcttatgaaggtcgtaccatgttgaaaattaataacccctctagatttgccttcgaaaatctgggtgacctagagacattggtagcttgggatgcactacccttgtcctttatggatcttaaaaagctacattccttgagacgtataaatgtcactagatgtgaggaaacatttttgagaggactggatgatggtgttgtgctacccacagtccaatctctctaccttggacgatttacacctaccaaaaattatttgtcaaaattattcaaatgttttccagcactttcttctttgcatgtgatggcatcaccatcagatgaggacaacgaggaagtggtactgcattttccaccctctagctcgctgagagatgtcaacttcacagggtgtaagaatctgatcctacccatggaggaaggagctggattctgtggcctctcgtcgctcgagtcagtgaccatacacaaatgtgacaggttattctctcgatggtccatcggaggacgagcaactcagactcagagcatcatcaaccctctcccaccctacctgaggaaactcttcctttcttatatggaaactctgcctcaggaagctctgctcatgaatttgacatctcttgagaaactcacactatgtaattgtcttggctgtgagcaaagcaccgagcgaatggctgtactcgcgaatctaacatctcttaccacgctatatttatataattgcagaaatatcacaatggatggattcaatcctcacatcacatccagcctcaagtatctatgcgtgtacaatgagagaaatgatggaactgatccgtattctgtagcagcagatctacttgtagcggtggtgaggaccaaaacaatgcccgacgtttccttcaaactggtgggactttatgtggacaacatctcgggagtgcttgttgctcccatctgcaagctgctctccgctaccctcgagacgttaaacttcagtaatgattggcggacagagaacttcacgaaagagcaggacgaggcgcttcagctcctcacgtctctccaattccttgagttttataactgcagggctctgcagtccctcccccaaggactgcaccgccttccttctctccacggaataactatctatgggcctcaaaacattagatcactgcctaaggagggcctccccgattcactacgaatactacgtataactaactgttgtgctgagatttatgaggcatgccagcaattgaagggaacaaggccagatataaatgtacttgcctccaaagctcgtgtgcaaaattgaatacctgcttctgcatgtcttcacagtcagctctgcttcaacatgcctttcactctacaggtaaatactgtgaaaacatcttcctatacgtgagatagttgatcttcatcgattctacagccaggatgatgtcttattggatgatgtgttggtcatggttggcacaaaattcagtagactatgcttcatcgtaatgttgcacagcgttcaaggcaataaacgagaacaagcatgggatgtggaaaattttagaaagtaaagacaagtgaattcttgacgacgttggcttggcaccttagtttgagtacataatgaaagaacaaccttttagcaaccctggagcatctagaaaatatcagatttgcatcctactggagacattgctggcagaggaattgagactggcataggagaactcaatatatgcttgtgaataacgcatccagtgaaagatagtagattttcatcaattcactacccaggatgttgtcgcattggatgagaatgacatggaagacggcgaactagaggaagacaacaacctcatctaagctgaaaatgtgttgcctgtggttgaagaaaatctagcagatgaacaacactgccttccctgtcctctctagacctgaatctctctgatggtttggattcgtccatgattgatcctgtacgatgaaggatcagctcgtccaacgtttttcaaggaacgaactcaatctgaggaattaccttttcattggtcacctggggtactacgaggaatgacttcacgatagacgactcggttttgcgacgcaaaccaaacgccatggttaggctcagatgttggatcagatgattcctcgtggcttcgtgacgcaaaccaaacgacatggctaggctcagatgttggatcgtatgatttctcgtggcttcgtgacgcaaaccaaacagcctgtaagtccgcacaccttatctatcatggtcattgttgagctgatcagtaattggagtcgtgtgataagcttaatggacctcctatttgtcgtgatcttcacagatcaacaagtgagcggcctttgcatgctgcatgagatcaagcaagccgccgactggcaatgctccacctgccattcagttcgttggtgaggtattaatcaccagccatgttggcacttggcggcatgcagatggagcagaacatccaggtgaagcggacagatacatgatcgatcatgagttggcgcagacacaggccagacaaccagaggctatattccaattcatacattccatgataagcaaaggaagatccaagacaacacaaatatacaaatagttagttatacaagcaaaaatcctgttgttttgtgcctcccattttctagtccagaattaatatgacaatttttcactgaaactggttggatcagagaccaggaaaaaaagggaaatgacaactacagctgtgttttttttttcaaagaaggcagctgcccgtcgatgatgtgctcacttgaggatttcctctgccttttcagtgacactgcttcatccttttcagagtcaaatgaatctctacctcatttcactgcacatacttccaaactgatttgctgtaacatacttgagtttcggtatgacattaatttttaactcataagagaacaaaatcagaagaaaaaaaaacaacaa

SEQ ID NO: 26721 - DNA, 606 bp, Zea Mays
tctaggtgtttcgtcaatggtagagacaacataaaatccgactgtgagtctcacctcagtgtggtacccgccggtgagatgtccacggcggcggcgaagcgatggcggagttgtgtgcccggcgacgaattctgaccgcccaagtggtcgatccttccctcctcggccacgcatgaaaaccagacaacccagtgaagcacccaggccctcagtggatctccgggcaccgattaacgatggaatttgcgacggcgggtctctccggctctcaacctttccctgctatggcaaaggcgtacgaccctgacactggtttgatgaagcgaggaaacagagggggttgcggccggcggctttatgcccaggtagggcttgttcggttattttcaatccatatggattggagggggttgatatggattgagagggattttgacttgctagggattgaaacccccttaatccctctcaatccatatggattggggtagaaccgaacaagcccgtagtgggcaaggtggttgagggcgagatgttagcgctggcgggatccgtgatgagagctccgggttgttagcgcacagggaggaagaatgtgcgacagca

SEQ ID NO: 26722 - DNA, 1490 bp, Zea Mays
cactccttccccttcccttcccttcccttcagggaccaggccatcagttcttcacgagctgggaagagctcgtgagccgtgcattgaaggcaatggccgctgttcgtagatgctgcctgctggccgcggtgctgctgtggtcggcgctcgcttcagcggccacggccgcgccggcgcctgtggtggccgggccggtgtccagggtggaggacgccaccatgttccggatatactacggtcagagcttcaaggtcatcaagaactccggcgatggcaagagctaccttctcatgcagaacacgtccaagatggcatccaagacgaagtactgcacggggaggattaagtcgttcgtcatccccctcgccagcttctccgtcgacaccacgacctctccagtgtcattctttgagctgcttggagtgctagagagcttgaaaggaataacatcgaaccaagtcgcttctcagtgcgtgctccagtcatatacaagtggaaatgcccagcttgtgaatagaactgatgtgcagacactctcgcagtttactgcgcatttcataagcgatacagatgaagacagaggttgcaactttgcagcatatgtacccttagaagagggcacaccattgcagatggctgagtggatcaagtacctgggaactttcacaaactctgaaaacagggctaatgctgtctacgatgcagtaaagacaaactacctgtgcttaagcaaagtagctgcaaaccttggcacaagattcaagcctgtagtagcgtggattgaattcacacagggaatgtggacatttgttaaagaaagttacatcttacagtatgtcacagatgcaggagcagaaattgttgatgcaactattacggataagagatttaatagttcagatccagaggatatggataacttccatgctattctgtgtttttgtatcaaatcgcagcatatggagatttgacaaaaggataggagcttctgggacacttgattggtccgatggagctatctcacagcctcagttggttcttggagatctcatagaaattttcttcccaacggggaactacataacaatttacttcaggaatcttgcaaaggatgaaggggtcacagagattggtcctgaaatgtgcactaggagcatatccacacccatggatcctataatcctgtcatgtgaatgatgaacccagatgaacacgaagagttgtcaagctactgtactaacagacagtggcaactagttgacagaagcatttaagttactgacaaactgatctggacagaagcatttgcaacaaagattagattacacaatctagaaaaatactttctttcaaatattgagcagcaactgctgtttggtcagttgatcaataagtgattacaaacctcggtgtatccatgttaaaaggaatttgatgtaattatccaagagaccatcttatgaaattcaaacgactgttttcaatatgat

SEQ ID NO: 26723 - DNA, 2680 bp, Zea Mays
acactttcttagcaggtaactgcagacggtcactgacgtgtgggcattatctaggcttggtccctaatgtcagtgacggagcaggttccaaatatgaagcttcagtagtgtatcgtgagaacacgtcggtgccaggctgccagcagcaacgaagccgcaccaggccccgcactgcccatggacgcacgcctcccggggctctcgtgtccctgtccgtctcccgtttgccgcctccaccgcaacgcggcgcgcggggtggcggtgctctcgcgatcctcgtgtcgattccagcggcgggggtgccattccctcccctggccgttgcccgcgcctcgcggtcgcgcaccggaaccggagccccgccgcgaatctagggttgcctccgcctcgccccctcctcccgagactcctagcggcaggaattaggacgagggtaacaggcgacagaggctgcgaaggacgccccctcgtcgaatgcgccggcgaccgatccgtggaggagcagccggagcacgcaggagttgaagggcaagctttgaaaatgtcatccactgtgccgaagtcatcaaatatcttctggcatgattgcctagttggcaagactgatcgccagaagctactcaaccagaaaggctgtgttgtctggatcacaggccttagtggctcaggtaagcaaaccttgttttctctcgaactggtttgttgtgtgcttcttgcattgttgatgcaattgttaaaaaattttaagctaaaactaagataacgtcaactgcagttggtaagataatgtcaactgcagttggtgtctctttctgcttcgtatatatattatatcttctttgtttgcctcttgttggataatttcatctgtcatttatatgtacatggacagatttctatactgcactgttttgcttgaattattgaattctattaaagtcattttggcccaatgaaggattactgttttattcattttagagtacagaaaattgatgctttcacagttttgttactgaacggctttctagttttcctttgtctctgcatccattcaattccatcttcttcacgaatttggcaaaaaaaaaattatatattttttttcagaaaataagttcaactctgttctagatttatcaataagcaacctattcgttttggctttgataaattacataccttgccttaaatatatagtttgctgacatgtactgacactcttctgggcggttactatgctggtttctcgaagtttggttttatttagttgagggaagtgccttgggcaccttgatgaatatcttgtaagctggtgactccagcagaactaaactttgttttctataagttgggatcaatggtctttggtctaaaaaaggtaaatacgcaaagtttccaaaagaactctaatattttttttttcaatttgtatggcatatgcctactctgtttactgtcactgcattccctcttcacagttcttcatgacctgcattgcaatttttttagaataaatcaggatctattttctgttcattcaaaggatagttacatttaaatgataaatctccaatatcatttgtccttcaaattgaatcttttagtttttttaaatggtattcttttaatctaatttcttttcaattttttcatcttgctaaggtaaaagtaccttggcatgtacattaggccgggagctccacacaagagggaagcttgcatatgttcttgacggtgataacttaagacatggtctgaacaaggatcttggctttaaagctgaagatcgtgctgaaaatataaggagagttggtgaagtagcaaagttattttcagacgctggccttgtatgtattgcaagtttgatatctccatataggagagaccgtgaatcttgccgtgcactgttgtcggatggtagctttattgaagttttcttgaatatgtccttggaattatgtgaagcaagggacccaaagggcctctataagcttgctcgtgctgggaaaataaagggttttacaggaatagatgacccttatgaagcaccactgaattgtgagattgagatcaaggaaatagatggtgtatgcccttcgccttctgacatggcggggcaagtggttacttaccttgaggagaaaggcttcctgcacgagtaggctgacgctgaatcgaagctacatccggggaaggtttcaatcagacaagcgcagaataagtcaaaagcgctgccagttaccgtatggttacatagattgatctggatgcctagtatttttctttccgcgcttgctctaccacaagttccattcagtttcattcagatgagcctagatggttcctaatttctttgacctctggaatagattacctgtaatgcaattctgataacagcttggggcagtatcgatttgtcacgggaaggtacgcctaatgttgagagaaactgtattcttgtgctccactttctgcagtgccgacgtgtaccctttccgttttactaaattataattagcttcccttcatttataagtttatttattttttatacactattcttgttacatatctaagtatgtctggatatatagcaaaaaaaaaaaaaactaaaacggattaaattttgaaacttcgaaccgagatagtacagtttagacacgctggaacatgcggg

SEQ ID NO: 26724 - DNA, 355 bp, Zea Mays
cacacttcacgcgctgagggagcaaccagaacaaggctcctctcgtcgttattgctgaggctccggccgagtagagctcagcaacatcagctctgctcctctggttgcccctcgtcgacgactccggtgctccggccactcaggtgaagttctattttcctagatctactacctttgtgctcttgattttgatattttgtattttatttatacgatttgaaggtcgttgaggaacccggtgacgtcgttgaggagacggtcaagtatccctccatctccatggatcttgatcaggacgccgagtcggcggagcgtgagcttgaggatcacaacgagcgtttggatgagttggcct

SEQ ID NO: 26725 - DNA, 1705 bp, Zea Mays
attcggacctcgttccgcctctgcggctctgcccctctctctcacctccccgcgggcggccgcccccaccgcagcccgaaccgcatctcccccaccactggcatccccctaccgcttacaaatacgcgacacatcccacctcgacggtctctttctcgcatcgctgcgccgctccatccgctcggctcccacccgtccgtcgtcgcctcgccgtcgagccaccgccctccttgtcaacctcgctgacgacgggcccgtgtgattctgctgcggtgcagtgttgctgctcgggccgggcgggaggagaaaagatgggggtgtacctcagcacgcccaagacggacaagctctcagctgatggagagaacagccgcgtccggttcggcctctcctccatgcaggggtggcggaccaccatggaggacgcgcatgctgccttgccagaccttgatgaatgcacatccttttttggtgtttatgatggccatggtggaaaagctgtatcaaaattttgtgcgaggcatttgcataaacaagtgcttataaatgatgcaaattcatctggtgatttgccaacctctctccataaagctttcttaagaatggatgagatgatgaaagggcagaggggttggagagaactaactgagctgggagataagggaaacaaaatctcaggtatgatagacgacataatatggcctcccaagggtggtgattcagataagataagggaagattgggataccgaggagggtccaaattcgaactttcctggaccaacatctggaagcacagcttgtgtggctgtcataagaaatgacaaattaattgttgcaaatgctggggattctcggtgtgttatctcacggaagggtcaggcttacaatttgtcaacagatcacaaaccagatcttgaggaagagagggagaggattttgggtgctggtggatttgttgttgccggacgggtcaatgcaagtctgaacttatctagggcaataggtgacatggaactgaagcaaaatgacctcctgccagtggagaggcagatcgtgacagctgaacctgaattgaaaacagtccagctctcggaggatgatgaattcattgttttagcttgtgatggaatttgggattgcatgtcaagtcaagaagtagttgattttgtacataaacagctaaagaccgaggataagatatctagtgtgtgtgagaagttgctcaaccgctgtgtggcacctacatctggtggcgaaggatgtgataacatgacggttattgtggttcaattcaagaaaccagctttagctgttgctacttctagcgctgagcagtctgctaccactgcagaagggatgcggcccaaaatttgagttgcctttgtgaacagcgaggtcgatggcccagattaccccccgaagtaggcgttgagtggcacaccgtgctgtggagctctaaccggtggataatagacaaaaaaggatagtgaggtggtgtatataagaaaagggattctattcgacaatctcttatagggtttgttgcttccttctttctagtgttcagagtcgtcgcaacctgtaatacatggcatgttggtgcttaaattggtttttttgtgaaatgcattgatgagttgtcggaagggtagtttagcttctcaagcagatttgcttgcagaaaagtgaaagatccgaatgag

SEQ ID NO: 26726 - DNA, 1241 bp, Zea Mays
acaatacctatggactaatcatcctttgtcatatccaaaggtgatggatattctgaagttggcttctgagatggacttgagttgtattaaagcttataaacttgatgctctcaaatctgtacggaaaactgatgaagcaagaagccttggcatggctgataatcacagtgaagcaattgaaacaccaacagaggacccttgccatgccacagtaggtgggagatctaccagtgtagacgaagacagctcaacaacaacagtggtgttttctgataacaaaaacctaaattccaaaagatacattagcaaggcagaactcaggaagaatttaaggcagatgaagaatggacctggaagaaataattgctctggtggtagagttgaaaagtcaaaaggattttgtcctaacagctttgatcgtgtcctccttgatgctccatgttctgcgcttggcttgagacctcggctctttgctggtgagacccattattatgacaggaaactctagaatcgctgaaaaaacattcgaagtatcagaggaaaatgtttgatcaagctgtcaagctagttcgtcctggtggggtgattgtttattcaacgtgtactataaatccaggggagaatgaggctttggtgagatatgcattggatacctacaaatttctttcactagtatcacagtacccgaaagttggagggcctggtattgttggttcgtgcgagctgttcaacaagacatatactgaggaatggttgagagaggatgaagctgaccttgttcagaggtttgatccgtcatcatcagtggataccattggtttcttcatcgcgaaatttgatgttggagagaaagatgaataaacaaacgtgactgaaattccaatgtttggcattcacaacttacgctagggatatcagcattgaattttctgcaatcagatggctcacgtatacccatggagtggaatgcagcgtgccccctgaaattttgtttgccagtgtttgatattttcttttgttcgaagaacattgttcattatggtgaaatgatggggcaaattagattcaagctcctgtagtcccgtttccaagaaaaaagttaccgggtacccgtatccgtccgggtgtaccgggtattttctgggtattggtcctcccattccgtcctgtatctagggagcatttaaccgggtagcaccagcaaaattgtcctgatttaatattcgatatttggtttggct

SEQ ID NO: 26727 - DNA, 3126 bp, Zea Mays
ctctatccaacttcacaagcactgggttatcttgttgattggtccaggtcaagcaaattacgaataagcccacaaagtgagaaaggatcagaagttattattgatttagaagcactgtctggcttcactgaattttttcttgagatccaagataatatatttccccatcgtattgctgcttttggagtgtctttacaacctgtttcttataacttgcctgtgccatcacaagtagtactaatagctccaagatatgttctttcaaatgagtctgatgctgcaattgctgttcgtcaatgttttgttgagcacggcattgatggattgacagttgaagctaaacagcgggctgctttacagacatggaaacctgggaaaaaacgagaagtaaattactttgatttatttgttaagaagcacagaaatgtttttgaggattctcacatttttatccagttctgtccaaaagaacctggatacagttggtctggaccaatctgtgtttcatcaattggtcgttttttcttgaaatttagaagattagaaggaatgctggaagatggtattaaaagagaccctttgaatgctgggaagctgaaactatttgcttctgtcgatgttgctcaagagacaacttcttttgtgctacacttcactaaaccaccgaaggttacactcccatatcgaatagaaaattacttgagcgaatcatctatcctgtatttccagaaggattcagttgattcagatgtattacaccctcaagagtcagaacagtatgcttgggatgatttaagttcaccgcgcaaactggttgtccgaattgttgatacacctgcattgcgtgaaattaaaatagataaaatcagcccatggaagccatttttgaagatgcgccaaaatagcaggcttaatctggatttctcattcagtggtggactcaattcgagaaaacagagatttgatgaatcatttggcttgagagtgttcaaaattggctacgaagtgtatgccgatggtttaacaagagttttacgaatttgtgaacatgcagataatcccaaaattgagaaaattcaatggccaatagcaaatatacagttcagaatttcttatgtgtgtattcatcttcttgacaaggaccagaatggggaaaatgtccaattgccatctacaattttagcagcaagacttcagcatgtttcttctgattcagttgtcacaaatagattcaagcaagtatctgttgcaattcattcattgaatgtggatgaaaaatgggaaggggcttcaattgggacaattcttaggaggaacaagcttcaggatgctactctcgatgaaaatattcttcgtatgatctttgtactgaattcaactgactccagtgtcaaacaaatacagtattgtgccatcatcctacagcctgttgatcttaagattgatgaggaaacgttaatgaagctagtaccattttggagagcatctcttgcaccttcaggcacgacaagcacacaattttatttcagacgttttgaagtacatccaattaagatcatagcaagctttcggcctggtggccgacgcacaacatatagttctgctcaagaggctctgagggcactacttcatagtgttataaaggtgcctgaaattagcaactcagctgtggagctcaatggggttctcctaaatcatgctttagttacatttcgtgagctacttctaaaatgcgctcagcactactcatggtatgtattaagggcaatttatgtaacaaagggaagcaaattgcttcctccatcttttgcctcaatttttgatgactctgcttcatctgttcttgatgtcttcttcgacccttctgatggatcgctcaacgtccctggccttaccataggcatgtttaaatttataagcaagaacatgaagtcgggtggtttttctggaacaaaacggtaccttggtgatctcgggaaaactgttactggtttccaccagggcatgttgaggttggcgatggagccatctgtcttagggcaggctataatggagggaggtcctgacagaaagatcaaacttgatcatagccctggacttgatgagctatacattgaagggtacctgcaggctatgttggatgtcatgtataagcaagaatacctccgtgtcagggtgattgatgaccaggttatactgaagaatctaccaccaaatagcgccctgataaacgaaatcgtggacaacgtcaaaagctttcttgtgagcaaggcactgttgaaaggcgattcttccacagttcgaccgatgcgccatctgcgaaatgaacctgaatggaggattgccccaacggtgctcaccctctgcgagcacctttttgtgagcttcgctgtgcgtgtgctgcaccgggaagccagcaaggccatcgctggagtcatgtcgagagtgaagaaaccgaccggagaggaggtcgaaggcgactcgcccgcatctggtggcgtcctgtgtaagcggaataggctgtggactgtcgggaggtttgccgtctcgggcatggtcgcctatgtagatggccggctgtgccggcacatacccaaccccatagcccggaggatcgtcagcgggtttctactgagcttcatcgaaaacaggggcaacgaataagcgggcagccggacaggtgataaaagggctcgccttctgccacctgctaataaggcgtaccatggaccatggtaaataggcgtgcacgttgtacaaagaaccgaggtgtggtagtgctcttgagccgtaaccgatctctgcatagagctgtgcatcaattttgaccgccttcaggcccacgtttggtgtacagaaacactgggacagtaattccgcagatgctacttcctgcctacatttcgttgacatggactcgtgcttagagtaagtttaatagtccacaacgagccttttcacataacaaactcggttagaggccctttcacatagtctatctatatcatcttattatacttgttctacatgcaaagtgataaatagcatggctatgataaacgtatggagccgttggtgtgttgatcatgagtcactccactgggtatatctctaattttattgttt

SEQ ID NO: 26728 - DNA, 2471 bp, Zea Mays
ctcgtagaacattcgagaacccctcgttagccaacaataaattcccagcgccccgcatcccactcccgtcccacacagacacagcctcccaccacaaaccctcctccagtgctcttttcttctagccgccgccgcaaccgcttgtcgtctcgacatggcctccgagacggagacgttcgccttccaggcggagatcaaccagctgctatcgctcatcatcaacaccttctactccaacaaggagatcttccttagggagctcatttcaaactcctccgatgccttggataagatcaggttcgagagtttgacggacaagagcaagctggatgcccagccggagctgttcatccacatcgtccctgacaaggccaacaatactctgacaatcattgacagtggcattggtatgaccaagtcagaccttgtgaacaaccttggtaccattgcacgatctggcacaaaagagttcatggaggcactggctgctggtgccgacgtgtccatgattggtcagtttggtgtcggtttctactcggcataccttgttgctgagagggttgtcgtgaccaccaagcacaacgatgatgagcagtatgtatgggagtctcaggccggtggctccttcactgtcacacgtgatacctctggggagcaacttggcaggggtacaaagatgaccctttacctcaaggatgatcagttagagtatcttgaggagcgccggctgaaggatctgatcaagaagcactcagagttcatcagctacccaatctctctctggatcgagaagaccactgagaaggaaatatctgatgatgaggacgaggaagataagaaggacgaggagggcaaggttgaggatgttgatgagaaggaagaaaaggaaaagaagaagaagaagatcaaggaggtttctcatgagtggcaattggttaacaagcagaagcctatctggatgagaaagcctgaggagattaccaaagaagagtatgctgctttctacaagagcttgaccaacgactgggaggagcatctcgccgttaagcacttctctgttgagggtcagcttgagttcaaggctgtcctgtttgtgccgaagagggccccctttgacctcttcgacaccaggaagaaactgaacaacatcaagctctatgtgcgccgtgtcttcatcatggacaactgtgaggagctgatcccagagtgactgagctttgtcaagggcattgttgactctgaggaccttcccctcaacatctcccgtgagaccctccagcagaacaagatcctcaaggtcatccggaagaacctggtgaagaagtgcattgagctgttctttgagattgctgagaacaaggaggactacaacaagttctatgaggccttctcgaagaacctgaagcttggcatccacgaggactccacgaacaggaacaagattgcggagctgctgaggtatcactccaccaagagcggagatgagctgacaagcctcaaggactatgtgactaggatgaaggagggccagaatgacatctactacatcactggcgagagcaagaaggccgtggagaactcccccttccttgagaagctgaagaagaagggctatgaagtcctgtacatggtggacgccatcgacgagtatgctattggccagctcaaggagttcgagggcaagaagctcgtctcggccaccaaggagggcctgaagctcgatgagagtgaggatgagaagaagcggaaggaggagcttaaggagaagttcgagggcctgtgcaaggtgatcaaggaggtgctgggcgacaaggtggagaaggttgtggtctctgaccgcgtggtggactccccctgctgcctggtgacgggcgagtacggctggacggccaacatggagaggatcatgaaggcacaggcgctcagggactcgagcatgtctgggtacatgtcctccaagaagaccatggagatcaacccggacaacgccatcatggaggagctgcgcaagcgcgcggaggccgacaagaacgacaagtctgtcaaggaccttgtcatgcttctgttcgagacggcgctgctcacctcgggcttcagccttgacgaccccaacaccttcggcggccgcatccaccgcatgctcaagctgggcctcagcatcgacgaggacgaggctccggaggccgacaccgacatgcctcctctggaggatgacgctggcgagagcaagatggaggaggtcgactagtctggctatcgtgtcttaattggtgtgtgcgtgttttttttacttttgctagcctgcaaacttcgtacgtttattattgtcggtataatagtgctccggctgcccatctctgcttgctcggtcagttttatatatgccagctgctcatcgcagcattctccctgtgcacaactccaaaatgcgggaagagatcaattattaaccgagtgaaaaaagaaaacaa

SEQ ID NO: 26729 - DNA, 568 bp, Zea Mays
cagccccgcatcgcaccctccctggccgccttctcttctccagcgtccgatctctcccactcgccttcctcaccgcagctctcccggctcggtcgcttcgccacctccgtcctccccccgcgctcggtcgctcgccacctgctctcccctccctccacgttgctcgcgcccgcgcttatataagtgcaggaggagctcatggcggacgctccggcgagccctgggggcggaggcgggagccacgagagcgggagccccaggggcggcggaggtggaggcggtggcagcgtcagggagcaggacaggttcctgcccatcgccaacatcagtcgcatcatgaagaaggccatcccggctaacgggaagatcgccaaggacgctaaggagaccgtgcaggagtgcgtctcggagttcatctccttcatcactagcgaggcgagtgacaagtgccagagggagaagcggaagaccatcaatggcgacgacctgctgtgggccatggccacgctggggtttgaggactatattgaacccctcaaggtgtacctgcagaagtacagagagatgg

SEQ ID NO: 26730 - DNA, 3787 bp, Zea Mays
cacatcataagtataataatgataaatttgcaaaagcgaaaagaaaagagacgcattccggaaaacgtttgattccttcacacacccgcacacatacacacactcgtcccttccctccccctccatctccattctccaatctccccttcgacgctctcccctcgcttctcgcgcacactaaccaatccgagcgcccgacgctgccccccgatcgaatccaccggagccgcccacctagggctcgcccgcgccattgtcgaaccaggagggttcgtccgcccgcgcctgctgccccgcactcccgcgccgtggcggtggcgttggcggtatgtatgatcgctagagggagaggaggaggtggcagcaccggtggggattagggtggcggcagtgctggtgccgggaggaggaggaggaggaggaggaggaggaggcgtagcccatgaaggcgacggcgccgccggcaaagcggcggaggggcccgcggctggcggtgctggcgctcgtgttctgttcgctgctcgtgccgatcgccttcctcttcaaccgcttccccgccgtgtatgtgacggatgagcgccctcagcaggagattgacttgccttcattcgatcgcgtggcatttgaaagtggtggatctgtaaatgaagatgtgttcaagaagacttctgggagcagtagtgtgtcgcaccatgttctcccgcctccaaaaattgaactagtcctcccccctccaaaagttgaacccaaaccagaagtgaagccagtaccagtatcagttccagttcatcataacaaaaaaattaacgttgacaagattaggcctcctagagttcaaagtgctgatgaggtggaaaaggctaaggcttgtcaacttgagtttgggagttactgtctctggtccatagagcacaaagaagttatgatagataccattgtgaaaaggctgaaagatcagctgtttgtagcccgatcttactacccaagcattgcgaaacttaaaggaaaggagacattgactcgtgaactgaagcaaaatattcaagagcacgagagggtccttagtgaatccatcgttgatgctgatctaccatcctttataaaaacgaaggtcgagaggatggaccaatcaatagcaagagccaaatcatgcactgtggattgcaacaatgttgacagaaagcttcgtcaaattcttcatatgacagaggatgaagctcattttcatatgaagcagagcgcatacctgtacaaccttggtgttcacaccatgcctaaaagtcatcattgtcttaatatgagattgacagtagagtacttcaaatccatgccattggatccaaatgactcttctgcccatacgtttaacattccagacaataggcactatgttatattgtctaaaaatgtccttgctgcttctgttgtcatcaactcaactgttagtagctctgaggatactgaaaatatagtctttcatgtactaactgatgctcaaaatttttatgccatgaagcactggtttgcaagaaactcctacagggaatcagctgtgaatgtcataaattatgaacaaattattttcgagaatttccctgagtttggaacccagcagttatatttgcctgaggaatttcgtgttttcatcagtagccttgagcggcctactgagaagagtagaatggagtatttatcagtgttcagtcactcacatttctttcttgccgaaatattcaaagatttaaagaaggtaattgtgttggatgatgatttggtcgttcaacatgatctctctttcttgtggaatcttgatatgggagataaggtccatggtgctgtcagattttgtggtttgaaacttggccaactgaggaaccttctgggtaggacaatgtacgatcaacagtcatgtgcatggatgtcgggggttaatgtgattgatttggaaaaatggagagatcataatgttacagagaattacctgcaactcctgagaaagtttgggaacaatggtgatgaggcctcattgcgatcttcagctttgcctataagtttgttgttgttccagcatcttctttatccccttgatgagagattgactttatctggacttggatatgactatggaattaaagaaaaacttgttcagagttctgcatcattgcattacaatggaaatatgaaaccttggcttgagttgggcataccagattataggaagtactggaagaggtttcttacacgagacgagagattcatggatgagtgcaatgtaagtccatagtgcacttgagcttgagagccggatcatttttgacagtagatttcagtctacactgctgtaatatatactaagaggaccaacacttccattgagaaaagacttgggaagcagtcactagccatcaattttgacagagtagatccagcgccatctgttgagtgaacttgtgagctcgatggatggttttttctgcagttagaggactttagtgttaagtttgaaggataatgcagtagacaacgttggtggtgtgtggtggtgaggctccacgtaagagggagcatcacactacgtaacaggaatgatctttggtggattggggcgtcttaattcaaattggtgccttccatctcatcgattcaggttaattcttttctttgttgattgatttgttgacccctcttgctttgtccttctgtcaataaggacatacacaggttaaaattcaatttctttgctcgtagttgttgcacattgattgttctatcattattatgttgatgcaaagtatattatgatgtcagactcatctgttacaaaaatgagattaacaactgttctatttggatgtcttctgagcactcaaactttatctcatgatccagtaaatttgaatctccatatatggtcgtgactgggtttaactgccgacataggtttcctctgtgtgctccactgtggcctagaaagaattaaaaagtgcagtgcggttcatagcaatacatatacttgacattgcagaagtaaaaacgtgttccgggcacttggtgaatggagaaccttgtcactgtaaattggttcttaaaccttgttgcgatgtaataatcatgtaaacactgtaaaacatgcgaattttccaaggcagcaataagcttcagagttgaagaaaccgttaacctggatgaacatgcgaggacgcttcttatctttgagtaaaaggtggcttagggtttgtttggatgacgtgtggattttgaaaaagtgaaaaaaccgttgtaaggtatagaccatgagaattcaaataattctacgtctcctttgatgacttcacaaagaatcagatctctttcgatccttttctcaagcgatcaccaagatcgagcttcagttctcttatcaaatcaaatggtgagtgcaatctctcccacaaggtactccacaaaaagtcggaagctcttgtttgctttacaatttggagcagcaactctatacaagaatgatagtaaatcttctctcttttctcggagtcaaaactcaacacaagtgttctagccactcttttgctaccttaggctcttgcaagatgctatgctaagcacacgatggttttgtaagcacttaagatggtttggatgctatggagatgatcctctaacttgtatatgatgtttgtttgttaatggattgagttgtttttggttggaggggtatatataggttgtccatctcaaaatagctgttggaaccccactttagcttctgcgtacccattagacatgtcca

SEQ ID NO: 26731 - DNA, 382 bp, Zea Mays
cccgggcagccatctcgggtggattgttgcgccgccctcggaccgcctcgtcctggctacaaaggcggaccgaccctctcctgattcctctcccataactcatccgatcgccacgttcaaccaagagagagtgtgaaattcgtcggtagcagagaggagggaaggagaccgccgcgctcgatttcccttgtcgccgacggtcgatacgcgggaggggtctcggaggacttgtcttcgtgcgaggatcgcgcacactcgacttctcaaacgcggaaggcactggacaccggagaatcgttcgccggagcaccaaggtccgccgcggacttcgttttcccgcgggcagtgctctgcatcacgctgtctttgacgagcaagccac

SEQ ID NO: 26732 - DNA, 6629 bp, Zea Mays
caggcctcaactagggtcccaaactaaaagggtaacaaagcctagcaaaacctttccgtccgttactgctatagcgttcatcatcccattccttccccaccaccacctcctgcttctacactactggactgctgctgctgctctccccctcccctcccctcccctcccctcccggccgccgccgccgccgccgcgtgttctctctcatctagggtttcatctccatctagtcgagcattcccgtgctggggtggggagtgggagactcgactcgatttgattcgactccatttcgtgctagcgcctagcgctgcagagcgagtgaggtgacgggaatggcggctccggggcggaggacggcggacgtgtcctcgtcctcgccctctccgtcccctgccgccccctccaccggcaggcgcctcctgcgcacgcagaccgtcgccaacctcggcgagtccatcttcgacagcgaggtcgtgccgtcctcgctcgtcgagatcgcgcccatcctccgcgtcgccaacgaggtcgaggttgaaaacccgcgcgtcgcctacctctgtcgcttctacgctttcgagaaggctcaccgcctcgacccgacttccagtggccgtggtgttcgtcagtttaagaccgcacttctgcagaggcttgagagggaaaatgaccccacactgaagggaagggtccacaagagcgatgctagtgagatgcaacgcttctaccgcgaatactacaggaagtacatccaggcactgcaaactgtcgttaataaggatgaccgtgcgcgcctcactaaggcataccaaacggctgctatcttgtttgaggttttgagggctgttaatgattcccagtccgttgaagtcgatcaagcgattttggatacacacatcaaggtcgaagaaaagaaaaagctgtttctaccttataacattctcccgctcgatcctgaaagtactggcgaagccattatgcgatatccagagattcaagctgctgtttatgctcttcgcaatactagaggtctgccatggccaaaggaccaagacaagaagcctgaagagaagaatactggcaaagaccttcttgattggcttcaggctatgtttgggtttcagaaagacaatgtgtccaaccaaagggaacatttgatactgttgcttgcaaatgttcatataaggaaaatacccaaggctgaccaacaaccgaagttggatgacaaagctctggatgatgtaatgaagaagctatttaagaattataagaagtggtgcaagtacctcggccgcaaaagcagtttatggttgccaaccatccagcaggaagtgcagcagcgtaagcttctttatatgggtctctacctgctgatttggggtgaggcggccaacttgagattcatgccagagtgtatttgttacatctaccatcatatggcttttgaactctatggcatgctggctggaaatgtgagcccaatgactggtgaaaatgttagaccagcatatggtggtgacgaagaagcctttttgacgaaagtcgtgactccaatatacaaagttatagagaaggaagctgaaaggagcaagaccatgaaatcaaagcattcacattggagaaactatgatgatctgaatgagtacttttggtcagttgattgtttccggctaggatggcctatgagagccgacgctgactttttcaaaactccaaaagatccttatctgaatcatttgaatggagagaacagatctgcaggcaatgtccattggatgggaaaagttaattttgtggagatacgttcattttggcacatattccgtagttttgacagaatgtggatcttcttaatattgtccttacaggccatgataattattgcttggaatggtggaacaccaagtgatatctttgatgctggcgtatttaagaaggttttgagcatatttatttctgcagcaattttgaagttgggtcaagcaatcctagatctcgtatttggctggaaagcaaaaagaagcatgtcatttgcagtcaagctacgatatgtcttgaaattaatatctgctgctgcatgggttgtgattttaccagtgacttacgcgtacacttgggagaatcctactggtcttgcaagaacaataaaaagctggcttggggatggtcagaatcagccatctttgtatatactggcagtagtgatatatatggcaccaaacatacttgcttctatgctatttcttttcccatttatgagaagaatcctagagagttcaaatgttaaggtcataacgatcatgatgtggtggtctcagcctcggttatttgttggtagagggatgcacgaaggtgcattctccctcttcaagtataccatgttctggattattcttttagcaatgaagttgattgtaagcttctatattgagatcaaacctctggtacagccaaccaaagatataatgagagaacctatcaggacattccagtggcacgagtttttccctcatggaactaacaatattggtgttgttatatcactctgggctccaataatcctggtatatttcatggacacccaaatttggtatgcactgttctctactctgattggtggcatctacggggcttatcgtcgtcttggtgagatacgtacattaggaatgttgagatctcgctttgaatctttgcctgaggccttcaatgaacgcttgattccttctgatgcaaataagagtaaaggtcttcgtgctgctttttcgagtagacccaaggcttctggtgacgaaagtgagagagagaaaagagctgcaaggtttgctcaaatgtggaacgccattattacaagtttccgcgaagaggatctcatagacaatagggagaaggatctgctactggttccagactgtaaagaccgtgaacttgatatattccaatggccgcctttcctacttgctagcaagatcccaatagcactggatatggcagcagacagtggtggaaaagaccgtgatctgacgaagaggataaagtcagatccatacttttcctttgctatcagagaatgctatgcttcattcaagaacatcatcaataccttagtatttggtcagcgggagaaagatgtcctagtacagattttcacagttgttgataagcatatagaagaggaaactctgataacgggtctcaatatgaagaaccttcctgcactgagcaagaagtttgttgaattacttgagttactgcaaaaaaacaaggaggaagacttgggtcaggtagttattttgttccaagatatgctcgaggtggtcacgagggatataatggaggaacaggacctgctcgagacgttggattctttacatggtgccaatagtagaaaacatgaaggaattacaccgctagatcagcaagaccagttgtttgctaaagctattaagtttcctgtggtggaatcaaatgcatggactgaaaagataaagaggcttcatcttctgttaactgtgaaagagtctgctatggatgttcctattaatcttgatgctaggcggcggatatcgttcttcgcaaattctctatttatggatatgcccaatgctccaaaagttcggaacatgttgcccttctctatcttgactccttattacaaggaagatgttctgttttcattacaaaatctggaagagcgaaatgaggatggagtttccattcttttctacttgcaaaaaatttacccagatgaatggaaaaatttcctcgaaagggtgggctgcaagaatgaagaggtactccgtgaagatgaacagctggaagagaagctttgtctttgggtgtcatatagggggcagacattaacaagaactgtaagagggatgatgtactatcgaaaagctttggagcttcaggcttttcttgatatggccaacaatgatgatcttatgaaaggctacagagcaatggaagtaatgtctgaggactcaccattaaagactcaatgcaaggctatagccgacatgaagtttacatatgttgtctcatgccaactatatggaattcagaagcgttctaatgagccttgcgcacatgatattttgagactaatgacagagtatccatcacttagggtcgcctatattgatgaagttgaagcacccagcaaagatagaatcaagaagattgaaaaggtttactactcagtgttagtgaaggcttctgttacaaaacctaatgagcctggtcagagccttgatcaggtcatctacaagataaaactaccaggtaatgccattttaggtgaaggaaagccagaaaaccagaaccatgcaataatattcacccgaggcgaatgtctccaaactatagatatgaatcaggagcactatatggaggaggctttgaaaatgagaaatctgctgcaagagtttgagaagaaacatggagtgagacatccatcaatacttggagtcagagaacacatatttacgggcagtgtgtcatcccttgcttggttcatgtcaaatcaggaaactagttttgtgacaattggacaacgagtgcttgccaatccactgagggttcggtttcattatggccatcctgatgtcttcgatcgtcttttccacgttacgaggggcggtgtcagtaaagcatccaaaattatcaatcttagtgaggacatctttgcaggattcaattccacattgcgcgaaggcaatgttactcaccatgaatacatgcaagttggcaaaggaagggatgtaggtctcaatcaaatatctctgtttgaggcaaagatagcaaatggcaatggcgaacaaacgctgagccgtgacatctaccggctaggtcatcgctttgatttcttcaggatgctgtcttgttactacacaacaattggtttctacttcagtacaatattacagtatggactgtatatgttttcctctacggccggctatatcttgtacttagtggactcgatgaagcactggctactggaaagaggtttgtgcacaatacacctctccaggttgctcttgcgtcagagtcttttgtgcaacttggatttttgatggcgctgcccatgatgatggaaatcggtttggagagaggattcagaactgcattgagtgattttatactgatgcagcttcagttggcctctgttttcttcacattctcgttgggaacaaaaactcactactacggaaggacgttactccatggaggagcggaatacagagccactggacgtgggtttgtggtgttccatgccaaatttgctgagaactatcgactttattcccgtagccattttgtcaagggccttgagctgatgattctactagttgtgtatgaaatatttggtcagtcatatagaggggctataacttacatcttcatcaccgtatccatgtggttcatggtgggcacttggctctttgcaccattcctgttcaatccttctggatttgagtggcagaagattgtggatgactggactgattggcacaagtggatcagcaatcgtggaggtattggtgtggcaccagagaaaagctgggagtcatggtgggaaaaagagcaggagccccttcgttactctgggaagcgtggtactattgttgaaatactgcttgcattgcgtttctttatctatcaatatggactcgtgtatcatctgaatataacgaagaagataaccaaggataaccagagtgtgctggtttattgcttctcatgggttgtaattttcgttgttttactcgttatgaagaccgtatcagtggggaggaggaggttcagtgcagagttccagctagtgttccggctgatcaagggtctcatatttataacttttacagccatcgtggtaatcctaatagcaatccctggcatgacggttctggacatctttgtttgcatccttgccttcatgcccactggatggggtttgctcctgattgcccaagctatcaggcctgtgattcaaaagatcgggctgtgggggtcgatcaaggctcttgcccggggctacgagatcctaatggggcttctcctgttcacgcccattgctttccttgcctggttcccgttcgtgtccgagttccagaccaggatgctgttcaaccaggccttcagcagaggtctgcagatctcccgtatcctgggaggacacaagaaagaccgagggacgcggagcaaggagtagtagggctgctgattgaaggtccgtctatcgggagttatgtcgtcctggagcggtctatcaggttcagagaatattagggtccgtatgtatgtatgtgtgtgtcgcacctagcaccagtagtatgtatgtatgtatgcgtatgtaggttcagagaatattagggtccctatgtatatgtatgtatcaggattgctatggtcttttggattggaagatctgagatttgctggtgcaatggccagtatctgacatccaaatgttgaaactataattaggctctgctaatagttagctaacttacagctaacaattagtttattagctggcttacgactaagtagtcagattaaagttgggatgtcggtcgccccctttaggtttagttaggctcgttccaatgggtggcgagagc

SEQ ID NO: 26733 - DNA, 3008 bp, Zea Mays
aaatgatcgaaatcaattgcacacggcgccacaacgcaaaactttaatccgatcacaaaccaatctcgaactagactagaacgtgaaaccctaaaactaatgggtttactgctaattagggtgttatcatgtcgacgaacaatatcagacgtacacgtacacgtgtggtgcagagcgccgggcgcgtatggttcatgacgccgccgccgtgtccatcatggccttgaactcgtcgaagcagaccaccccgtcgccgtctatgtccaccaccgcgatcatctctgcgcaccgctcggccgtcatctcctccccgacgatccccagcctccacagagcgcggcgcagctcctccgcggtgatcacgccgtcgccgttctcgtcgtactcggcgaacgcagcgcgcaacgtgtctgaccggtcgccgtcctcaaacagcgcctcgagctcctcgaggctgatgaacccatctccatcgcggtccgcgacagctaccatctcgtctgcctccacggctgtgcacccgcacaactcgcgcatctcgtccgccgagatgcggccgtcgccgtccgcgtcgaagtggcggaacacgcggacgagggccggctccggtattgtgtacgtgggcgggggagtgctagccgcggctgggggaggcggacttgaggagcggcgtcggctgaagaagatatcgctgcaggacgcggtggcggagacgacgagacccattgccggccgggtgcgacagctttgaatttgattgacggccttgacagggttttgaccctgtttttatataggagtaggacccgccagatagatgaaactcctacgcggttagtttcggtcccatctggtcttatcgtatactggtgcggacctagttgccctctccgcatccaaccagctagcgcgtccgtccccatggcggccgccgccgcggggtttacgccggcgactgcaaggaaggccctcttcactactacagtcactctcctctcatcgtcactctcacgtagggccagcagcatccgcagccgcaacctctcctgctctgccgcgttcaccgccgccacgcgcctcgcgccgcagccgccggacctggtccggtgggtgcagcgcgagggcggattcgtccaccgtgccctccgcgtagcgaatcatccggaacacgggctcgggatctcagcctcttccgccgcggcctacggcgacatcccaattggggacgtcctcatcgcgctcccgagccagcttccattacgactacgccggcccaccagtgccgcggacgacgtgcttgtgcagctcgcccaacaagtcccggaagcttgcagcttcgactttcttccttgccgtccatatgtgctagacgaagcttctctccgcatttcttcggctattctgggcagcttcagctgaaggctagcttcgttcgccgttatctgtatacctgaaacacatttgttcacaccgaagtaaaagctttatgaggacctttggcagagtatgcccccaacagatagtatattgatttgaacaagattgtgttaaggttttcttattattgtattcctcgataatctgtgtgtaactgatgctacaatgttgttgagtttacggatgctgaaatgtgccatttttaccacaacccctcttttggatatataaggggatttctttctatttgtaaattcaaacaaggaataagttcaatcattttcacagatgaactatgggctatgaagctgggcttgaggttgcttcaagaaagggccaaatctgattcattttggtggccatatattgccaatttgccagagacatttactgttccaatcttctttcctggggaagacataaaaaatttgcagtatgcccctatcctccaccaggtcaataaaagatgtcgttttctcctcgagtttgagaaagaggtacagcagaagcttcatactgtgcccttggtagatcatcctttttatggacaagatgtaaattcatcttcccttggatgggctatgtcagctgcctcttctcgtgcattccgtttgcatggtgaagtcccaatgttgttgcctcttattgatatgtgcaatcatagtttcaacccaaatgctaggattgtccaggaaagaagtgtaaacagcttagacatgtcagtaaaggttcttgctgagaagaagattaagcaaaatgaagcaataacactgaactatggctgctacccaaatgatttctttcttcttgattatggatttgtgataacacagaatccttacgatcaagtggaactaagttacgatggagcccttcttgatgctgcaagcatggcagctggagtctcttctcccaatttttcagcgccagccaagtggcaacaagatatattgtcacagctaaacctacatggagagggtgccgttttaaaggtgagcttaggaggccctgacgttgttgatggacgcctgttagctgctctaagggtgcttcttgccgatgatccagaggctgtgcacaagcatgacctgaatacattgatgtctcttgacgtgcaagttcctttaggtcccactgttgaagcatcagcactccggacagttcttgcgctttgcgcgattgctctccaacactttcacacaaaaataatggacgaccaggccattctaggcggtgggccgcctcttatcacgcaactggccgtccagtttagattgcagaagaagttcacgatcgttgacgtgatgcagaatatcagcaggagaatcaagatgttatcgccgcagaaatccactgggtagttctttaatctgtcgtcagacagtcagttaccattctgtactggctactgcagatagcacaaatcccagttgtgattctgtaccatgttcttgttatgatacttccagtgcctgtcattgaaaagttacatctgcgtcgaacagttaattacttccctgtactgattattgcgtataataataagtcccgattttgagtcttgtaccatt

SEQ ID NO: 26734 - DNA, 1358 bp, Zea Mays
atgatggtgttaacggcaatgtatgcaggcctcagcttgtctgttgggagactcctagcctgcaactcaaccaagatctgtgcttataccatttgtttgtgctttctaatggtaaaatgtaatggaattccttccagatgtaaaagtgggaaaaaatttggagaggatttaaaatggaaggcgagtgtggcacctgatggtatatttctgcccagaagagcacgagcaaggtgtaggtggagaaaaacaacagaccagggagatctagcaacaccaacttgtatacttttgcgcggaggaggaagacgtggacatggaagccgaataccagagcacggactgcagcagggagaggtgctggtcagtagcgtttggctggctatttttagctggcgtgatcagcgtataaataaattgatgaaacagggccagccccatgtggaacgatggaatcgacaatgaggaagcagattgagtagatataggtgagaatggttaattacccccgttgacaaggaagttcatgaggtggaagaccttctgcgtggtccatccgaactcgggcacccggcgctggatcctgacgagctgaatctgcaggggggcatgacagagggagcagaggtgaggatccaacggagttgaacgctgcccggtgcctcttgcgcccgctctggaactggaagcagaagggcgcaggagcggaaccaatcggcgaatagcagctgagatcaagcattaattccccgcctccgcgctgccctgtcccccgcagaggaggcaaggaggggagggaggggcgggcgtaccagtgcgacggcggagacgagggcgtaggcggcggcgagggagaagaaggccgcgtcctggcactggggcgactcgttgacgtcatcccaccagccccggagcgcgtcggctgccgaggaagaggatgcggcggtagcgaaggaggatgcgaggtccctcctcatctggccccctctgcttttctcttgtgtgccttgcctgcggtgcgcgagggaggaagaagacgcacaaaggagagaggcaacaagggaaaaggcagtgggcccacgcgtcagtgtgtgttttgggcgtgcgcggcggctggggcccggcagcagtgaggtggggagagcggtgggattcccttctctcttttttttttcagcagcggattgcgtttggcgccggcacacgtcgcccactcgaactaccaacgtccgtttctctcttttctaatctaaatacttataagagcaacttcaatagttattctaaataactcttaaatttaagaagtaaataaaaaaaattcaatgattatctaaaaagaaacagaaaaaagaaaagaa

SEQ ID NO: 26735 - DNA, 857 bp, Zea Mays
ggcgttaatacatgtcaaactaaaagtttaagactatatcctggtccgattttgtagtgggacatttcttttcttgactaattgctttgtgcttctatattttttagtttgacctttcagggatgtggctactaagattgttgctgctcaagtccagcaggctctacaaaccctgcaggttgccgatatccgaagggatcaggccggacaggtaattctgtgctaggttcagcttatagagactgctcaatttgggaccgtcgtcgaaatcagacctgagatctggttgtatgcgacattcaacacgttgagggacaccaggcttccgagtttaggcggcattgttctagttttgctttcttcagttcaaattttctagattttacagattaattaatagcccctaattattggtgcaactaatattcagtctgctaaaatatcaatggcccgcctaattttgtaaaaaaggatgagcactacatgaaccattcctgtactttgtgaactttgtttccgaacatgccttctagctttaccatgttaacaatagacaaccaattcagttggtgctttgacttcttcattccaacgttaagtagtacccctgctcctcaaggacaacatcagcgaggtaattgctttatcccttagcttattttatagttaaataatatacaatcagatgtttgcataccatatctttcttaatttcttttgttccatctgccttgtcatctgtactgcagtcatgttcgtatatgcacattaagatcttcagtgacttttctatatgcacaccatgaacttcactaactttgaagcattgtaggtgacttttaataatattcccattg

SEQ ID NO: 26736 - DNA, 857 bp, Zea Mays
aaggaggtggatcacatgtcagtttccagcaagtaggattggccaccaaggtcgtggagtatatgttgcccaattttaatgaggtctggtgggatatcattaccttagatatcttgatatgcaaatagtttggtgagacatttgaagataattaatgttcatgtcacaaacattcagttaccttgtttatattaatgtgatgtgcaataagttagaattaagcagccgacatgccctccgcttgcttgattttatacaatttctttacatcagatatatatctattagtcagaaaggaaataaaaactaatacatatttgacatacttctgacatcacattttgtttgactatactatttaatgttatgccacttgtcaaatatgcatggtcttgggaatccaagaagaattgttggcatttgtaataacattatttggtaatgatagttctaggttttctacttaaacaacaattatttttgatgcaggtgtttggactggaatgcgcacagtctgttactttgatggcaaaacgcaacgaagtaccatgggtaaggatgtgctggagaatgaaagcttctgtcttaaaacaataggatacaagaagcttgcaagtggttttgtgaaggcttttgtgaatcacttgaatcattagttcttttaagaatggttttgtaaagcgttagcaaatatgtgtaaaacacaataagatgtgtggcaaagtcagtgatctagttgtacagttttttatgtttatgtgatatgtggatatttcattgtgcaatgttaatgaactgtgtatgtctatgtgattatgtgtataaaatatatgttttgtggtgcttttgtgataata

SEQ ID NO: 26737 - DNA, 4315 bp, Zea Mays
cctatatatgccttcgttcctcgatcgtcagccgccgccagttcctttgccggttcgcgcaccacgcaacgcaagtgctcttcccttcttctctctcggttctcgccttctcggccctcctcctctattcttccctctcgtccacggccacaggctagccggccttgagcgcctgtgacggcgcaggttctggggttgcaacacgcccctccgcccttccggcgcatctgctgaattccactctcctcttgcccgccggcgtcgcctcttttctttgctatcgtcggcctcggaccccaaagacgacaacagcaggagggcagcgcacctgtgaaagcggcgcctctcttgccgttaaatttccgcgtcgcctggcttctcttccgcactctgctttcaagcccctctgccatgaccgtgcccaccaaagacgacagccaaagcggcacggtggccgacacagtgccattaccgacataccgttcgttagcagcgccggtgaggaagcctgtcgacaagttcgcgctcctcccggccttcctcaaggttagagggcttgtgaaggagcacatcgactcatttaactactttgtcaacaaaggaatcaagaagatcgttgaggcaaacaaccgaattgaagcgcgcaacgatccatccatttaccttaggtaccttggtgtgcatgttggcatgccctcggtacatgtagagtataacattgaaaatatcacaccacatttttgccgccttactgaccgcacttactctgctcccataaaagttcatatcgaatacactgtcggaaagcagcatgaagtgagaagaaagaataactttatcattggctacatgcctattatgctaagaagccatgcctgtattctgtatgaaaaggatgaagctgaactagcaaaatatggtgagtgccctcttgatcctggcggctactttgttgtcaaaggaacagagaaggtcattctaattcaagaacagctagcaaagaatcgtattattgttgacactgatagcaaaggaagggtgatcgcatctgttaccagtagcacgcatgcaataaaaagcaagacggtgatttttatggataaggggaagatttatttacagctgaatcagttcaacaagccaattcctattatagtggtgatgaaagcgatgggaatggaaagtgatcaggagactgtacaaatggttggcagggacccaagatacggagatctcttatttccatctattcaggaatgtgcttcagagagaatatatacacgccagcgagccctgcagtacatggatgagaaggtgacgtatcctggtgccacaaatcagaaggaaggtcggtcatactcaatcctccgtgatgtgtttattgcccatgtgccggttaaaaatgggaacctacgaccaaagtgtatatacactgccttaatgttaaggcgcatgatggacgcaatcgtaaattctgacacctttgatgataaggattatgttggaaacaagagatttgagttgtctggccaactaatatcccttctttttgaggacctattcaaaacaatgaattcccaagctgttgagcgcatgaataaaaatagtgacaagactcactctagtcctttggattttagccagttgataatgcaagattccattacctttggtctggaaagggctatttccacaggaaattgggatattaaacgttttaggatgcataggaaaggtgtatctcaggttctttcgaggctatcctacatggcatctttaggctatatgacgcggataacaccccaatttgagaagactcgtaaaacaagtggtccacgtgctttgcagcctagtcagtggggtatgctctgcccatgtgatactcctgaaggagaagcttgtggattgacaaaaaatttagctttgctttctcatgtcacaacagaccaagaggaaggcccactgatatatctgtgttatagtctaggcgtggaggatttattgtctctctcatctgaagaaattcatacgccgggttcatttctggtcatgttcaatggattaatactggggaaacacaaagatcctcagaggcttgttattgatttgaggaatttacgtcgatctaatgtaattggagagtttgtaagcatttttattaatgagaaacagcattgcgttcacattgcctctgatggtggccgtgtttgtcgcccacttataattgctgatatggggatatcaaggatcgatgagactcacatggaaaaactgaggcatggaacttgtggttttgatgatttcctgcgtgatgggttgattgaatatcttgatgttaatgaagaaaacaatgcactgattgcattgtatgagcacatggatcaagatgatgttgaaagaagcagcatcacacacattgaaatagagccattgagtatcttaggggttgtatctggacttattccatatccacaccataaccaatctccacgtaatacttaccagtgtgcaatgggtaagcaagcgatgggaaatattgcatataatcagttgttcagagcagattcactactgtacttactagtgtatgcacaacggccactgctaacgacgaaaactattgagttggtggggtatgataaacttggcgctgggcagaacgccactgttgctgtcatgggatatagtggttatgatattgaagatgcaattgtgatgaacaagtcatcccttgatcgaggatttggccgttgcatagcattgaaaaagtacacagttttaaaggataactatggagatggtgtatccgatatgattgttgaaccccaaagagataatggtgttttgattaaacagaatatgagagcgttggatgaagatggaattgccggacctggtcaaattattcgcaatcatgatatctatgtaaacaagcgaactcccaaaaacacttcaaaaggtattggtagggcattgagagaaagtgactacaaggactcacctgccttgtacaaaggtgttgatggtgagactactgtggtagatcgtgtaatgctgtgctcagatacaaatgataagttatccattaagtgtattattcgtcacactagaaggccagaggttggtgacaaattcagtagcagacatgggcagaaaggtgtctgtggtacgattgttcagcaagaagacttccccttctctgagagaggaatctgtcctgatttaatcatgaatccacatggtttcccaagtcgtatgacaataggtaaaatgattgaacttcttggtggaaaggctggtgtttcttgtggacggtttcactatggcagtgcatttggtgagccaagtggtaatgctgacaaggttgcagacataagctctactctaatcaagcatggtttcagctataatggaaaagatttcttgtactcaggcattcttggtcagcctcttgaggcatacatcttcatgggaccaatctactatcagaaactaaagcacatggttcttgataagatgcatgctcgagctagtggaccgcgggtgttactgacgaggcaaccaactgaggggcgaagccgtgatggaggcttgcgtcttggtgagatggaacgtgattgtctaattgcatatggcgcgagcatgctaatatttgaacgtctactgttatcaagtgatccttatcaagtccaggtttgcagaaaatgtggcttgttaggctactacaatcacaaactgaagacttcatactgttcaatgtgcaagaatggggaaaacatggccaagatgaggctgccatacgcttgcaagcttctattccaggagttgcatgcaatgaatgtagtaccacgcttgaagttaaccgaagtatgacagatgctgggactgtacaatgagagagatgctggattcgaaatgtgtttagagctatatgataaattaaagccctctttgataggggcatagggcttttttttttttgttaactggttcgagagaaaccacgtttaggtgtgtggtttcagccgtctagctagtctcttcgcgggcttctcttctcccgcggaggtatacaagctatcgccgggcaattgttgtatatatagttttttcccgatgtcatatatgaaggaatctggacctctttgtttagatgatcgctgaacgccctgcagggctagattacgatctttgaatgctgaatcattggcatgtgccattattattctagagtcactcgataacccaccctctatccagataattgcactgacgccccctttgataattacattctaatgatagtaatttgtgc

SEQ ID NO: 26738 - DNA, 4254 bp, Zea Mays
acccgacgagtaaagccatgccgctatagaatcgtactatcgtagtcgtcgccgccgccgccatcgcgccgctccggatacattcagcttgctcatcctatttgtttgcttcatcactgcttttggtggatcagatataaagaatctatatgctctgagggatgaactcgtggaatcaaagcaattccttcaagactggtttgatatagaaagtcctccatgcttgtggtcacatataacttgtgtggacaaatctgttgcagtcatagatttgtcaaatatcccactccatgttccttttccattatgcatcacggcattccaggcacttgctcgtctcaacttaagtaggtgtgatttatttggtgagattccagaagccttgggaaatttgaagcatcttcagtacctggacttgagcagtaaccagcttactgggattgtgcctttctcattatatgatttgaagatgctgaaagaaatagtgttagacagaaacagcttgtcgggacaattgatccctgccattgctaagcttcagcaactcgctaagctaaccatatctaagaacaacatttctggagaacttcctccagaggtgggcagtttgaaggacctagaggtcttggactttcaccagaacagcttcaatggatcaataccagaagcactaggcaatttgtctcagctcttctaccttgatgcaagcaagaatcaactcactggatcaatatttccaggaataagcacattgttcaacctgttgacacttgatttctcttcaaatgatttggcggggccaatacctaaggagattgctcgcatggaaaatctagagtgcttggttttggggtccaacaatttcactggaggcattccaaaagagattggtaacctaaagaagctaaaaaaactcattctctctgcatgcaacttatcaggcaccatcccttggtcaattggtggtcttaaaagcctacatgaacttgatatatcagacaacaactttaagtcagaactcccagcatctattggtgagctgggaaatttgaccgtcctgattgcaatgagagcaaagctcataggcagcataccaaaagaacttggtagctgcaagaagcttactctccttcgtctgtccttcaataggttaactggttgtatccccaaagaacttgcaggtttagaagctattgttcattttgaggtggaaggtaacaaactgtcaggtcatattgctgattggtttcaaaactggggaaatgttgtatctataagactgggagataataagttcaatggttctatacttcctgccatatgtcaagccaattctcttcagtcacttgacttgcatttaaacgatctgacagggagtatcaatgagacatttaaaaggtgtaggaaccttactcaactgaatttgcaaggcaaccatttccatggtgagataccagaatatttggctgagttaccgctcacaattctggaattgccctataacaactttactggactcttgcctgccaagttgtttaagtcatcaacaattttggagatagatctcagctataacaagctcactggctgtattcctgagagcatttgtgagctccatagcttgcagaggttgaggatgagcagtaactacttagaaggatcaatcccgccggcggtaggtgctctcaagaatttgaatgaaatctcccttgatgggaatagattatctgggaacataccacaagagctcttcaactgcagaaacttagtcaagttaaacctgagctctaataatctgaacggaagcatctcgagatccatatctcagttgacttcgctcactggcttggttttgtctcacaaccaactctctggttcgattcctgctgagatatgtgggggattcacgaatccgtctcaccctgaatcagagtatgttcaatatcatggcttacttgatctgtcatacaaccggttgattggtcgtatcccaccagaaatcaagaattgtgttattctggaggagctacacctgcaagataactttctgaatgaatctattcctgtggagcttgctgagctgaagaatcttatgaacgttgacctctcttttaatgcattagttggacctatgcttccttggtccacgccattgctcaagctgcaaggcctttttctgtctaataaccacctaactggcaatattcctgctgagataggtcgcatccttcccaacatcgtggttctaagcttgtcctgtaatgcatttgtggctaccctaccccaatctctactatgcagcaagaccctgaaccgtctggatgtcagtaacaataacctctctggtaaaatcccgttatcttgtactggctttgaaggaacattgagctcgctgatcttgttcaatgcaagcagtaaccatttctcagggagccttgatgggtctatctcaaatttcgtacatttgtcttatcttgatattcacaacaacagcctcaacgggagcttgccagcagcactgtccaatctcagtttgctctatcttgatgtctcaatgaatgatttcagtggtgccatcccctgtggtatgtgcaatctatctaacatcacgtttgtcgatttctctggtaaaaatactggcatgcatagcttcgcagattgtgcagcatcaggcatttgtgctgctgatattaccagtaccaatcatgtggaggttcatacacctcatggaatggtaataacaatgaccatttgtgccgccattctcattgtggttcttcttgtggtttttgtgaaatggatggtgttgagaaacagttccttacctcttgtatccggccttgaatccaaggccacaattgagccagcctccagtaaagagttgctaggaaaaaaatcaagggaacctctaagcatcaatctttctacatttgagcatgcactgctgagggttaccatggatgatatcctgaaagctaccaataatttcagcgaggtgcacatcataggacatggtggttttgggactgtctatgaagcagcattccctgaaggacagagggtcgccgtcaagaggcttcatggtagctgccagttccttggtgaccgtcaattccttgctgagatggagaccattggaaaggtgaagcatcataaccttgtccccctacttggctactgcgctcgtggtgacgagcgtttcctgatctatgagtacatgcatcatgggagccttgagacatggctgaggacccatgaaaatacacctgaagcaattggatggcctgaacgtctgaggatctgcctcggttctgctaatgggctcatgttcctccaccatggctttgtgccccatatcatccatcgggacatgaagtcaagcaacattctactggatgagaacatggagccgaagatctctgactttggccttgcaaggataattagtgcctatgacactcatgttagcaccaccgtctctggcacgcttggctacattcccccagaatatgcgatgattatggaatcgaccgcgaggggtgatgtctacagctttggcgtagtcatgctggaggtgctcactggacggccgcctacagggaaagaggtggaagaagggggagggaaccttgtcgactgggtgcggtggatgattgcatgcagtcgggagggtgagctgtttgatcctcgcctgcctgtttcaggcctgtggcgagagcagatggtgcgtgtgcttgccattgctctggattgcaccaccgacgagccatcgaagaggccgaccatggtggaggtagtgaagggactcaagatggtccagctgatgaagcgtgattctcacaacccccagcatcatgcggtgcagccatgatctgggcatgtactgctgcctactgtttgtcactgttggagatgagcttggagcaaactacacccctacaactattttcagcttcaaggcagcttctgaagcggacaactcggcagatgggtcgcgtgcacaagctagggcagagaagaataaggcgccaagccaaacagaaccaaaacttcgtgtatgagtatgaccgaaccctgcgcggtcgtgggcatgcagagctcccgatgtgcgtggttctcattcaagccctgttcgtttaaatatttgatgtatgtgttttatataaatgagatttattgtcattatttaaatatggacacaaaaataaagaactgaaatgaacaatatattgagatagagggagtatattcgag

SEQ ID NO: 26739 - DNA, 1748 bp, Zea Mays
gtcactaggcactagccacccgacctgcctgtaggctgtagctgtctcctatatgctgcgaccctagcctgccttgtcttcttcatcaatcatcaccgcaagcgtgcgcgcaacccagctcccaccgacgactgcaccggccgtcgctgccgcgctacttcggccccttttccggcgacgagcaccaccaggtagctgctaatggagattgacagcctcagagaaggatttgatcgagttgctgagaaacgttcattatcttctgctaaagctctggaagttgttgatcaaatagtgaatgaaattgagcaggctattgtgaagctgcagatgatgaatacagattctactggaaatgttgaccacccatccatccttgcagaactgaaagctaagctcaatgaaatggcaccactaaaccagcttgaaggcagccaaaaggagctcaatgttgctctgagcaaatatctcaaactccttgagaagtctttcaatccagatatatctaaggcatacagaaatgtggattttgaggtccatacagtaaacaatatcatagcgaatcatttctaccgccaaggcctctttgatcttggtgacatgtttgtccatgagtgtggggaactaggcggagcttccttgaagctaccgtttcaggagatgtatgctatccttgaagccatgaaagcgagaaacctcgagcctgctctcagttgggctgccaaaaaccatgatcagctgttgcagaatgggtctatgctggagttcaagctttatcagcttcagtttgttgaaatattgtccaaaggcagtaggggtgaggccaaagatgaggctcttttatatgctaggactcacttggtcccctttgcagccgtgcacaaggaagaattccagaagctaatggcttgccttctatgggttggccggctcgatcaatccccatattctgagttaatgtcatccgcgcattgggagaagctagctgaggagctcacccatcaattctgtagccttctgggccagtcgagggagagcccgctgagtgttgcagtgtcagctggttttcaaggactaccaactctgctgaagctgacgcaagtcatggctgcgaagaagcaggagtggcaagttatgaagcagcttcctgtccccatagacatcgggccagaattccagtatcattctgtctttgtgtgcccggtgctcagggagcagtccagtgacgagaatcccccaatgcggatgccttgtggacatgttgtctccaagcagtccatcatgaagctgtcgaaaagcagctcgagggccttcaagtgcccctactgcccctcggaggctatggcgtcgcattgcaagcagctgcatttctagatgtgttaatcttttctggctgcgcaaaactgcaaacctgttgtgtgttgcttaagtctcttctggagattaaaggaattcgaaagtgttggtggacaagtggacgtggactgtttgggagtatttctgctagactatagagaccttgctagtaaacactagccattagatgcgtgagaacatagaggttatacctttggtttggtgttggtgagggatgtcattaaggtggggagagtcggtgagggtgtgtttgtttgaggaataagtaggccatcatcttctcattctttactttctttttatttgtggaatataatgagttgattcagcactatttcattctttataagctaatactaccttcgttctcg

SEQ ID NO: 26740 - DNA, 2573 bp, Zea Mays
cggagcccgcccgccaccgccacgccagtaccgagatatgtaccaaaagtcgatcgacgacccagctggtttctggtcagaaatcgcagatgagttctactggaagcagaagtggagccctgataatgtttgcgctgagaaccttgacgtgaccaaggggccgatcatgattgaatggtttaaggggggaaagaccaacatatgctacaatgcagtggaccgcaatgtggaggcagggaatggggacaagatcgccatgtactgggaggggaatgagcccagtcaggatgggaagctcacctactctgaactgctggaaaaggtttgccagctgtcaaattacttgaaaagcgtcggcgtacgaaaaggtgatgccgtggtgatctacctaccaatgttgatggagctgccgattgcaatgcttgcttgtgcccgcattggtgctgttcactcggttgtgtttgctggcttctcagcagatgcactggcccaacgagtcattgattgcaagcctaaggttgttattacctgcaatgctgtgaaaagggggatgaaaatcatccatctcaaagatatagtagatgcatctctggatcaaagtgcaaagaatggagttgatgtaggcatttgcttgacatatgaaaatcagtccgctctgaataaagtagacactcgatggaaaacaggaagagatgtctggtggcaggatgttgtgcctgatttcccaactaaatgcgatgtggaatgggttgatgcagaggatccactgtttcttttgtacacaagtggcagcacaggaaagccaaagggtgtgttgcatacaactgggggatatatggtctactctgctacaacatttaagcatgcatttgactacaaaccaacagacatatactggtgcactgcagattgtggctggattactggacatagttatgtgacatatggtccactattgaatggagccacagttcttgttttcgaaggggccccaaattaccctgatcctggccgctgttgggacattgttgataaatatggagtgacaatattttatacagcaccaacacttatacgctcacttatgcgtgatggtactgagtatgttgctcggtactctcgcaagtctctccgagtacttggaagtgtgggtgagccaatcaaccccaccgcatggaggtggttgtatgatgttattggtgactcacgatgccccatatcagatacttggtggcagactgaaaccgggggattcatgatcactcctttacctggtgcttggcctcaaaagccaggatcagcaacgtttcctttcttcggtgtgcagtcattgttgacgagaaaggtcgggaaatggaaggagaatgcagtggatatctttgcataaagaaatcatggcctggggctttccggactctgtatggagataaagagagatatgagacgacatacttcaaaccatttgctggatattatttctcgggcgatggctgcagcagggataaagatggctaccactggctgactggaagagttgatgatgttatcaatgttagtggacaccggattgggacagcggaagttgagtctgctctggtttcacatccaaaatgtgctgaggctgctgttgttggtattgatcatgaggttaaaggccagggaatatatgcttttgtgactttggtggatggtgttccctacagcgatgatctacggaaaagcctcgttacgacggtccgcagtcagattggtgcgtttgctgctcctgacaagatccattgggcacctgggctccctaagacacgaagtgggaagatcatgcgaagaatcttaagaaaaatcgcatccaggcaactagatgagctcggcgacacgagcacgcttgctgaccctggtgttgtggaccagctgattgcactcagtgacagctaatctatcggctatgtgggagggggtgagacatgatcactgcctgcactatacttatgcaaaattcagctttatgatgcgaggtctgttgggcccagcgttctcttaattgcttcggtgtcatggggatgccaacaaaagagagatgctgcgaacttggggagatgcggacatatgcggggtgcgtctgtaaattgttggatcgcagtcactgatagttattgtacattggtaaataaggagatgaagtgtatatgcgagttttggctaaaatgtttaatgatagatctcgcattttatggttacgtacaggattcagccatggacattgaaggacaacgtgtttactacacctctttgttcgctgttcaaagcatgagcaccatcttagaaacattggaatttagggatctacatgagaattgagctgcttcggtcgaatttctgcggaggcagctgggatgtgtcccaaactagacacggtcggtaccaatactccttgaaccaatggggcacgggaatttggcagagttccgctcccaacttcggagcggattctacgtatctctaccaaacacgatacaattgtattttggtaggtgataaatcgcttcttcatttatactattgagttctgacttctg

SEQ ID NO: 26741 - DNA, 4309 bp, Zea Mays
cttccgctccggcgatgtcggcgaccatggcctctgccagtcagccctcctcgcagcaacctccacctccaccgctcactgccgaaatcgttctccgcctcgcctcgcgcgacccctccaccgcggtgcccctcctcccggagctcccgcccgacgatctcgccgatatcgttgcctcgctcaccgccacctcccccgcgggccacctctcccttctccccgcgatcctcgctctcttaccctccccatcctctgcctcctccgcgttcgccgctctcctctccgcgcccagctggccctcctccacgctcctcgccgtcgccacactactccgcgacctcccgccggcctaccgcacccgcatccccgccttcctcgggaagatcatctctctccttccaagtgcggatgcccaggacctccctgctctctcctaccagctcctcctgctcgcgtccaagccgctctacccgcgcgtcgtcctcgcgggactcctgcgcttcttcggcggccgccgcggcgcccgcgttcgcgcgccgccgtctatcgcgcggcaggtcgagagcaccgcgctgatgaacgtctcgttcgcggtcaagcaggaccccgcgctggcgagggaggtcctggccgccatcaaggctgacgccgcgggcgctctcagtggatttgcggtggcagtgatgctgttcgtggccagggtgccgaggttcaacgagggtgccgtgagtgtgctccgggatgcggtcgtggtgtcccgccgggattaccgaatgtcaaggcggtgcaagtggttgccggattgtatggaaggggaatatgcacgggccactcaatgtgtcgagaagggaatactaaaatctgtcgacgagagcattgttggcagggagcatgttgtgccaagcattgttcaggtggcttttcgcctgttagaagtctcagaaggtgatcaaggtgaggaagctggcttaggtgaaggagtaatgagcaccgaagaaataggcattaatatgctcaaatcattgtttgaggtccatgaaatggcacggactgagataattgaacagtgcaagttccggattctctcggcaaagcctcagcaaagtgtgccagttctcaggttgattggatgcttgattttgagtcatccatttccaatgctggaattcattgcacatttaaaggagttgttggattatttttcttttatgaatgacaagatatcaactgctttgatcagttgcatcttgccactcacaaagttcagccgtgatctgaaggattacgtaatactggttgtaagaaaggcgatgttcaagagggaggacatggttcgaattgctgctacaaatgctataattgagctgattattgcagaaaacaagaaaaatgaagccaatccttttgaagattcaacaagtcagccaagctctagccaacagcctgaaacacatctagagtttggtaggtgtctctttcaggaactaagtgggttgcttcggagatgtctctcacatcaggccagtgtcaaagaggtcttgtacgagggtcttatacgtactgctatctctgatccagctgtttctgacaatatccttgattttctctggcctcacttccaaaactattactcagaggatgcagaatgtcctcttaaaattggttcatgcttcaaagtagagcatgccaaactatgcattgtggaacctttagattgtctgctgtcatgtatctcaagaattctgcaaattaagcaacatagtaaatgtgaacgaccacgtgatgcatattggaagtgctttggttttgctgcttcacaagataatgaggttggacgagcatcatcaagtgatttattcgtgaaagctttatcaagcatccaaaagtatttgaggatatccctcacagagaggacaaagccaagaagctggatctctttcttcaccatcagagatggctcattgtcataactttgctatgcttggaatcattgaggtttttattgatttttctgcttcaaaactggagaaagcctctggcaaatcgaaggaaatgatagaaaaagaaatcgtggagcttgttgatgcgcacagtggctttgagaaaaaaattagcagtggtagggaaaggatagcacggagaagagcaaatgctggtgatgctacagataagcacaccaacgaacccagggagaattctaatgcttcattgcagaaacatcatggaaacaggggtaaatttgctgattcgagtttgtatgaactttcggtaatgtgtgtcaagcagtgccatgctgataactacaacaatgttagtcaacattctagccaaactaaattgaaccagagctccaatttgacatcctttgtactgaaagcctttcttgaattgttgaaatcacttgcatcaaagcacagtagggacttcacaataaagctgcatggagattttaaaaagttaagccagccaataatgcagctagtatggtgttttctgttagacccaattcaagaaaatggtggaagcaagaagaacatgacccaaggaaagaaaaacactgagtgcaaaaaggatcagttatatttggctctgacatgcctaaaaaaattccttgagccaagtgtttcaggagaacactctagtgatatcattgattttctaatatctttggctccacctaatatagaggatacaatgggtactggggatcttgacaataatgataccactatggttgaagatagaagcacaagaaatgtccatgtgattttgaacatactgaagacgttatatgccagacttcttacccaatcagttttacgtgaatctgaggctgtaattgaattgattctgggtatttcaagaaaactgcaacttgaacgaaggcatcttgttggaaaatgggctacagatctatgtagaaagaaaaccatgcaaagtcctagaatggcacgagagatgttaaaactagctatacatcttacaccagctccagatgacatgattcttgtttatgaggtgtctactgagttgatgaatttaatgacctctggagatgatggagattcttctgatacatttcatatcattaactgtaaaacaaagagctcactcgctgctctctctcttcaaatggttgagtcatctcttactgaattggattggggctttggaaagcttaaagcaatgcttacattaggttatgattgtgctaacattgatgaagatcaaccagcagatgaaataatgctaaggttggctttggagaaagcactctactcgagatcaacattagtagttcaagtgctctcttcctttgcacatatgagccctatggatactcaagcagaacattttctgaaattgactgtcaagttctacaagcttttaactcgcatgtcaaagtcccagattgtacctaaaggctacagacaatccattccaagcctcaagtttcagaaactggcagaagtaacttgcaaaatgctcaccgctcccctttatgattttgtgtttcaacagaatcagcaaatacccataaagggaaacctcgccaaaattagaagagaaaccaaatgtatccctgatcttatttttcagattgaggattatgagaagtatttaatacagctaagcaaactaactaaggtaaaccttttgaggcatgccaaacgcagtgtagcaagagacttccagataaaagataaatctgggggacaacaggaagatgatcacattccagacaatgctgcagcatctgataacgaggctgataaggacgcaatgggtccaaacgcaccagttgaatcatgtgctgacgatgctcaaaaatcatatgctgacgaaaatgcatcatgtgaaagtgggcatgatgaggatgcaggaggtccaaacactccagcagaagcagatgctgatgaaatcattaggtctagcattccatatggtagtccagtccaggagtctgaatctgatagagaagaggaagaattattagcacggacgaagagagctaagacaaaacaagttgtgcaggattctgatgaggatgcagatgagtaggtttttaaacattatcaatagttcaattttcgaagcgtctattgtgggcaacatcatgccaaggtgtatatacataagtttttatgggttatcttgctgattatagacgatgaacacaagagatgtaaaatatatggttttgcaaaaattcttgtgggccatcatgttgattatagaccatgcacagaacatatgtaaaatactttattgtaaattataagttattctaattttctttaagtgaaaa

SEQ ID NO: 26742 - DNA, 1887 bp, Zea Mays
gactggggcacgcaactctatcgatctccgcccacctcgtccctcacttgccctctccctgccaggcttgccggaaccctagcctcatcgcccctcccctcccggcccgatctccctatcgccggattcgtgctgcgggatggactccgacgtggagatgaacgccgccagcgacgaggaggtgatggacgatgaggattactacgactactgctacagcgacgtgggtgacgacggcgacggcgggagcgaggaggagctggtgcccgtggactacgacgagggccttgaggccgagggtaccgacgaggtggtgtccagacgcgagcagacatttgtggttctaaatgaagaagttatatctgagcgtcaagaggaagatgtaagcaaggtatcagccgtgttactgattacaagggaagaggcatgtgccctcctgcatcactataaatggaacatcagcaagttgagtgatgaatggtttgcagatgaagaaaaagtccgccatactgttggcttacttttgaatggaaatcatgagcccggctctaggaagggtattcttctgatacgatgagctctgctggttgtgctcatttttattgccatgaatgttgggaaggctacattagcgctgcaataggtggtggtccaggatgtttgtctttgcgatgtcctgatccatcatgcagtgctatggttcttcaagggatggttaatgaattagctaaagatgaggacaaagcaaagtacgcacgatttctcttacgtgcatacgttgaaggtagcaagaagactaaatggtgtccagctcctgactgtacatgtgctgtggagtttcttggtgatgaaaactatgatgtctcatgcaattgcaagttcagcttttgctggaattgcactgaggaagctcatcgaccagtgaactgcgagactgtttctaagtggatattaaagaatagtgcagaatctgaaaatatgaactggtttgtcgcaggctcaggactagcgtttgatatgtggtcttcaagtttctgtttttgttgataccatctttagttaagacatggcatataaataaggagttccttgattttattttggatgattcaacctattcaactttataccttctgattttgattattttttgtaatgtttcgtttatcagttcagactaagcacaatgataactaattcttgtgtggttggatcttcatatcctatttcaccgaccttttagcggtttattgaacaatgtaaatgtcacaatcctggaactattcgccttgactgctgacaataagtgagatggtgaaacaaatctgcctaaagctagttgtttagggcctttaggctcacaggcttttgataccatttctctaaggcatttaagctgaattggaaatgggtggggaagccacggcaaatatttatgtgaggttgaatcataggtgttgtgactgttgtcaactatgaaaaatatcctagtaatttaattattttaacataattttaagatagcatttttgtttactgcaagttgcttgggatcaataggcattgtcgttactgctgctatagattgacgatagctaccttttctctgaacatgtaggagagctgcatatcattatattaagaaggtgatgagtatagctagtttgactttatgtggcttgtaaatgtttgggattgatttaattttcatttatttgtcttgttgtttcttaaaaaaatccctcactaggcagtaggcacaagcaactaaggcactgttcaacttaaacttcgcattacctgcattatataaacatgttattgaggtaatgtgccaatgattgtttttattagctggtaatcatgattttttattctattccttgt

SEQ ID NO: 26743 - DNA, 1272 bp, Zea Mays
gctggactcgtctccgatcctccaccaccaacttccattttccccaaccctccacgcccttctccaagaaacagagcgacgatagccgtgtcgacgagatcgacccagcagcaggatcgatcggtcagagacgatgatgatggattccgcggagcatcagaaggtgatggggatcgcgccggcggcggcgcccgcagcggaggcggggagaccgtgctgcgtcgagtgccgcaccaccgcgacgcccatgtggcgcggcgggccgacagggcccaggacgggtgcggcgatgacggtgacatgcccggtgaatgattgggtattccaatccaatcataggctgggctccatcgattggccgccgccgccgtcgcatgcggagaaagctcgatcgagccgctttgagctgattggttccgctttgggtggttaggtgagctgttctaagcaaggcaagggaagggtgctaacctcccctcccacccgcggccagttccccgcccctagctgtgaacgcttttaaaaaaatgggttcctaatctccttttgtttatatatatcttattattgctccagcctattgtttagggacatccatgcatacatgtctccatcacagctgtttgttcctatccagtattaggatcaacagagcaagcaatcaaccagaaactaacttagaaaaaccagcgttttggatgagcaatcttgttaatttggtttggttgcagtcgctctgcaacgcgtgtgggatccggtacaggaagaagcggaggcaagagctaggtctcgatagcgccaagaaaccacaacaaaaccagcggccgccgccgccacagcagcagcagcagcaagaggatcactgtccggcaacaagtgcagtcgctgtcagagacaacaccaaaagcagcaggctccaagtggtgaagaaacggagggtcctgatgggagtggaggaggccgcagtcctgctcatggccttgtcctcctcatccagatccacgctgctacatggctaggaactcggcacatcacccaaaaaagggctgctcgttgtgtacatacatatacaggacgcacaaacacaaacaggccacccaggggttccaagccagcgatgtatctgttgggtctatgcttcgtcgccgaaggtcttcaagggagaagcggcttaaaatgtgtgagcaggtatcttcggactcgtatcagaaagggaaaagctacaaaggttgacacagcgccgaagctgtgaagcaggaaagcttcgacatg

SEQ ID NO: 26744 - DNA, 214 bp, Zea Mays
ttgaattctccccctttcctccctccttcttccttccaccaaattccaattggagatttgcacccacgcgacgtagatcaagcgggagggctgcacctaggagaagaggagatgggggcggctagggtttgtgggatggtggctgcaagagtttgagggaggaggagatgagagaggggggcggctgcacaaaggctagagagagggaggcggc

SEQ ID NO: 26745 - DNA, 486 bp, Zea Mays
cgagaacaattattttgtgatgattggggtaattgggctgcccggtgtaggcaagtcaaccatcatgaacgagctttattaatatgatgcaagctacctgtggtaacgaaagagatgccaagtgcgctgaggatgcagaggccagaacatacatacagttcccattttctgaacacaaaccaatggcaccgtcgaattcagaaagagcagaaagcaagttctttttttaactttctttctgatttggctggtatgatgatgtctgtagcacctgtgattaacttctgcattaggagggtgtccaatattttttctttctagataaacttttaaaccctttgggcacagggaatggaagtgagtactaagaacagagcaagtgatatttatgtttctagataaacaggcgtgaggcgtggagtaaaaacagaggaggtaaagaaagggccttcaatcgtgaggcattcattttgattgttcgaaatg

SEQ ID NO: 26746 - DNA, 2436 bp, Zea Mays
cgcgaagtctcgccgactccgacaaccttgcgttcctgtctctgcgtctcgtcgcctcagattcacccccaccacttcctccctccccttggatggaggcaggcagattcccgttccattccagactcgcagtacagtacacacagcaaaagcaccacccgggccggcttcctctagactagattagtgttgctaagagcctttttaactacgggattacgcaagtctcgtatactcatccagagagagacacggaggacctgggtttggttgcgctgcttgactcgctccgtgttccaagcgccttttgagcattcaggcagatataaaattcctctttttacactacaatccccgctgaatcagcagcagcaactctctccctctccgttcttggtggtccgagacccttggccgtacgctctgcctcactcctccgtctcttgcttcccttgccgccggcggcgcgcggcgccgggcgcggatcggcggcgggtgcatggtggaggccgccgccgggcgccggacaggcaccagccgtcggcggcctagcggcagcggaggggagcaccggcacctggtcgcgctcgccgtcgccgcgcgcgtcgccatggtcaccacccggtccgtgggtccagcagcagtagcggaaggtgatggagcgggagctgctgtaacagatgccggcgccgctggcggtggcggacgatgcatggaggacttcttcgactgcctcctcggcttgctcggcgcgttaggcatgacatgggctgcggcgcggccccagcggcagccgcgcccgccgctgcctcgcggggctgcgggggcggggcctgcgccaactgactcccggcgtttcgcggcggagctcagggccacccccggccggatcgccggcaatggcgcctgcgccgtcgcgtcactgtacacgctgcagggcaagaagggcgtcaaccaggatgctatgatcttctgggagaacttctgttcaagagatgataccatcttttgtggtgtgtttgacggccatggaccttatggccatttggttgccaagagagtaagagatctgctgcctctaaagttaggagaaggtttgacgacggaagatggtagagtaacatccactggcaacattaagctcaacacacatgatgtagcttcaccagaacacatagacaaaggaagtactgccatttcctctgaagctcagcagaatggagagtatccagagaccttcccagcattgagaacttcattcttgaaggcattccgtgtaatggatagggatctcaaattacataaaagcattgactgctttttcagtgggactacagcggtggcagtgatcaagcaggaacacaatcttataattggcaatttgggggattcaagagctgtcttaggcaccagagatgaaaataaccagcttattgctgttcaattgacagttgatctcaaacctaacattccaagcgaagcacagagaatcaggcaacgcaggggcagaatattcgcgcttcccgaggagccggaggttgctcgtgtttggcttccaaagtacaactctcctggactggccatggctagggcatttggagacttctgtctgaaggaccatggtgtaatttctacgcctgacgtctcctatcaccacatcacggagaaagacgaatttgtggtgctggctactgacgggtctgggacgtgctatcaaacgatgaggttgttagcactgtctgccgagccacatctcaggcctctgcagcccggtttctcgtcgagtcggctcaccgcgcttggcggactcggttccccacttctaagatcgatgactgcgctgttgtctgcctgttcctgaacacagacaaagcgagcgaatcgtcgagttctttggccaagaacttggcagatgctgtagaagctagcagtgctgggcgcgccacaactgtccaggtgagcgctggtgcatctacagatgttgccgccctggtaccagtaccagatgggaacgaggtgtctattgctgaaaccatcacaaagctggtcacgctcatggatttgcccaaggatggttgaggctcctgtgattgggacctgaacgaagatataccacatcggtgggtttctgcttgcagttttttttcctgaacgcaagtgtggctagaatttgcagttttgcttcgtgtaaagtaccgcgtcagtttagcgtgatttgttccagtttttgtaatatttcaattcatgttagtattgatgcgtccgtgcgtcgtcgagatcgtagtattctgtaggaaggaggctactgagtttttgtgcttcctgtaaatatattcatcattctatctctggtgtctgatctatatcatcattgctttgggggtcggtcttattaatataaataaggattatataatcatatcggacgaagtgact

SEQ ID NO: 26747 - DNA, 2299 bp, Zea Mays
agcccctccattgcctcattataaccaccaccgtctcttccttgtgtcttctcctcctttccctcccggccacttctctcgtttcgccctccccctcgagcaccccgccggctagggttacggccaccgccttccacgcctcccccacttcccgtaggcggaggctggtcggcgtgcacgcgaccgcggcggcggagatggacccggacttctcgcccgggggcggggggcccagctttgaattcgccttcaacgaggtcaacttctccgaccgggaattgcgtatcgaggtcgtcgccggggatgactacgctccggggtccagcggcgccggtgccggaggaggtggcctcgccgactgggcgcgccaccgcaagcgccgccgtgaggagctcctcaaggagaaagaatctacaactcacatgtcagaccaaacaaattgcaatgaagttgaagcagaagagtgtgatgcgtatgaagaaaatcaagaggaacctgtagcaatggtagaagaatctccacccgatgttggccaagatggtgatgatgggcaaggtattgattcgtcttggactgtggttggtacaccagttttacgagtcaagacaatttatatcagttcagcgattcttgctgcgaagagtcctttctttttcaagcttttctctaacggcatgaaagaatcggatcagagacatgcaacccttagaattactgactcagccagttgctcacaagcttgccgatgaccacagaatctgcacttctctacctagatctcccttgctcaatttcaatggcagcagcagttcaacctctgacagatgcagctaaggatttccttgctgtaaaatacaaggatttgactaagttccaagatgaagtgatgaacattcctcttgctggaattgaagccatcttgtcaagtaatgacctccaggtggcatctgaagataccatctatgacttcttgctcagatgggcccgtgcacaatacccgaaatcagaagagagacgtgagatccttagttctcggctgctccctcttgtgcgattcagtcacatgacatgtaggaagctgcggaaggtcctaacatgcacagatatagaccacgagcaggcaaccaagtgtgtcaccgaggctcttctgtacaaagctgatgcaccacaccggcaacgagctcttgcagcggacacaacaacctgtcggaaattcgctgagcgggcttacaagtacagaccactcaaggtcgttgagtttgatcggccctatccacagtgcatagcatacttggatctcaagcgcgaggagtgctctcgactctttcctgcaggccggatatactcgcaagcgttccacctcgcagggcagggcttcttcctctcagctcactgtaacatggagcagcaaagcaccttctactgctttggcctgttcctggggatgcaagagaagggctcaacgagcgtgaccgtggactatgagtttgctgcaaggacgagaccatccggcgagtttgtgagcaagtataagggtaactacacatttaccggtgggaaggcagttgggtacaggaatctctttggaatcccgtggcaggcgttcatggccgatgacagcctcttcttcatcgacgggatgctgcatctgagagctgagcttacgataaagcaacctacgtagatgtgctgccgtcgggttaagtgtgtccagtcatgggtgatgtggaaaatgctgtgtgctgcagatatcctttttgttttttttccttttgttcacgcaccttaatccttacattaatagacagtttggtgatgacaaaatataaaggaaaaaaaagggctggaaagctgccttttgttgtttcactaagatgaaggttgtatgatctctgtctcttcgtagtggaagttgttacaccagatgaaaaagaaaagatatcggatgggaatcctcactagcttgagttctctgcaagtttccagattggccggtatctcactgctaatgagctatgttctggttcgagcttttctttttcttttgttttcttttctttttttgatgggaaggacgagctgtcctattggcagcaaatgcggacgtttgtcgttggtaaggcctgctgctgctgcagtggcgctattgtttgatggcgcatttgacttgcccattgcaaggcggttgcagtgctattgttgtagcttagctaggtaggttgtgcctttctgatgaaccttgaactgtactgtcggcgagcaaacttctactcagttgcttatttgaggctggaaaagg

SEQ ID NO: 26748 - DNA, 3129 bp, Zea Mays
tccacctcaaagcctcccgccctaacgatttcgaaatttgaaacaccctttcctccaaatcattcaaccattcacaagtccaaatcaaagcgtcctttcctcttgtaccatctccaccggatccccaaaccctagctctgcatcgactcccgctatgtcctcccgcctcaaggataccggcggcggtggcggcagggccacggccgcggcaacccgcccgctcaccccgaagcccttctctgtctcgtcatcagcccggcggacgaccgccgtcgccgccgccgggaaggagaacaccgcgtccaagccgtccaagcccacctccgccgtgcggtggtccacatcgtcgcttccgcgggccagcaggatccaaagctcggtggagtcctcgaagctcgtctccaccctcagggctcccgtgctgcccgggaggccttccgtcggtaaggataacgtggtggaggcaggcttgcggcggagcgtcaatggtgggatcagggcttcttctgtagagaaagggaggaggtcggttagtgttgttggatccagggcctccgaggctaggagagggagtgctggcgctggtggtgatggcactagcagaagggagaggcttgatgcgaaggccaaggggttggatgagatcagcaggagaagagatgatcttgatgccaaggggaagcagactgatgagattggcaggaaaagggagagctttgatgcaaagcccaagcagatcggtgggaaaagacagggctttggtgtgaatgtgtccaagcaatgtgatgagatcaaggggaaaactgacgcattcgtgagtaatatgaagaagcaaagcgaagatgttggtgggcgaagagtgggctctgattcgaaggcaaaggcaggtgaagaaatcaatatgaggaaagaggggctcaataaattggtgaaggagatgcatacccaaaaggctgatccaggagaagtttcttccaaatccgtggaatgttgtgccacccagaaggatgatgagataggcaacacttctgtcatccctgttttcactgttcatgtggtggattcaatggatgcccctgatccaataaggaaacagcaaaagaataatgaagagggtaggaagccggaagaaaagggaaaattgtcagacaggataagagtttttgagaaagtggctgcaggtggggagggagcgtcagcaaaacctgtgtctgctgtgaacaggtacccaagcaaacttcatgagaaactagctgtgttggaagggagggttcagaagattgctaccgatatcaagaaaaccaaagaaatgcttgatgagaacaacccggacgagccaaagcagatcttgtcaaatatccagaaggaaatcactgccattgagaaggcaatttctcatgtcaaagatgataataagatacagctgggtactgcagagaacagtgaatgtgagaactctcaccctgaaacagctgaaaaatgtaccattgcaaagccaggtgacctgaagcaagctggaaaaggcttgaatgctgatgagctggaggcaaggttccttccacaccacaaattattgaggggccacatatcttcaacttctactcaacaggagtcatctgttggtatgaggaaagattgtaatggaaaaacaagatctgcagcatctaaccctgacgatgatgaaaacagtatagccatggagtttctggcttctttagatggtgaagaaaatgatttcttcaaggagcgaaaagctaataaattggaaaagaataagacatgtgaagtagcagatgctaccagcaagacatcaagtcaaggtagctcaaagaatccagttgttcccaatcataaggaggaaactgaattgcttgctacggaggagctagaagaatttgatgatcgggaaaacaagtcctccatgatgttacaggaagaaactgatgagtcatgcaatagtcaattatcaggtataggaaacaagtcttcaaccggtggatggtttgtttcagagggagaagctgttcttcttgctcatggagatggcacatgctcctattatgacattgcaaaccacgagttcaaatctgagtacaagcctcccagcatggtatcaaataacatgtggggcgattgctggttgattcgtgccccaggcgttgatggatgttctggtagatatgttgttgctgcgtcagctggcaatgcactggatcctgggttttgcagctgggattactataccagagaagtaaaatcatttcatgtcgaggaggaagcttctcaagcctttgctccaacatcaagggctattcttggtgctctctctaatgtaggttcatcaagatctagctctgcactgtcaaatgcagaaagacagcaatggtggtatagaccgtgcggacctctcctgctttccactgctagcaagcaaaagatggtcacagcttatgatatacgtgacggcgatgttgtaatgaaatgggaagttagcaatccagtaatgggaatggagtactccagcccgttacagtggcgtagcaagggaaaggtagtaatcgctgggagtgagtcaatagggttgtgggatgtgaattcacttaacccacaacccttgttgtctgttgcttctggtaagaaattgtactgccttcatgtcaataacactgatgctgaggtcggcggcggagtgcgtcaaagttcatccgaggtggaaggaaacgatggtgttttcagcacacaggaaagcgtaaatgtatttgatttccgtgtacccgctggcatcgggcttaaaatagcgagacatggcggcacagcgaactcaatcttctcacgcggagactcggtatttataggtagcacagaaggaaggctgcaaataaaaggagggtcgaggtcacgagtccagcattactcgctgagaaaggggaaacttgtcgccacctatgagctaccagaattctgcaacgtgtgtcatgtaatatatgtacttcgtttatgcttcacatgtgatgccatctgccgtgtcaagcatcttgctttcactgtagtacttgctagcagatgttatctagttcttacccctggaatgataaattagttaacgaccatatgtttcgttccatgcaa

SEQ ID NO: 26749 - DNA, 2796 bp, Zea Mays
aacgcgcccaaagctcacgagtgtgacacctgactcaaagagcaagctcaattttccccttcccttggaaaaccacgcacccaccgagcccggccgcccccaaccactccgaccaaaccaaaacccagacccactctcccccgaaacccagggcctcgtgtcgtttgatgcgattccggcggcgatcgcgagcgcctccaccaccacccgctcccccgtcctagcgcgcgtttgggcgatctcccctctcgcggcgggcatggctggcggcggcggcggggcacgcggctccgacagggcgggggcggcgcgctctcccacaaccaccacggcgatacagtcgaccatccaatcgatcaaggaggtcgtcgtcggccactccgacgccgacatcttggacaccctccgcgaatccaacatggaccccaacgagacggcgcagaagctgctcaaccaagatccatttcatgaagtaaaaagaaaaagggacaagaagaaggagagtgctggccagaagagctttgctgatagcactgcacaagttgagcaaaactcacaatggatgaagccacatacacaaaagatggaaaatgatcaaagaactcccaagcagggtcagatgtcaggccctactcgtgaatttcgggttgtgagggacaacagatttcaacatggtgtggtggagaacagaccagaattaggacacaaaggttcagcaaatgtacaaatgtctgataggagtactcttgttcagtctggtcgaaaccgctcacctgctacaacctcaggtgaccagatcacacatcaaaatgctatgcagaactccaactctgacacaacccaagggaagagggatgctcaaggtactacagagaagcatgtgaagccatatttgaagaaccctcagaatgagcagcactttccaggttctgacccagctcatgggtcagccaatgttagaattgccggtggaactgttggacctgctcaacgtcatgttggagttgttaattctactaggcaatttgctgcccgttcgggttctcagatgcatgcaccaagtggttcttatgcaaatattcagagggggagttttacctcagtaggggcatctgggcgttactcagctttcatgtctagaaacattcaacaaaaccagagacctgatacaatgtttcgtggaaggcccactgttagatcttttgttgcacaaaacaccaacagatatcaccagggttctactagcaaccaaaaagcagtacaccctattaaggagtggaagccaaaatcgacaaagaagtcaccgaccattgatgcagataacagtatagctgatgctacatctccttcagctagcaactgtgaaagtgccaacacactgaatgtaaacgaattgcctgaaaaaatttcacaaactaacttgcatgaggtggagcatgttattattccggaacatcttcgtgtgccagaatatgagcagaccaagttaaggtttggcagtttcacatctggtttggattcggaacaagtatctgcctcgaccccacaagacactgagcaaccagaacatgtacaagagtcagttcaacaggcaagtgaatatgatagtttggatgctggacctgatgacatggatgagcaagctagatcttcacaacacctgtccacatcaacggctgagatttccttgcccccatctgaggatagtgatcgaatgagtggtcaagtagagaatgatgatggcctgggcttagttcagagcgacactccaattggagcagcagacggtgacaatacccaaatcacctcgactttgactgctttttcggcttatagtcatgaagatcctaatatgcatacaaacaatgaggcccagttatacggactggtggagcctaatgtacatccgcaagtattagcttcctcttctcaggggtacccttcagaaaacccggaagcagataatgctgtgcaagtcttcaggatgccagaatctaatgttcactcacaagttctcccttccacatctgaggctttaaatccacagattgtgagcaacagccctgtttcgatctcgtcacagcagcagcagcatatctcccagcaacaagccgcagcacagatgtaccctcaaatgcatgtgcagcattttccaaatttcatgccatatcgacaactctattctccagtttaccccatgcctatgccaaactattcgccaaatgtcccttatccatcaaatggaaataattatcttcagatgcccagtggaggttcacatttaactgcaggaagcgtgaagtatggagtttcacagtttaaaccactcccatctggtaacccttctggctatggaaattacactcatccagctggttttacaatgggttctcctggtgttattggagccacagttggtgttgatgatgtcaataggatgaagtacaaggacaacatttatgcctcaactccacaggtcgagacatctgacatctggattcagcaagctagagagatgccacctatgcaggttccttcatattacaacataccaggtcaagcaacaccaggtgcttttgtgccaaatccagcaaatgcatctttcaatgctacagctcaatcctctcatgtgcagttcccaggcttgtaccatcctcagcaacctccctctattggttttagtgtgttatgcaatctaatgcaatgtgataacctggtcagggttctttgtaactgggtacatttggatgattctttggaacaagagtctacaacctaattgcatgtggaaatata

SEQ ID NO: 26750 - DNA, 947 bp, Zea Mays
tgatactcgacttcttttttcaaattaggtaacttggttcacttaagaactacaccatcatagtacaatcttagtatttggttttgaaaaaaacttcaaggtcgatcttttcataacatttggaatcatgagcaggcatcgactttctcagctgcagtgaattgcagtcacatgatccaattagcctctactatgtgcatacatctcttttctccactacagcacaaccaataatttactatgctaaatggctaggagataaaaagagagtgtttggcatgacactgctacccctttcaagcaagtgctgcaagagtttgaggactggcttggaaatcacaacctgtggaaaaaggagcaaggtggatcactcaaccgtggagcatttgttacttgtggaaactgggatttgaagacaaaggtccctgagcagtgcaaggtttcaaaaataaatttacctacctattttatggaatggattaacttgaaggatatctacctcaacttctataacagaagggcaactggaatgatgacaatgatgagagaacttcaactgccaattgttggaaaccaccatctcgggatagacgattcaaaaaatatcgcaagagtggttcagcgcatgcttgctgatggtgctgtgattcaaatcactgctaagagacagtcagctactggcgatgtgagatttcttttcaaggaccgaattaggtgattgaaaagtgacacccccaattcatagtggtgctgatattagttgcctgaaaggcatttcaggattttggagcaaagatagagcgactgaacgctcaatcaacatacaaatatgtctagaaattgtgatgctttaaccaaacaagatcaaattactgtccccaagctcatcttagagtttcaactaaatcacaaattaaaggaaccgtgatatgtgaattagttaacgt

SEQ ID NO: 26751 - DNA, 2416 bp, Zea Mays
gcctgccctgcacctgcgcggttataaaacgctagggagagggcgggagcaagagcgcttggcgaggtcctggatgactgactgaccacactagcgcagcgcgcacaggagcaaaggggggcatcctctatcgcgcgcgcgccatggccaccaggccgggccctttgactgaatggccatggcaaaggcttggaaacttcaagtacttggtgatggctcccgtggcggtccacggcgcgcggcgggtggtcgcgcggggctggggcgacatcgacctggccttcgcgctcatcctgccgtcgctgctgctgcggatggtgcacaaccagatctggatcagcgccgcgcgctaccagacggcgcgcagcaagcaccgcatcgtcgaccgcggcatcgagttcgaccaggtcgaccgggagcgcggctgggacgaccagatcatcctcaacggcctgctcttctacgttggctacctggcgatccccagcgcgaggcgcatgccggcgtggaggtcggacggcgccgtggcgatggcgctgctccacgccgggcccgtggagttcctctactactggttccaccgggcgctgcaccaccacttcctctactcgcgctaccactcgcaccaccactcctccatcgtcaccgagcccatcacatccgtgatccatcccttcgctgagcacatggtctactacgtcctgttcgccatccccatgctttcgactctctacatggggaacgcctccgtcctgggcatcgtgctctacatcgcctacatcgacttcatgaacaacatggggcactgcaacttcgagctggtgcccaggtggatgttccagctcttccctcccctcaagtacctcatgtacacgccgtccaccatggacaagtcgtctgaccagctgtacgagacctcgctcaggggagcggaggagacgcctggcctcgtccacctcacgcacatgaccgacctgcagtcggtctaccacctgcggatcggcttcgcctccgtggcgtccagaccgtctgccaccggcgccatgtggtggtacatgtgggtgctgtggcccgtggcgtggctgtccatggcgctcgcgtgggcctacgggtcctccgcgttcgtcgtcgagaggatcaaactcgggaagctgaggatgcaaacgtgggcagtgccaagatacaacttccagtacggcctgagctgggagagagaatcgatcaacggcctaatcgaaagggcgatactagatgctgatgcgagaggtgtcaaggtgctcagcctaggactgttgaaccaggcgaaacagctgaacggcggcggcgagctgttcaggcacaggtatcccaagctcagagttcgcctcgtcgacggaagtggcctagcgactgctgtggtgctcaggagcattcctcgtgacgcgaagcaggttctcctccacgcaggcccttctaaggtagcgtgcgccacggctgctgcgttgtgcgagaggggcgtccaggtcgtcatgaacccaaacaaggaatatgatatgctcaagtcacagattgcagatagcaaagcaagctatttggaacgacgctccgacaaccaccacacgcctcaggtttggctagtagacagcatcgacgacgaggaacagaagatggcaccgaaaggagccgtattcgtcccaatctcacagttccccatcaagaaaatccgcaaggattgcacctacctgagcactccagcaatgaagatccctgaaaccatgcaaaatatccatgcctgcgagaactggctgccaagacgggtgatgagcgcctggcgcatcggcgggatacttcacgccctggaagggtggaccgtgcacgagtgtggggacgccatggtgcatgctgacaaagcatggtcagctgctattaggcacggattcgttcctttgacgaaagcctgaaagcctgcgaagcccggggttctgtggctggggcctgcgatagatatatgtacgcagatctggacgccattcgacgatggctggaaaactacgtttcagcaatcggtagcacaaattctcccccgctagagaaggcgacttatatggtcggcgtgatgaatgacgaccttgattccaacagcatatagtaactacagttatgttgtggcattgtatgatgcaagtgcgagaaactgctttgtggctgtctgggtgacatatacaattataataaaatgtcgatttggcttgtccttttgaaatgtgccgaggaatactcttttgctgaaaaacggatagggctagtttggatattacaattttccaagaaattactatttttccaagtaaaaataaactaactttctttgggaaaaattaaaatctcgtggaaaaataggatttccaagctagccctaagcagttttttttataca

SEQ ID NO: 26752 - DNA, 1070 bp, Zea Mays
atgttccagtcctcggtactccagtccagacatgaggatctgtatggtgcagcaccatcaggattcaggacagtagtgcggctagtgcctgtggcgaccttgcatttgccactgcgagtaccggtccaagttcttgaaaagcgattgaatgatcaattcgtcatgcgccgtgctcttgagaaagctctaggttacaagccttgtgctatccatgcatcaagtgagaactgcattccaaagccgactgaggagctaataaaggagattgcagttctcgagctagaggtcatatgcttggagcaacatctcctaacactatacagaaaggcatttgagcaacaattttcccctgcaagttctgcttgtgacatggagagcaacaagcagccagcaaggtccttttcaggcatactctctgaagctccagagctgagcttctcgaccccaaggaagcatcatcagctaaaccagtccagtcgaatggtcctggcacgcaagtccacgcctacagcttctacaagcgagactagcaatgagaagatcaatatcggacgcagccattcctcgctcctgcaccgctccgttagggtatctccgtcggcaaacaatctcgctagagctctgaaaccatgccatacttcgcctctatcttttgttgagggaaatgcatggatcctggcgtggtgagtttggcagacatcttggggaccagggtcgcggaccatgttccccaaacgccgaacaagatatccgaggacatgatcaaatgcattacggccgtatacatgaggctgagagacgtccccgccgtgcagcacgccttcttcccctcaccgtgctcatccttttcttcggcgagcgggctgtcttccaaatacaccgcggacatatggagccccaggtgcaggaaagagagcttcgttgaggagtggcaggacaacgggttaggcaacggtgaatctagggagctggccctgccatatgattctgtggtagaggtgtctgctctttgcaaaggtgatcagaggtccgctgacgtgaaggatatgctgcgcaaatacatgttgcac

SEQ ID NO: 26753 - DNA, 470 bp, Zea Mays
gctcaaccacccgcgccgaactcgccggggcctatcttcttccctgcgttctcggtaacagacgcggcgccagtagataaatgaagaccctgcgcttccgccattaacgcagtgaggaaaaaaaatccagttcgccgccatcgctggaaccgagagccaacgccaaatcgaggggagaactgtgagcagagagtaccaccaacgtcgccctcggcctcagcttgcagtcggggttccacagggggtctgggggcttcaatacgttgcttggggggcgctcgtggccggagaaggagggaatgaccgttggggcggccagaatttcatcaccgggcacaagatccatcgcgcgccgtgtgtggagttcgtagcgatttgaatcactcgcgaggtttcgaggatctgaagaatcaccctggtaattggaatctcaagtgtcaggcaagttgtgcccttgatcacttcttttt

SEQ ID NO: 26754 - DNA, 3849 bp, Zea Mays
actttccaggccatcgtctccttccccttctttcaccggcctcgagtcacacgcgtgagatctgtgccttccgccgcggccacatgccacacaacgacgcccggcgagcttcaccgcgatagaggtaggcccgcccgataccaaggaggatggcggcagtgggcgttggtgcagcggacgagcggtgggcttcgttgtgcaactgcgtggtgaacttcttgctggaggagcggtatcacctcacggcgctagagctattgcaggagctccaggaggacggccgctccgcgcacgccctccgcctccgcgctttcttctccgacccagcgcttttcccgcccgatctcgtcgcccgctcatcctctgcgccgcccggtgctgatccacagattttgctagaagagaaaatagcagcagaagaaaagttggcactcacggagtatgatctgcgcctagccaaagaagacctttcacagttgaagcttgaattacaaaaacaaaaagaatcatctcctgatgattcaaatggttcctgatcaagaccttgatgtttggccaaacagttcagcttgtgttcctgatgcccttcgtcgttattactatcagtatctttcttctactgcagaggctgcagaggaaaaaatatccatacttcaggaaaatgaaacattactcaaggacaatgaacgactcaatgctgaaaatgattccttgatgaagagcagggaaggagctaatagtcaggttgccgctttaaggaagtctttggaagctgcacacaaggatataaaagacaaggaaaaaatgattcaagacttgaggcagtcactggatgtccagaggaaggagctgaatgactgcagagctgaaatcacagccctgaagatgtacatcgaagggactcaatcaatcaaacaattgtttgttggaactagtgatggtgtaaagtcgcattcctttgctaattctgtgggagcatcatcattgaataatgaagatgaagattcaaaaggatctgaagccataacaaataagctagcatcagcagtaaatattactgatgatacgcagaaagatcgccaagttctagaaagtagcgctgaaggttcctcagtttcagaaactccagtgtctttcacagctgttgagaatgacagctatggtacatcaaaagaagataaatctgtgtcaaatatctcatcgaataatgtatgttttcagagtaatctgcatggagcttccatgactggtaaaagccaggggagttcagatggcatatccatgtatttatctattgagaaactagagagcccaagtaaacaaaaatcttcagataagattgctttggagactataaagatagtttcagatgcacttccaaagattgttccttatgtgctcataaaccatcgaacttcttccattgatcatatgtgctatagaaaagcatccagatagcgatgtacgggattccttgactcatacattgtttaacctgataaaacggcctgatggagaacagagacgcatcataatggatgcttgtgtagaattagcaaagagcgttggtgagatgaggacagaaactgagttacttccacaatgttgggagcagataaaccaccaatatgaggagcgcagattgcttgttgctcagtcgtgcggtgaacttgccgtttatgtccgtccagagatacgagattccctcattttatccattgtgcaacaacttgtcgaagatgctgcaacagttgtaagggaagctgcaacacataacctggcattgcttcttcctatgtttccaaatctggacaaatattataaggttgaggagctaatgttccaattggtctgtgacccgtctggggcggttgtggaagttgcactcaaggaacttgttcctgctgtagtaagatggggagataaattggatcagatatcaagagtactattggctcatatcctggcatctgctcagcgatgtccacctatttcaggtgttgaaggtacaatagactctcatcttcgtgttttaggagaacaagagcgctggaatattggtgtccttcttcggatgttgactgagttgcttccatttattcatcagaaagctatacaaacttgcccctttgcatcagctgatccaacaagctctacaccagagaacttctcagcatcctgcctaaaatcatatgcaacaggtgactctgagtggtcagcatttgagtggatgcacactgattgcctgccagatttgatcaagcttgcctgcttgttgcctgtgaaagaagataacttaagaaccatcatcacaaagtacctcttggaagtatctggactctacggtaaagattatctggagcacattatgctacctgtatttcttgtagctgctggtgacattgatagtggcgattttacctattttcctctatcaatccagccaaaagtccgtggcttgcgtccgaaaacttcaactgctgaaaaacttgccatcatgtgtgtcttcccattattgttatctggtattttgggttctccttccagtcgtcaacagttggaagagtatctgagaaaagtacttatccaaaacaccaaggatggttcattttctatgcatcatactactgagatcattaacgcagttcggtttctttgcttatttgtggagcaccatagtgtcatctttaacattttgtgggagatggttgcgagctcggataccagcctgaaaataaatgctgcggctctactgagagcacttgtaccctacacggatgtgaaaatagcatcaactcatattttgccagcacttgttacccttggctctgatcaaaacttgaaagtaaaatatgccagtatagatgcatttggagctgttgctcagcatttcaaaaatgacatggttgttgacaaaatacgcattcaaatggatgcttttcttgaagatggatcacatgaagcttctgtttctgttattcgtgcacttgcagtagctgtacctcattcaacagataggctacgtgaatatcttttaaccaagatatttaagatgacatgcatcacacctgtcggcaatgatattgaacggcgtcgtgaaagagcaaatgtactctgtgaagcgctccgggctctggatgctacagatcttcctgctatgggtatacgtgatttgcttctgccatcaatacaaaatctgttaaaagatctggatgctctagaccctgcgcacaaggaggctttagaaatcataagccgggaaaggtcagggggtacgctggaaagcattagcaaggtaatgggggcgcatcttgggattgcatcatctgtcagcagtttctttggtgagaacagtctcctcacaaagaaagaaggtggcgaggaacatgatcctgctggccccaccgctcctgagcaaaacctgcaggctcagccagagagcacgaggtttggtcgcataatgaggagcggctttggagacatattgcgaggtcaaagcaaaggacagtgatgcacttagattgaaatgatcaattacatacatagctgccgataccacattctttgtttgtaagttgacagaatatacctcaagggttgtatgttatttgccgagataaaaaaaaaggatttgacgttgcaaatctagcatcaaacttcctgtatgtaagttgcctgtagttagctgctcatttataagatgctaataattgtgtctttgtttcatttgtttttataaataaaatatataactagatatgagacactttgcccatcttttctgaaatttggatgttatagttggctgacatcatgtaattgatctgctttggttgaaggaacggtggg

SEQ ID NO: 26755 - DNA, 1371 bp, Zea Mays
tatgagcgtcctgccgcggcacattcttcggcgccgtggatgatctgtgccaggagaagatcgacagagtgcgctgggtaatgcgtctcaggactggagccacagaacagaacacattgagtcgacagcatcgtcgtctgatgggttgggccattgggtgtctgcaggaactgaaggacctgaacaagtacaacatccttgcgccttgctaccatcatcccgaaatccaagaggtagagttcagcaacagcagcttgccgcggagtttcagaaggctaggagagacggacaggccgtttccagtgaggaagcggatgtcggggcgttcttggccgctccgtcttgctctcaaggacggccacgtccccatgtggccaggccttagtggcagatcacttccctgcacgagtgatgaagtcgctacggcgtggctggacgacgaagatgttagagctgcgattcatgccaaaccaaaaagcttaattggatcatgggaactgtacactgcaaggatagacttcactcatgatacagggacgatggtgagctaccacaagaagtttacggctttgggatatcgcgtgctaatctacagcggagaccatgacctgtgtattccttaccctggtaccgaagcgtgggtgaaatcaataggctaccaagttactgatagatggcggccatggtacttcggagaccaagttgccggatatacagaaggatacggtcacaatattaccttcctcactataaagggagccggacatgctgtgcccgagtacaagcccaaggaggctctcgcgttctacagtcgctggctggcaggagagaagttctaagaagaccaggaccattacagatttcacaagccttcagttattcgtcgctcatcggacaattactgtgtgcatggactcagagtagatgtatgcagatcagatccgttcactcggctgtgtaagcctctgtatacagctgaagagatttttaacgtgggatcttcacctctactcaattaaccatgggtcagatccattggcaatattattctactattatataaagaataatttaaatatacagaaataaatactcacaagatatcaattaaccatgggttagtgacaaaagaggcatggtcacagcataaatatggatggatgaaagtagtgttagaagcagagagcgagaggggtggggtcaagagtgatgtaaatgggattatctttcactgaacgtgtgtgcatacaaacataaagtgacgaaccaatcaatgtgtcatctagaactaatcggatggtggaaccagcccaccagacccggaacatgtgtgattaacccatttattggattcgtgcacgccgatttggt

SEQ ID NO: 26756 - DNA, 2326 bp, Zea Mays
gccgaacctgacctggcctggccgggagatatttttctccgtcgtcttgctccctcgatctacgtctatttactagtggtacgtacactcctggtagtaaaactacgctaccaccactactactgtatactctgttcatatgaaaaatccaaacctcaaatatatatgagaaaaaagcctgccgagccaacaactgccaaccaagctcgaatcctccagcacagccaagtattcaactttcagtgtcattgcgcttgtggtgttggtactaggagttctctagtgttctttcaagactagcattgtcagcatcatacggagtagatagttagtaaggctaaaaatcgaagcaagcacacgtgctttcgttttgcttctcgactgagtagtagtacttgcgctgaaaatcatcccgtgatttcgctttgctggggcaaagaacgccgacgtggagacgagcctccaccccaacagttagttccccttcttctatgatcagttctgcaagctttgccgctgtgactgaagctccatcaagaccccggttattgataaaccagcatagtgactcaaagggagacgagcatagtcttctcaagactgccggggtggacgtggacctccgagcattctgccattcatcccgtgctgttggggtcagcggtcagccgtttgtcagtgactcaaatctacaaatcaacagcaggttattgcaaaatcaacaggatgcccctggattattagagctagaacaacggctgataatagtgtcagggtgcagataaactgaggcaaatatagttgtgcatctacaagtagagtacaaggcacaatggcctcccaagcctgggttgcagaaagagctataccattgttgaagaagaagccaaacatgggagccattgaacttcagtcagctttggaggaaaagtatggtttgaaaatcaactactagacagtatggtatgggagacaaagggcagcaaacaaattatttggtagttggaatgattcttttgattggttgtataggttcaaagcagaggtagagctaaggtcacccgggtgtatagtagagattgatacagtcatagtagataataagttacattccagcaggtttttctgtgcattccaaggtagcattgaaggatttttaaatggttgtaggccttacattagtgtagagtccacagctctgaatggcctttggaatggtcacatgccagctgccttaggcttagatggacacaattggatgtttccattggcctttgggttcttgactctgagactagggacaattgggtttggtttatggaccagcttggaaaggccataggatttgtgccacatttggcagtatgcacagatgcctgtaagggtctagaagcagcagtccagcaggtatttccttgggctgaacaaagagaatgttccaggcacttgatagagaatatgaagaaagggtttactggagatgtatatggagctaacatgtggccagcagatagagcatactcagataggatgtacaagtatttcatggacaaagtgattgcagccagccctagtgtacaaacttggttagatgaacactacagtctcttctgggcaaggtccaagttcaatacataggtgaagtgtgagtacatcaacaataatctagctgagtgttggaatgcatggattaaacagctgaaggatctaccattgcattgcatggttgatgccattagagagaagggggtgtgttatttgagaagaggaggagcatagcaagggcactagatggggtgatcttgccagctgttgtgcaacagttgaatgctgcctccaaaggactgaaccatttgaaagtgacaaagggtatacctgaccagactgaggtgacagtgatgtatagggatcaagaagtgaggaggcatgttgtatacttagagaaaaaggaatgcacatgtaggtagtggcaggtgacaaggaagccatgcccacatgctttcgttgtaatcactacttgcagacaacctcagctagaaccctacgtggacatggctttctttgtttcaatgctaagggcagcatatgacaagggatggcctaacattactgacatgtcacaatggcctaaggtggataaagatttcaaattgcagccaccaatattcaagaggagaggtgtgggaaggcagaagaaaaacagattcttatctcctctagagaggacaagtaaggctagaagacaagttaagtgcgccaactgtggtgaaaatgaccataggaagggaagttggaaatgcctctaactggaacgaaaaagaggaag

SEQ ID NO: 26757 - DNA, 2169 bp, Zea Mays
ggccgccaccaccgcgccaaatcaagccctccagtcacattccattcgacggccggagcggcgcctcctacctccgacctccttctacaagtcagatccgtccacatatacaacactctcaggaattccctcctctaccaccgcaccgtccacgcgaactcaaatcctgcaaactcctcgcgaccacctcacgcggatcggcgacggcgatggtggcggcctcctctaccgtcgtcgaggtagcggtggcagcagctgcggcggcggcgtcagctttgccgcaggagcagcaggcgcagccgcggccgcggccgatgcacgcgggtggcgccaatggccgccaccacgcgtacagccgcaaggacaagtcgctcggcctcctctgctccaatttcgtggttctctacaaccgcgaggacgtggagtccgtcggcctggacgaagcggccaaacggctcggcgtggagaggcgccggatctacgacattgtcaatgtgcttgagagtgtcgggattctttcgaggaaagccaagaatcgctacacatggataggtttcggcggaatcccaatggcgttgctagaactcaaggaaagggcgttaagggacaagtctggtttggcttctcagcaaaccgagcagcaatctgctgccacaatttctgatgacgaggatgatgatacattgggcaaagaagttgctaatatcgagaatgagaaactgagtcagactgttaacaatccttctgacaaacctggtgcaccccgttgtcgccttagatctgatcataggaaagaaaagtcacttgggttgctcacacagaatttcgtgaagctctttctcaccatggagcaggttgacacgatctcacttgatgaagctgcaaagctgctccttggggaaggccacgaggagaccaatatgagaactaaagttcggaggttatatgacattgccaatgtcctgtcttcactgaatctaattgagaagatacagcaaggggactcaagaaagcctgcgtttcgttggttgggtagggccacaacgccggacacagaaaatggtgtcacagttgttgtacccccaccagggaagactaaatcgaacaaaagagcatttggaactgaactcactaacatcgacatgcatagaagtaatctagattcaaaagttcagaagaaagcaaaactggcaaagagtggtggcgatgtcttgataaattgcaaattggatagtggtggcgatgtcttgataaattgcaaattggatgtacggaatcggcttggacagggtaaacaaagtggcattgtttatggtcctttccaccctgctggcgcaaggaaacatgaacttgctggtggcaataaccccgggcaaagggagatggccgaggactggaagagcctttctgctccatttcgaccacagtacaagaaccaagcactcagtgatctttttgcccattatgttgatgcgtggaagacatggtattctgaatttgctcaaggcagcaacatcatgcaacaacactttggccattttgatgctacaaaatagggaaagcctcgaggcctggcctgtagatgtctgtactcagattatgcaaagccagctgatcccatcgtcttgctttaatttaaccgtaaagacaattatggtcgcgtaacgacaccaggactccaggagtacataggagtggtggtctcagcatggtctacagtacaagcaagagtttcaggctgcaaaattgtgatcccaatattttggttgtatgggttgttgtcagtgtttggggaataccatatctccaaaggacatcaagacgtattcaaatatccctgtaactgtcatgcgctagatgccttgacccaccgagcgctatgcaaagcttgagaaggatggttcgtcgaaacatgtcccaagtgattgactcctcgccattgcttgggttgttctgaataaatatgtttagttggctacttgccttttggtttgtctagctaacacaatttaaatcaaatatttccccaacgtcatcgacaggaacactgtatctactgaccattcgtgattttttttcttggactatggagagcatctgagctacaaagctgttctcttggctacaacttgatatatcaaattgattttgtttgtcccttagtaaatt

SEQ ID NO: 26758 - DNA, 994 bp, Zea Mays
tcccaagtgtggtcctgacttcggccatctgtaaaacctccatcaaagcggacactagtgtggggaaaaaacccctgctgggccgtccgctcccgttcccatcagatcggatcgatcactcgacgagacatctcgcctcctccgccaatcggcatggcggcgctgctgctccgtagactcgccggaacccaccgcggccgcgtcccgctgggggccgccgccgccgccgcctgcggtggagcgacgctcttctacgcgtcgtcttcccccaccgttgcgcacttggaggagacgggcaaagccgctgagcaagttgcacttaaccctgataagtggctagagttcaagctccaagagaaggcaacagtcagtcacaactcacagttattcaggttttcatttgatccatcaactaaactgggacttgatgttgcctcgtgcctcatcacaagggcacctataggcgaggaagctgagggaagaaggaaatatgttattcgcccgtacacacctatctctgatccagactctaaaggatattttgacctactgatcaaggtttaccctgatggaaaaatgagtcagtattttgcaagtttgaagccaggagatgttgttgaagtcaaagggcccattgaaaagctcagatacaacccgaacatgaaaaaacaaattgggatgatcgctggtggttctggtataacaccaatgctgcaggttgtcagggctatcctcaaaaaccctaatgacaacactcaggtctccttaatttacgccaatgtgtcaccagatgatatattgctcaaaagagaactggatagacttgccagtagctatcctaacttcaaggtattttatacagttgataaaccgtcaactgactggaggggtggtgttggttttgtatcaaaggacatggttttgaaaggtttgccaggcccagcggaggactctctgattctttttctctatatcaaatgacatataaggcgga

SEQ ID NO: 26759 - DNA, 2763 bp, Zea Mays
aattccccgtcgatcccgcgcaccatttcgaaaccccgcccccaaatccccgacgtccccgcccaatgccgcccgcgcgccgccgcccccgccgtggcgggactcccgctggcgccggggacgactccgtcccctcctcctccgccgacctcctcgcgcttgccgccacgctcatcccggccgccgccaccgccgcactcaaagccccgccccaactcaagcaactcgtgcactcgctccccgtctcccacccgctcctcatctctctcccgcaagcgctcaccctagccctcgctaccccctccgaccccgacgccggctccacttccgacgcacccccgcccccaccccctcctccacgccccgccgccgtcctcctccacctgctcgtcacacaccccacccacccgcctagatgggaagacctcgtctgcccgctcgcgctgctccacggtcgcctcgcgctcctcgccaccgccgacccaccgctcgcagcccttgccgccgcgtgcttcgagctcgcctggcgcgccgacgcgcctggacgcgaagccctagttgcgcagacgctgccctacctcgtggccctggcgctcacctccggcaccagcgccaggccgatcctccgccgcctcttcgcgctccgcgacgcgctgccgctgctcgactacgacgacgaccagagcatttctgatttcaagatgctcctgcttcgctgcttcgtctcgccgctcttcctcaaggccgaggaagggaggaagttcctcgcactcgtgctcggggtcagcgaggggatcgccagggatgggctggagctcatcagggcgcaggtggggatgaccggggccaagcgcgccgcggttgtagcctacggggaggtcgtcttcagggcatggaaggacgggggttgggtcaagggggaggtcggggaggcgttcctgcaggggatggtggagggcgccgtacacgcagggagcaaggaggtggccaaggcggccaggaagatcctgtcgcctttcgtggagcagagggcggttgctggggttgaaaagttggtgttccagcttgccgaacctgtgttgttccgttcgttgcaggttgcaaactccaatgttcgccataatgctttgcatcttctgttagatttgtttcccctcgaagatccagatgtgactaaggatgttaatgatcctctcctagagaagcagttcttcttgatagacaggctcctcatggatgaatacccagaaataagaacagttgcagttgaaggaatctctcgtattcttaaccaatactgggaaattgtccctgcccccactatttcaaaatttctgagtaaaattgttgatgacatgtccaaggattcttgcaatgaggttcggctatcaacacttaatggtctcatatacttgcttggcaatccacaaagtcacgaaatactgaaagttttacttccaagattaagcgatatgatctcagatactgctctgtctatcagggctgctgctgttgatcttcttttagctattcgagatcttcgatcattccaatacaataaggttgttggtctgggtactttattgtcttcacttgctaatgatcatccccgcattgctcaaaaaattacaaagctcctcattccttcttattttccatcaaagttgagcccaaaagaagcatgtgctcgctgcattgctctaatcaagaggtcaccaacagctggagcaagattttgtgaatttgctctgtctgaagggtcatccccaaggtccattgttgagctagtcaaatattcaattactctcgcattatcacaaacaggacttaactcagatcaaattgatggcctaattattgcttcagtcaatcttattaaaagcttatccaatgagcgctctagtttggctgctttgcgagaatttttggcaaatgggaagctaaggttggtccttcaagttgctgtttctgagcgtgcccgggctgcccttcttggcatagttccagttgttttacctgatgaactatctgtgcttcatgaggaatgcatggatatagttgtgaatgcagctaggatttcaaagcaagaagaatatcaggaaacggtgctggaagcacataagttgatagttttgggtggctggtctgatgaactgtttgaagcattgaccaatactctgcaatctaaagcctctgattttgctgagatttatggagttgaacctcctccatgtcccgttgcatcttcaaggaggaagaaaggcaagtcacttaagaaaatacctgtacgtgacaatgttgttggaaaggggtcatccaaatcaaaaatcagtaatgaagagcttgctgttgcagcgggggcagcatggcaggtcaatgaaatagtaaaaactaaagacttgagagatgcttttcttcaatcctcttattcagagattgtgttttcctccctgaagatcatttctcaagtgtacatcgagcagtgcctatatttggactctttagaccttgcacctgtattggcctatttgagtttggctacatgtaatgaccttccagatgtcaatcaaactggaagctgctttgagtcgtcaacggcaaatcagtcactggatcatctgctcaattgtttcgacaaacttctaaatggaactgttagcaatccaccatcgaaattgaacaagaatggaaaagctttacgatcaaaagaccagcagaaaggagcatctgaagcagtgttgttaaaaatggattccataagaa

SEQ ID NO: 26760 - DNA, 1875 bp, Zea Mays
gtaaccctagcaccctggatcgctaactgaatcgaaaccttcatttctcctcgttcggttaattagccggagatttgtatgcatttaatccatcgatccactcgcaattcggtcgcagcctatttcgcgaaacaaatgaatccgggtgttcacaaacaaaccacccgaaaattaggtgacaagattggagtaccttacatgttgtttccgcaattcaaagtgggttttgctgcaaaagggaggttgtcttgtatcacccattgcctgcaccaggagtgacaaacaacctcaaggatgggatccagtcaaaagttatggaaacggttggcaatgcaatcaactcattcgatccaaatgcgttgcctcggcatatagaaggggcattgggaacagctggaaacctcattaactcatttgagccaaaatggtctgggaaaaatgagtttgatttaaatggggaagctgatttccttgatggatatgaatgccctgatgaatattggggctctgcacctgtgaaggcgcacaaaccagttaacattaagaacctgctgggtggcgttattgcgataatcggtcgcaatttgggaaatactgaagctgaacagccaaaggacactaagaccagtgtctcattccttgggtcggctgatgatggtaacacattcttgcattcctcagtctacatgccaagtgctccaccagtacttgatgaagaagccttaaattacaacatttatagggctgtactggaagcagagccaccagaatggcttcctgacagttatgctagtgcgtgtatgcagtgcgctgctctttttactgcccttacacgtggaaggcatcattgtcgattctgtggagggatattttgcagggcatgctcaaagggacgatcgctgttgcctgccaagttccgtgagcggaatccgcaaagagtctgtgatgcttgttatgataggcttgatccattgcagaacttattgattaattctgtcagcaatgcctcacaaactgcaaagcatgatgtcatggattggacttgtgcaagagggtggttaaattttcccattggattaacaatggagcatgagatatacaaggcagcgaataccttgacaagttacagccaggtggcaagaataaaccctgagaagtctattccccatgcagttcttagtggagcaagtgggcttgccatattgacagttgtaaaagctggtgctattcttacttacaaacttggaactggcctagtagttgctcgaagatctgatggatcatggtctgcaccatctgctatactttctgctggttttggatggggagcacaggttggtggtgagcttatggatttcatcatagtgcttcgtggcccagaagctgtccaaactttctgcagtcgaatgcatttttcacttggggcaggtgtaagtgctgcagcaggacctgtgggcagagtagcagaagcagacctgagagctggtgataaaggatcaggagtttgctatacatacagctgcagcaaaggtgcatttattggtgtctcattagaagggaatctagttgccacacggatggatgctaatctgcggttttatggtgacccatatctaacaaccagcgacattctcacggggaatgtggaacagccaaatgctgccaaatttctttacactgcactggataatctatactcagggctggattggtagtgtacatatgtactttgaatttttttttcgattgtaaaagttgtatatatccacaaaatgctttcgtttgttcggcgtggcaaaataattaatgaaatgctctgtattaatgaacttccgtgcgactgtccgttgatgatgatttaatatgatgttgatg

SEQ ID NO: 26761 - DNA, 1605 bp, Zea Mays
aggtaccggcaggccattggccacagcccgctttactcacgacgcgacgaaccgcgcactccttttaaagctccacgttgcggtgtcctcacgggtcacggcgaccgatgccgctgctgctgcgcggcgcctccctcctccgcctctgccagtgtaccagtgggctctcaagtgtgaaatttagttcaagagtaacggtactagtgaatctcaacgccatgagggacggaatgcgggccacatattcacgtagagctgcctctaagaacagtgaggtcaagaaagatgagcagccagtcacagagaaggttagtagagctgcctctaagaacagtgaggtcaagaaagatgagcagccactcacagagaaggaagatgctgctgaaactgatttggaggtggagcgagggaggagcagcagccctagccagctccaatcaatgactgtcaaggagctcagggagctcacgaggaggaggggtatttctgtgaaaggtaccaagaaagatttagtatcagcactgatgaattctatggccgtggaagcaaatggtgaagggggaaagtcatccgttgagctggttagccccttggaagtacctttgaaaagaaaaggtggtgcttctgttgtggttgaacaaaaactagaaagttctgagatcatttctgaaacacctaacaagaaaagtagaacaaaacaaaaatcaagcaagaacaccactcgtgaggaaatttcggtgactaatgtcaagctaagtaagactgttgtccagaaggaaacagttgccggattaagtcctgatgatgattcagagccttggactatactcgtgcataagaaaccacaagccagctggattccatacaaccctaggactatgaggcctccacctctaagcaaggatacacgggctctgaagattatgtcatggaatgtcaatggattgaaagcattgctcaaatcaagaggcttctctgtgcagcagttagcacagagggaggactttgatgtgctttgcctccaagaaacaaaaatgcaggagaaggatattgaagttattaaggacactttgcttgatggctacacaaatagtttctggacttgcagtgtgtcaaagcttggctattctggcactgcaataatttcaagagtcaaaccactgtcgatcaagtatgggcttggtatatcagaccatgatactgaagggagggttgtgactgtagagtttgatgacttctacctgttaactgcttatgtaccaaactctggtgatggtctaaaaagattgacttacagggtcacagagtgggatccatcccttggtaactacatgaaagaattagagaaatcgaagcctgtcatactaactggtgatcttaattgtgcgcatcaggagattgatatacatgaccctgctggaaatcgtagaagtgcaggcttcacaaacgaggaaagagaatcatttgggaccaattttttgtccaaagggtttgttgatacgtttcggaaacagcatcctaatgttgttgcctatagttactgggggtacaggcataatgcccggaagacaaacaaagcgcactgtctgcgacaccgatttggaa

SEQ ID NO: 26762 - DNA, 1375 bp, Zea Mays
ccaccgcaagaattagcgaagcgtgcgaactgcgaagccaagcaaagaactccaaattccacgccgatccgcccccaccactactccaccgcgcgcctcccctcccgaatcccgatccatctccatccagccgccgccggcatccgcgagaggccatggacgtgagcaggaagaagaagtgggtggcctgggcggtggcggccgccatcttcgtcgtcctcatgctcgtcacgcccgccatcccgcaggacgaagcctaccacgacttcgcggaccagcgcacccttttcttagggattcccaacaccttgaatgtgatctcaaacatccctttcttctttgttggcgtcacggggctcatcctgtgccacttcaacaactatttcaggctaagggggagctctggagttggacgctgttctttgctggtgtcacggctgttggatttggttcttcctattatcatctcaacccgaatgacgccaccctagtttgggacagactgccaatgacgattgctttcacttctgtcatggctatattcattattgaaagggttgatgatagagcaggggcaaaatcccttgcaccacttgtgattgcgggtgccttgagcatcatgtattggagacactttgatgatcttcgcccgtacgcagtagttcagtttgttccatgcattgctttacctgtgatggctatagtaattccaccgatgtatacacattcaagctactggttgtgggcagcaggattttacctccttgctaaagtggaagaggctgctgacaaaactatctacaattggactcatcagattgttagtggtcatactcttaagcatctatgtgctgcgatggtaccggttttcctggctctcatgctagctaaaaggactaccgaaccagaaaggataagcttgctccagaagtggaagaccagttgggttgcggtgagagagaggcgtttcaaagatagcagtacagttgatgtggattgcggctacgctgttgtttcaagtatatctgaacagtaaattgtcatgcatctaattaacatgcacgttgtttcaagtattagcatgcatgctgcgcatgtgtatgagagaagatccctgtgaagtattaagaaaccaacctacctagttgagtttgctggtcggagttagctgtgcctgtgggtgacatatcttgtacatagcagaaagcaatacaagtaacggaagcatgtattacaagatttgcgtatatcatttcaatttttttccttgaagagactgatgcgtgccttaaaagtagatgggatattttgatttctagttgatccaacaaattcagcataacattggctgttgcaaattcatgcaataaatgca

SEQ ID NO: 26763 - DNA, 5458 bp, Zea Mays
tgaactaccaccgggtgcgggtagctagcgggtagggtaccaaaacggcggcgctagaaaggaaaacctgccgtactgtcccctcttcccttttactgccgcctgccggccgcgagggagggagggacggaggtgctcatctgtgcggcggcttcggtgtcggtcccaggggaggcggggagccatggcgcggaagcacggctggcagctcccagcccacaccctgcagatcgttgcaattacagttttcttccttctggtggttgcgttttatgccttctttgtgccgtttttgggaaagcaagtagttgagtatattgcaattggcgtttatactcctgtggcacttgcagttttcatcctttacattcgatgcaccagtataaaccctgcggatcctgggatcatgtcaaagtttgaggatggccttatcaatataccaaccaatggctctggaatagaaggcatgaatttgccccagaaagtaaacaatgctacaggaacaaactctccaatgtctacttgcagaagttctctagatgggcattctaatcaaagaggttcatccataggggaggcaaacatgaatctaggatcacaactgccaaagaaaagatcaagctgttggttgctaggtgggcttctatgtgctacatttgtcaaggaagactgccgaaaaactgatgactcggagcagcaagcaaatggggaggaggctctgttttgcacattatgtaatgctgaggttcgcaaattcagcaaacactgcaggagttgtgacaagtgtgtggatggatttgatcatcattgtcggtggctaaataactgtgttgggcggaagaattatttcacattccttgctctgatggcaatcagtcttatctggcttgcaattgaatttggagtgggaattgctgttattgtactatgttttgtcgataagaatgcatcaagaaatattcaagacaagttggggaatggcttgactcgtgctccatttgctgttatcgtgggcatatttaccttactttcattggtggcatgcatacctttgggcgaacttctctttttccacataatattgataagaaaggggattacaacttatgattatgttgttgcaatgagagctatgagtgaggcagctccagaggacgaggaaggagaaaatatcatttactcgccatcaaattcagcaacaactgggttcagtgtaggaagttcacttggtattcaccacaaaggtgcttggtgtactcctccaaggatatttatcgatcaggatgaagtgatcccacatctggagcctggaatggtgccttcaaccgtggaccctgatggtgctggatatccggaaagagcaaatagagccaagaaggcagtcaaaatcagtgctcgcagcctcgcaaagctcgataagaatgaggtaatgaaagctgctgcaaaagctcgggcatcatcctcggttctgcgaccaatagatgcccgccatggtcatgaagctgatgtcatctccagcggcagtgccagtgtcaggagcagcatgagtgttgactacagtggcacaaaggaatcaaacagcgagatgaaactttctccgcttcataactcatacccccaaagccttgcaagccaggatgaatacgataccggcacaccaaccgcaagcagtttaagcagtctggtcaacatccacaagcttgcatcccactctcagttcagtgctgcgcctcgccctgcacctccggaaagacctgtgccggcgatggtgcggccacctgttcccaccacacaaataaccaacccagggataccgcggccagctgttcccacaacacaaacaaccaacccgatgttccaatcagccacatcttatgttcgagagaaccgaagggcctctgtcgtctgggatcaagaggctggtcggtacgtgtcagttcctgcacagacaagaacgggaactggagccgacctgccagcaagaaacccacggttcttggcgaacccaagtggcgagccaagcagccatgtgaggggtgttgcacccggcaacacatcgtcctcagcaatgccgtcagggcagccttcggagaggctgacctactctgggcagtcgatattcttcggtggccccatgctgaacacccctagcctgggcgcccagaggaacgaggcaggcgcaagagcgcgtccggagggaagcagagatcctaatgcccagcagcgtgacatccggggtgagaaagcgaggacaggctccttgccagtatttgctcctgggacggtccagaggaacccgccctttgacaaatgacctgctcctgctcatgaagtttatctgaagtgcgatgatgccgttacgctggaacacccccagcctgaagagttggcagatagttagggctgctctactggggttgccagacgggcggacaaggcagccgttggattgaaggctgctgccctgctggcactaggcaggtgctaacgagaaccacaaatattgctcgcagtcagtgctgacatttttcagtgttgcgggggcgatggagtgactgacgcacactgtgtttgtgttaggagttcatcagatacttgatgcgcgacagataggaagagctaatttctggcgatgtcaaacgctgatttgcagctgactttgtagcgtcgattgtggtcactgtgtggtgtgtgtgtgccatgggatactagtagacatgtgtaaaatggttagtcgaggtgcactttcggacactgctcgtgcgtacttgcttgcttgctagtaacaggtcttgagtttattcttgtagcatctccctttgtatggtgcgaaccatctctgcattttgttgtgctgttcgttgctcgcgttgttttgtcgccctttgcgtggctagcggaggcagcagccgcgtggcacgctcagctgaacgtcaaggcgccgctggctgcatctctctggttgccggcgttggaggtttcccggcggcgcagtggacgcacaccatatatgccccgagcaatggaaatgaagagctggctggtttctgtctttctgcagggtgttcacagttcactgctgtacatctgtagatattgcagaggcagaaggggcaagcagataaaacctcgcgggctttgctagtttgcttcaccccttcccttctccccaccgcccccgtccccgtcccccaccactggcactcaggtgaagggattcctgtgccgccgcctgccctcgccttctgcctcccggcgcccactcggccttgcggataatttgcggctcggtcccgggcgtgctcagtctcggttccagtggccgcttcgatgtacctgaccgccgtttccttcccccccgcagccgccttctcgtcctcatcccagaagctgctgcctaggtcggccggggtcggccggcgtctggtggtgcgggcagacgtcaaggtcatatcgacgggcgaggcctgccgccgcgggctcgccgccggcattgacaagctcgccgacgccgtcagcgtcaccctcggccccaaagggaggaatgttgttattgaccaagatgatgtacctaaagtaattaatgatggtgtcacaattgccaaggctatagagctcccaaatgcacttgagcatgcaggtgccacgctacttcaagaaatagcatccaagacaaatagcgctgttggtgatggaactacaacggcaattgttttggctcgggaaatcatcaatcttgggttgttggcagttgccactggtgctaacccagttgcattgagaaggggtattgacaaagccgttcatgagctaattaagatcttgaagagtaaatgtatccctgtgagtacaaaggaggacataaaagctgttgcgtcaatatcatctggcaatgatgaatatgttggtaatctcattgctgatgcattggagaagataggtcctgatggtataatcaaaattgagtcatcatcttcaatatacactacagttgaggtgcaggaaggaatgaagatagacaagggatatatttctccatacttcatcacaaatcaagacaaatcaattgttgaattcgaaaatactagagtgcttttaactgatcagcgtgtgaatgatgttcaagagatacttcccttgctggagaagacaacacagttgagtgtccctttattaattattgccgaggatgtgtcgcatgaggtatattcaacactggttcttaacaaactgaatggattgctaaatgttgcggttgttaaatgtcctggtttgggagatgaaaagaaggccattctccaagacattgctattatgacaggtgcagatttctttgctagtgaccttggctggggtcttcatggcattacttctgatcagcttggtatggctcagaagatcacaataactagtgaatccacaactatcatagcacatccttcaatgagaccagagattgaggccagaatcatgcaactgaaaaaagatctagaggagacaacgagttcctatctaaaagaaaggttctctgcaagaatcgctaaactttcaagaggtgttggagtcatcaaggttggggcagccactgaagctgaactcgaggataggaaactgagagtagaggatgcaaagaacgcaacttttgcagccatcagtgaaggcataactcctggtggtggggtgacatatgttcatttatcaaagcatattcccagcatcatggaccttgtggacgacacagaggagaaaatgggtgtaaatatagttgggaaggcacttcttgtccctgctatgacgatagctcgcaatgccggggcagacggtccagctgtcgtggagaagcttctcgccagcgagtggcgggttggttacaatgcgatgactgacgagtttgaagaccttgtcgctgctggtgtggtggacccgtgcagggtcgcgagatgcgtgctccagaactctgcttctatcgcagggctgattcttatgactcaggctatgatgtttgacaagatcaagaagaagaagtctcccatccccgagattcctggtattccaccgcttcagataagccaaaaagctaaggcttgagctgttggatgctgccctggtgttgttggctggatgagttgtgttgacctaggaagcagcagaatgcccagtgagctgcccaaaccaggtagaacagtgagcacttggaatgcccatgttacactcgttatataatttggtggtcggtgcagtattacttgtcatgtctgcataaattttgcattggcgggtgagtcggcaaccaatttatgtctgacttgggaacgtaaacgaacgaatggttgatttgttgctacatagagggccccctttgggcatcatctcgagcaaagctattttgccttgtatctccctttgaaagcagatctgtttcatcaattaacatacgaggtaacacagtagcttgtag

SEQ ID NO: 26764 - DNA, 1796 bp, Zea Mays
agccatatagacatctatacccccacccacccaaccttcggcagtccccatcctctcctgtgggcgctccctctccccggcccccaaatcaccgcgcctccctcgccacgcctcacagggccggttgcgtaggagaaaggagaaaggaaggaggggaggcggtcgtcgggcgagatgagcgactccttctgccccgactgcaagaagcatacggaggtggcgttcgaccactcggcgggggacatggtgtgcaccgagtgcggcctcgtcctcgaggcgcactccgtcgacgagacctccgagtggcgcaccttcgcgaacgagtccaacgacaacgaccccgtccgtgtcggtggccccaccaacccgctcctcaccgatggcggcctctccaccgtcatcgccaagcccaacggtgcgcagggcgacttcctatcctcctccctcggcaggtggcagaaccgcggctccaaccccgaccgatccctcatcctcgccttccgcaccatcgccaacatggctgaccggatatggcgtgtgcttgttacgttcatgcgtgcggcgcgctgcctgattttacgcctggggctatggaatgtgaccagggttggttatgactgcgggtctagatttggaacatctgattgatatattgcgtctagtatttttgcatgttcttgcagggtttggtgctggatgatttgtcccttggatctactgaaatcccgttctttataatatgggaacccatctaatatccttaatttcttcgggaactgtcaaaggttaggtcttgtggctactattaaggaccgagcaaatgaaatctacaagaaagttgaagatctcaaatctatcaggggaagaaatcaagatgccatattagctgcatgcctatatattgcttgtagacaagaagatcggcctagaactgtgaaagaaatatgttcagttgctaatggggccacaaagaaagaaattggcagagcaaaagaatttatagtgaaacaactggaagttgagatggggcaatctatggagatgggaaccattcacgctggaaattttctgagacgtttctgctcaactcttgggatgaacaatcaagctgttagggcagcccaggatgcagttaagcactcggaggagcttgatataaggaggagccctatctcaattgcagccgctgtcatttatatgataacccaactctcagaggacaagaagccacttaaagatatatccttggctactggtgtagcagaaggcaccatcagaaattcgtacaaggatctgtatccttatgcctcaaggctcatcccgaatacctacgccaaggaagaagacctgaagaatctctgcacaccttaggaggcttacttttttccccctttctgttactacataattcggaattagatttgtcaaagaggagtgagtgaagttgttcctcgttgtgactgtaccgggcaaggtgtcgtccccgccgtgcttaactttatgatggaatttcttttcagagcacctaccacctgaagatttgtgggatacgtatactcacttcggaaagaatgtagatagcaagcagttggacaagcacaagattttaatttaaaacatgattttgttctccatcttctgaagaaaccatcacttgtccatctttattctaagtgcccttggattccaagagaattgttagttggctaaaaattgggtaaaattatgatatgtttggactggcagccccaatctagtcctattaactcctatgttgaattactaactagttttag

SEQ ID NO: 26765 - DNA, 635 bp, Zea Mays
ttttcctcgtcttcagtactcaccctacgaacccaacgtcccccccgttcgatcgcaacactccccagccgtgtagggtttcggctcgatactccgagccctccctcccaatggctaatgtcaagcggtcgactccagtgactgtgcccgctcccgctcccgcgcctgcgcccttggacccgggggctacagccgccatggccaagaagtcggcgtccaccggggcagcgattacggccacgaaaagccccgcggcggcgtcaccgctgattgtgatcgaaatcccgtcgtcacctgatgcctccacgggtggccgccgctcgacgacgaaagcgcggaagaggcccgcgctgtggccgctcgtccttgacgacgagatcgagatgtggacaccgcgggagaagcggcgcctcgacgaggactgtcagatcctcgccggagaccctctcgcctccaacatcgaggtggcccccgccgccgccagtgacgaaatcgcggtcgttgcggagcgaggaaagattgcgtgcagagattacccacatccgaggtctgcttgtgcaaagcacccatttagtagaacccctcatgaacgctattgtgaccagccttcagatggccccagagaagcggatatt

SEQ ID NO: 26766 - DNA, 5351 bp, Zea Mays
gcctcctgtctcccatccccagatcccatcgactacggatccgcctgctccttcagaacagagatctgtactcgagaaggttgcttcgcagcagactgctgaaggccggtggtcaggcggccggacgcagggtggggcgtgggggacagggagggtctccggccaggcaaattcggctcagggtggcagccaaacaagcccctgatgccggagcagtctagatccggcgccccgatggagtggacgacggtgcagcacctggatctccgccactccggcggccgccgcggtgcctcggcccgccctatgcagccgcacgccgctgccttccgctcctcccaggccatcgtcgctgtggccatcggcacccacgtcgtcgagttcgatgctctgtcgggaagcaagatagcttctattgaccttggtgcccgtgttgttcgtatggcatatagccctacaactagtcatgttgtcattgctattcttgaggatgctacaatcagatcctgtgatttcgccacggagcagacacttgtgctgcattcgcctgagaaaaaaacagatcatgtttcaatagatactgaagtccatcttgcattgacacctcttgagcctattgtattttttggtttccacaaaagaatgagtgtaacaggttactctcttagcttggcagttgctgttgacagtacaattaagctaattggagctggtgcttttgggtttcacccgaccctagagtggatatttgttggtgatagaggtggtactctcctggcatgggatgtatcaactgagaggccaagtatgattggcattacacaggctggttcccatcctatcacatctgtatcctggcttcctacactgcggctgcttgttactatttcaaaggatggagcactccaagtgtggaagacacgagttataataaaccctaacagacaaccaatggaaactcatttctttgagcgtgcagctgttgaaacaatggatatcacaaaaatactaactcttcaaggtggagaagcagtgtacccattaccccgaattaaaaatttggcagtgcatcccaaattcaatttggctgcagtaatttttgcggatatgtctgggacagaagctgcaaagaacaaagctgcatacacaagagaagggaggagacaactttttgctcttcttcagggagctaggggatcaactgctgctgttttaaaggagaaactattagccttgggatcatctggaatattagcagagcatcaacttcaggcacaactacaagagcagcacttgaagggccagagccagctgactatttcagatgttgcaaggaaggcattccttcacagtcatttcatggaagggcatgctcaaagcggtccaatccctcgcctacctcttgttacaatttcagattctagcaaccttttgcgagatgttcctgtttgtcagccattccatctagagctgaatttcttcaacaaggaaacccgtgttgttcagtatccagttagagctttctatttggatggatttaacctgatggcccataacttatcatctggggctgacaatctctataagaagctttactcaacgattccttcgaatgtggaatgccatcccacgaatatgtcatacagcccaaaacagcatttatttcttgtcgtgtttgaattaagtggtacaaatggagtggtacatgaagttgttctttactgggagcagactgatctacagacagtgaacagcaaaggaagttccataagaggtcgagatgctgcttttttgggcccagatgataatcaatatgctattctggaggaagatagaactggtctgaatctctttagtctcaaagctgtagctacaaaggaagctcttgaaaataatgctgctgtgcttgaagaaaacacttttgctgataatgctgctagtgctacctcaacggaacgtcaaggtcctctacagtttacttttgaatcagaggttgatcgcatattttcttctcctctagaatcaaccttgttgtatgttatttctggaaagcatattggacttgcgaagcttctgcagggatataggctgtctgcagacaacgggctatccattacaacaaaaactgatgggaagaagtttattaagttgaaaccaaatgagactgttcttcaggcccactggcaaacaaccctaagaggtcctgtggtaggaatattgacaaatcagagggtgctaattgcttctgctgatcttgatatactatcaagcagctcaacaaagtttgatcgtggtctcccatcatatcggtcaatgttgtgggttggaccagcacttatcttctcaagcgcaactgcaataagtatgcttgggtgggacaacaaagtccgatcaatcctctccactagcttccctcgctcagtattacttggtgcattgaatgaccgcctactgcttgtaaatccgacggatataaacccaagacagaaaaagggagtggaaataagggcctgtttagttgggcttcttgaacctcttctcattggatttgctaccatgcagcaacacttcgagcaaaaacttgatctttcagaagtcctgtaccaaataacctcgaggtttgatagtttacggatcactccaaggtcattggacatattaactaaaggacctcctgtttgtggagaccttgctgtatcattatctcaagcaggacctcagtttacccaaatcatgcgctgcaattatgcaatcaaagctctccggttctctactgcgctgtcaattttgaaagatgagttcctgcgctccagagattatcctcaatgccctcccacttctcatctgttccagcgtttccgagaattgggatatgcatgtataaagtatggtcagtttgacagtgcaaaagaaacttttgaggttattacagatcacgagagcatgctggatctatttatttgtcacctgaacccaagtgcattgcgacgccttgcacaaaagttagaggaatctgctacagattctgagctgaggcgataccttgagagaatattaagagttcgttcgactggatggacacagggtgtattcgccaattttgctgctgaaagtatggttcctaaaggccctgaatgggcaggaggaaactgggagatcaaaacacctaccaacattaagaatatacctcagtgggagcttgcaggagaagtcatgccttatatgaagacaactgatgctggtatcccatctgttgttgcagatcatattggtgtgtacctgggtgtgatgaaaggaaggggtaatgttgtggaagtaagtgaaaagagtttggttaaagctatagctgcagctagcagtgagaacacacagccggtgtcttctgcatcagcagagaaaagtaaggcaattcctcgtggtgattcggttggtgatactttggcaaggcaactgggagtccagattgcatcttctgatgaacaggcaaaagctgccgaggacttcaagaagactttatatggtgttgttgatgatggaagtagtgatgaagacgagtcaacctcaaagactaaaaagatacatataaggatacgtgataaaccggctgcacctactgtagatgtcaacaaattgaaagaagccactaaacagctaggcttgggtcctccgctgagtaggacaaggtcattatcagggacacctcaagacttcaatcaggctcctacacaaccaggaggtccagccgcagctgtttccccagcaatgccaaattctgcgattgatttatttggaacaaatactttagtgcagccgcaagcaccctctagttccacaggtcctgttattgcaggcatgggagtgacggctgggccgatccctgaggacttcttccagaacactattccatcgcatcaacttgcggctcaactacctcctcctggaatagtcctgtcacggatggctcaacccgctcctggcattgaacaaggccgaccagtacctaatcaaatgatggctaatgttggtcttccagatgatggggtgccaccacaagcaccaccgcagcagtcccagtttcctccgcagcagtcccagtttcctcagcaaccaggcattcctatggattctattggcctgcctgatggtggtgtccccccacagagtcagccacttccttcacaaggccagtttcttccttcacaggcacagggctttcaacttggtattcctgctccatcacaaccaattgatctcagcgctctcgagggtcctggagcggcgaagcaagctgctcgccctccagcacctactgctgtgcggcctggccaggtaccacgcggggcccctgctgcagaatgctacaagatggctcttgctcatcttgagcagaatcagcttaccgatgcactatcttgtttggacgaagcattcttagcccttgcaaaggaccagtcacgtgaagccgacatcaaagcgcaggccaccatttgtgctcagtacaagatcgcagttgctctgctgcaggaaattgctcgtctgcaaagggttcaaggagctggtgctctcagtgcgaaggaggaaatggccaggctatctcggcaccttgcttccctgcccatccaggccaagcacaggatcaactgcatcaggaccgccatcaagcggaacatggaggtccagaactacgcctacgccaagcagatgctggacctcctctactccaaggcgcccccgacgaagcaggacgagctcaagagcctgatcgacatgtgcgtccagaggggcctgacgaacaaatccatcgacccgttcgaggacccctcgcagttctgctccgtgaccctcagccggctgtcgaccatcggccacgacgtgtgcgacctctgcggcgccaagttctcggcgctctccgcacccggttgcgtcatctgtggcatggggagcatcaagagatccgacgccctcgctggtgggcctggacccgtgccgtcacctttcggctgaaggtcgagtctgctcctttcgtcctccatcggtcctgatattgtatctatagtgttcagtttgcgttcattacattcgattcgttgcagcttgtattgtatgtagcctttttgacgtgtagcacgcttggtgttgagagcaatgtacacctgtactgttgggttggttgtgattatacacgcggttttttttggagctagcaatgtaaggtgcatgtgcatatctgagacgcgaacgtcgacgtgaaacgttctagtctccatagttggtaaatacagttactgcagaaactcgcatctatacgataataacagtgatagagagacctaagggattaattgaatgga

SEQ ID NO: 26767 - DNA, 1520 bp, Zea Mays
agctagcctctcccacttcttcttctagctagcgcagcagccagcagcgcacgcagtgttgactgattcgtctctcttcgatctctatatgcatgcgcgcgcaggtcggcgtgccttgcagcagcctgttcaagacggtgacggtgcgttgtggccactgcgccaacctactctccgtcaacctccgcggcctcctgctcccgcccgccgcgccggcgccgcccaaccatctcaacttcgctcactccttgctgtcacccacatccccgcatggcctcttggacgagttggctctccagcaggcgccgagcttcctgatggagcaggcgagtgccaacctgagcagcaccatgacgggccgcagcagcaacagcagctgcgccagcaacctgccgccgccggcgccgatgcctgcagctcagcctgtgcagcaggaagccgaactgcccaagaccgccccgtcggtaaacaggcctccggagaagcggcagagagtcccgtcggcatacaaccggttcatcaaggacgagatccagcgcatcaaggccggcaacccggacatcacccaccgggaggcgttcagcgcagccgcaaagaatgtaactttctttcgtcttcttctccagacgcatatatgcacagcagtgacaactactcgtggctagcttgctgtctgcgtgtcttgtgatttgacccatcactttacaatgtcagcatggacacagcgacacctagtgtctggtgctggctgcttgcgcctggtgtggtctgtggctagcttgctgccccaccggcacagcgtcgtacagacgatacagctagcgttcgttttcagtatttgcttccaagtactcggtcggtcgtacgtaccctactaatgttgcattgcctttctctgatttgtgttcataatcagtgggcccatttcccacacatccacttcggcctcatgccggaccagggcctcaagaagaccttcaagactcatcaggatggcgctgaagacatgctactcaaagacgatctctacgccgcagcggctgcagctgcagcagccaacatgggcatcactccattctaataactctggttaggcatgtgttctgaatcagctggcacgtcgtagtggctatcgccctttgtgctgcattctagggtttcgtctcagatcttgatctcaacatcgatcgtgtgtcgtttaattagagtactttccagtgtggggatagaaatggagaataatcaagttagagcgcgcatcaagtaggccactgatgatccgtaggtacagacttgattgtctcctctatatatcccttttcatttcatgttctctctctttttcctattttttgttcctggaccccttcaactcgccagtagagagctcgttgtgcctctccaatcccatgtttgcgtatgtctgctcaacaacatgtttttaccatggagaacaagttgaacatctgttagatctatcaagagtgtcatatatatgttccatcgtcctttaccatgta

SEQ ID NO: 26768 - DNA, 501 bp, Zea Mays
caattcttgtgattcactccgcacacagaattattagtaaatcatggagaatcaaataatcacttttcacaagagaatcaggttccacagaaaatctggagcgggaggggctctaccaaactggcccttaaatcactttcatcttctccatctccaactccaaagtgcataaggataagaacgttgtgacagtgttcagcgcgcctaactactgctaccgatgcggaaacatggctgccatcctcgaaattggcgagaacatggatcagaacttcctccaattcgacccagctccgaggcaaattgagccggacatgacgcgcaagacaccagactactttttgtagaaaaaacaggtgtggctaaaaaaaaaagagaagagacgaggggaagatgcaggaaatggacccgatgttctgttgtgtctgtattgtgatgccttgctagacatcgttgtacactaggcttttgcaatgctttcatataggacatcactgtata

SEQ ID NO: 26769 - DNA, 3313 bp, Zea Mays
gtatcaccccacctcgtctcgtcgcctaccctcccaacccgcattcgcggcgcgggcgccttggaaccctagtcacccgcgccccccctccactgtccactcaacccccgtcccctccctcggcggcggcggcatcggcgtcaaccaagatgtcgggcggcttcttccgggggacgtccgctgaccaggacacgcgcttctcgaataagcaagccaagctgctcaagacgcaaaagttcgcgcccgagcttgaccatctggtggatacgtcaaaggtaaagatggacgtgatgaagccctggattgctaagcgggtcactgagctccttgggttcgaggacgaagttctcatcaacttcatttatggcctcctcgaggagaaggaagccgatggaaagaagattcagatccagctgacagggttcatggagaagaacacagtgaagttcatgagggagctctggaccctccttctcagtgcacagcagaatgccagtggggtgcctcaacagtttctggatgaaaaagaggctgagatacagcagaaaaaggcagaggatgataggattgcacaggagattcaaaagaagcgagagatggaggaaaatgattcagaactggtaaagaacaaagtgatggatggggatgctggtaactcaagatcctatggcgatccagttggctctgctttaaatagtacaaatttcaataccgaggaagaaaagaacaatgatttcaagcgtagcttaagagcaaagaacaggggaagtcgcagatccaggagcatatctttgtcgccacgtgctaggcaaagatccatctctcctagaaataattctcgttctcctcctaggcgttcccactctattgatagacaccatagatcatcatggcgttcaacttcacctagacgttctatttctccccgaaggcattctccaagaagtaccccttcaatttctagaaggagatcaccttactcaaggagagggtcgccttccttgtcaagatatccatccccatttacacgccggagatctcctcttcgcagaaaatcaccatcatctgggccactaaggtcactttctcctcgccatcgccgctcaccagctcgtgtaccaaggaggtcaccatctcctgcaagtcgaaggtctcctgttcgacgcagattctcaccaggtagacgtacatctccatctccagtaaggcgcaggccaaggtctccatcacctgggaggcgtaggccaaggtctccatcacctgggaggcgtaggccaaggtccccatccccaagaaggcgtaggccaaggtccccatccccaggaaggcgcaggccacggtccccatccccaggaaggcgcaggctacggtccccatctccaggaaggcgcaggccacggtccccatccccaggaaggcgcaggccacggtccccatccccaggaaggcgcaggccacggtccccatccccaggaagacgcagaccacgatccccatcgcctggaaggcgcaggccatggtctcggtctccaataagacgtcagtccccatctccaaaacgccagaggacatcaccaagttcaccgaagactcgttctgcaaatcgacctttatcgccagagggaaggaggagtaccagtccgtacaatagcaggagtcctaatcgctctcgccagagtttaagtaaagatactgagaaagaaacaaatggcaccccttccgttaaggacagagttgtgcactcaagggggcaagaacaaaaatcagatgataataatagggatggtgcaaggattgttggcaataattccccagattctgagcatagattgtcaaagtccttgaggcctcctaactatgaagaaaggaattccacacgtgacagttcttacaagaactcagacaaacctatacctagtcagggcagcacagatacaagtggagatgaggaacacagtcgtgctagagaaaatgcccggaaagcaaattcatgtcgtaggaaaacaaaggatctctcggcaggtctgcaacctaagaaaatcagtgctggtgactcaagccccagagacaaatctccattcattttacaacagagtggcaaggtcgtccaaaagaaacaccccgatcaattgtcagaatcatcagaagatgagcttgctggtagaagaacaaagcatcaaactgattcacctgatgattctcgtcgaaaacagcattccccgactagaattgaaaatgatgagtcttattcaaagggtggtagaaacagtgagcatgtcatgagaggtttgcgtgatgattctgatgatgctattgatacaaagaaatatttgtctaaagtcaatgaggactcccaatcggacgatggaagtcctttgaaaaaaactaagaaaaaaacagatggtaataggcacattgattctggtagttcagggtctgaagagcctgacaaacatagaacccactcggagaagcgaaggcacaagaaaactcataagcataagaaacagtatgatgatagttccgagtctgattctgagccagatggcaaagacgcaaagaggaggaggaggaaggaagagaagaggctaagaaaagaggaaagacgtcgaagacgtgaagaacgacaccgcagaagggcagaacgccatgccagcaaacgaaaattaaagaacaccgatactgttacaatgccttcagactctgagaaggatcgggattctgattcagatggtgatgttaggaaaagagtttcaaacgctggaagagaagagtctgatcagaagaaactagaaattgaactccgtgagaaggcccttgaatctcttagagcaaagaaagccatcaacaactagactgagaatttttttgtgacacatttgagtttctattttcaagtggaagtgtccttatatgatactatttaatgttctgtgtgtttatgtggcagttgatctgatgattcctgagctgtttacttgatgcagctgaattcaggcttagcagccagttatctgattagctccatgtgcacaagctttttatgttcctcaggatgatatgatcaacgcctcaacaaaaacaagttggtaacatattgattggaaaatctgctaaagcattccttcttagtttcagaaatcatcttccacctaggatgaaatgcacacagtttgtaacatcaaaggactttaatggactccaggtttagttcacaaacttatagtgtgtttggtgtgaggaatgaagtaatccatcttcttctcactcctcacttttttatttggtttgtggaatagaatgggttgatcca

SEQ ID NO: 26770 - DNA, 5833 bp, Zea Mays
ggaccgcccgcgattgctacggcctccatcgcagcgagagcttgaaagcgtgcttgcctgccattcccagctcccagttcctttccttcttcttgctcgtccacccagtactccactgctcctcgtcctcgtcctcgtcctccctctcccgccatccccatccccgcgacgacgcgcatcggaccctgcgtcgtacgtgctcgcccattccctagccgtcagtggatgtgccgggctggccgcgggccgtccgagcctgcggcggcggcaggggagggcgacaacccggcgggcggcaggagtggcagcgggaaggaagccatccaaccgcggagatgtgggagcccaggaggtcgtagcgaggggtttccttgattggtgaatcttcgatcaaggatggagcaccgggctttgctgctcggcgtggcgctggcctttctgctggcctctggctcccagggcttgaaccatgaaggttggcttctcctagcgctgaagagccagatgaacgacactctccaccacctcgacaactgggacgcgagggatctaacaccatgcatctggaagggcgtcagctgctcgtcgacgcccaacccagtggtggtgtctctcgacctcagcaacatgaacctgtcaggcacagttgcgcctagcattggtagcctgtctgagctgaccctccttgatctgtcctttaatgggttctatggtaccatccctccagagattgggaacctgtcgaaattggaagtgcttaacttgtacaacaacagttttgttggtacaataccccctgagctcgggaagctagataggctggtcacgtttaatctgtgcaacaacaagcttcatggcccgatacctgatgaggttggaaatatgacagcacttcaggaattggtaggatacagtaataatctcactggctcactacctcgttcacttggcaagctgaagaacctgaaaaatattaggttgggtcagaatcttatatcaggcaacattcctgttgagataggtgcatgcctgaacataactgtgtttggtcttgcgcaaaacaagctcgagggtcctttacctaaagagattgggaggttgaccttgatgaccgacttaatcctatgggggaatcagctttctggtgttattcctccagagataggaaactgtacaagtctgagcacaattgccctctatgacaataatctagttggccccattcctgcaacaattgtgaaaattacgaatcttcagaagctatacctttacaggaattcattaaatggtacaattccatctgacattgggaatctttctcttgcaaaagagatcgacttttcagagaatttcttaactggagggataccaaaggagctggccgacatcccaggcttgaatttactctacctcttccagaaccagcttacaggccctattcctacagagttgtgtgggttgaaaaacttgagtaaacttgatctgtcgatcaattcactgaatggcacgattccagttggatttcagtacatgagaaatctaatccaactgcaactcttcaacaatatgctttctggcaacatacctccaaggtttggcatttatagccgtctttgggtggtggatttctcaaacaacagtataacagggcagataccgaaagatctttgcaggcaatcaaaccttattttgttgaatttggggtctaacatgcttacaggaaacattcctcgtgggatcactaactgtaaaacattggtgcagcttcgtctcagtgacaacagtctgacaggaagtttccccactgatctctgcaatctggtaaatttgacaacagttgaactaggtcgaaacaaatttagtgggcctattcctcctcagataggcagttgcaagtctcttcaaaggctggaccttacaaataattatttcacgtcagagttgcctcgagaaattggtaatttgtcaaaactcgttgtcttcaatatctcatctaatagactaggaggaaacataccactagagattttcaattgtacagtgttgcaacgccttgatctcagccagaatagctttgaaggttcgttgccaaatgaagttggtaggctgccacagctggagctgctatcttttgctgacaataggctaactggccagataccacccattcttggtgaactatcacatttaacagcactacagattggtggcaatcagttatctggtgaaataccaaaggagctgggtctgctgtcgagcttgcagatcgccctgaatttgagttacaacaacctctctggcgatattccatcagagcttggtaaccttgcactgttggaaagtttatttcttaataacaacaagctgatgggtgaaatcccaaccacatttgctaatctgtccagtttgcttgagctcaacgtctcctacaattatctctctggtgccctcccgccaataccgctttttgataatatgtctgtgacctgttttattggaaataaaggattatgtggtggacaacttggtagatgtggatcccgaccatcctctagttctcagtcatccaaatcagtcagtcccccattgggcaagatcatagcaattgttgctgctgtcattggagggatttcacttattcttattgcaataattgtgcaccatatcagaaaaccaatggagacagtggcccctttgcaagataagcaaccttttccagcttgttctaatgtgcatgtttctgctaaggatgcatatacatttcaggaattgctcaccgccacaaataactttgacgagagttgtgtgatcggaaggggtgcatgtgggacggtgtacagagccatcctgaaggctggacagacaattgcagtcaagaaacttgcttctaacagggaagggagcaacactgacaacagctttcgtgcagagatcatgactcttggaaagataagacatcgtaatattgtgaagctttacggttttgtataccaccagggttccaaccttctactctacgaatacatgtcaagaggtagtcttggtgagctacttcatggacaatcatcctcttcacttgattgggagacacgcttcctgatagcacttggtgcggctgaagggctttcatacctacatcacgactgcaagcctcgtatcatccaccgtgatatcaaatctaataacattttacttgatgaaaactttgaagcccatgttggtgattttgggttagcaaaggtgattgacatgccatactcgaagtcaatgtctgcaattgcaggttcatacggctatatagcaccagaatatgcttataccatgaaggttactgagaaatgtgatatatatagttatggcgtcgtgctgctggagctgctaactgggcgtgcccctgtgcaacccttggaactaggaggcgatctggtaacatgggtaaagaactacatcaaggacaattgtttgggtccagggatcctcgataaaaaaatggatttacaagatcaaagtgttgtcgatcatatgatcgaggtcatgaaaattgctttggtatgtactagcttgactccgtacgagagaccaccaatgcggcatgttgtagtcatgttaagcgagtctaaagataggacgagggtcagctctgcatcctcgcctgcctctgatgattcttcaaagaaggatgactcataatgtatttataatatgttcgattagccaaagatgttcattgttcagttaattctatatgcgtcggtgcattcttactcgagttacaagtacactaggaacacctgtcaggtagccaattctgtaatattctccaacatgaactgcagtgcagatcatatgtaatcatcgatcatatgcaatcgctctttgtagctgttaacctgtagcctctgatcgttgttgctgagtcgtctttctcttccccttggcatgtccgtaccaaaaaataagttatgaaaccacgaagtcgcgcccaccaacggacgctgcctctaaaaaagcagatcagcgcgttgtcgcagcgtcggagcacaagcgacatcgctccccgggggccgtcggccggcgaccggcgacttccgcagtagaaccaactccacccacccatccacttggccagcagcttcttgcctgcatcaattgccatggcggcggtggaagcgaagaggagcccacactttgttctctttcccttcctggctcacggccacgtccctgtcttcctccgcctggctggcctcctccgcgcgctccgcccagggctcgaggtcacgctcgtctccaccccgcggctcctgggctccctcacgctcccgcctgcctccccacccgtgcgcctccacgcgctcccgttcgtccccgccgaccacggcctgcccccaggcgctgactccctcgccgatgtccagatccaccagttcatcaccttcttcacggcctccgagtcgctccgccctgcgttcgagaagttcgtctccggcatcggttccccagtctgcatcgtcgccgatgccttcttcgggtggacggccgaagtcgcgcgcgcgcggggcgcgtcccacgcggtgttccttcccggcggcgcgttcggcaacgccgtgttcttctccgtgtgggagcacctcccgcacgcccttacggccgccgacgagttcccgctgccggatttcccagacgtcgttctccaccgcacgcagatcccgaggttcatcctctctgccacgggggcggacccctggacggccttcttccggcgcgtcatcgcctcctgccgcaagaccgacgctctccttgtcaacaccgtccgggaactggaaccctccggcctcgacatgctccggagaagcttcggcgtccagccatggccaatcgggccagtcctcgcagagccgacggccccgtcgtcagactcgcgggacgacgccagcatcatccggtggctggacacgcacccgccgcgctcggtgctgtacatatcattcggatcgcagaacagcatcagcgcggatcagatgatggagctcgcgctggggctggaggcgagcggtcgccccttcctctgggcgctccgcccgccgctggggttcgacgcgaaggacgtgttcaggcccgagtggctcccggctggcttcgaggagcgaacggcgagggcgaatgtgggactgctggcgcgcgggtgggcgccgcagatgcggatcctgtcgcacccgtccaccggcgcgttcctgagccactgcgggtggaactccgtcctcgagagcctgtcccgcggcgtgccgctgatcgggtggccgttgggcgccgagcagttcttcaacgcaaatctcgcggtcgagtggggcgtctgcgtggagctggcgcgcgggaacctggagagctccgcggtggagagcagggcggtggtcgaggccgagcggacggtgatgggggacacggcgaagggtgatgagatgaggagggtggtggcggcgatcgcacgcaccatggaggccgcgtgggaagcgcctggcgggtcggcggcggagagcctggaagggttcctgcgatgcgttgaaccctgagatgccccgctttgagatggttgcgcgaggaatctgcaactaagtacgcgcgcgggaaatctgtgttaagaattcctcaactacaaaggacgacggattgatgggattacggctcctgttgcattgtaacagaaacggatttgtttggttcattaacgtgtagcctgcaggattggatagcgcttctgggtagagataacgagcagacagtggtgcaaacgtttacgggcataaaaaacggtgaaccaaacaacaccttaaaa

SEQ ID NO: 26771 - DNA, 3205 bp, Zea Mays
aattttcgcgcacagcagccgggcgccggcggatcttcccagtttcacaccacacgctccacggctggggatcacgctgtcacgctcacgcgcccctccccccgccgccaacgcccacgctgcgagcgcgaatccatcttctctacctcctcgtccattcctagggttcctcctctgccgaatcgcggggaactctgcgggcccaatttggtagggtaatctcctaccaggaggtcaaattccagtcaacgccgcttggttttgtagccgaccggtcgatttgaatccaggggcaccgattggctgggtgagagggcaggctcgatttgaacccgcctctgcccttttcgtggaagttttgggtcttattaggcgcggattactggggtctagggatgtggtagttactagctgcttgggttaggcggcgcgccgaggtgcttccgtgcttggctgactagtgtcaatggcgggatctgtcggcaaggccagggcggcgctgcggtcgtccccgaagcggtacagcggcacggacccaccgttgtctctggcggggccgacgttggcggatctgcagaggacggccgagctggagaagttcttggttgaagcgggcctctatgagggtaaagaggagtccgcgaagcgggaagatgtgctatccgagattggtctgatagtcaaggaatgggtgaagcagttgactcgtaagaaaggatatgctgagcaattggttgaacaagcaaatgcaatcctttttacttttgggtcttacagattgggggttcatggacctggagctgatattgataccctttgtgttggaccttcatatgtgaaccgagaggaggatttctttgtcacactgcatggcatattagctgagaaggaagaagttgctgagttgcaacctgtacctgatgctcatgtacctgtattgaaatttaagttccgtgggatatcaattgaccttctctatgctagcatctctctttcagtgataccagcggatttcgatatttctcaaggatctgtactttgtgatgttgacgaagcaactgtgcgaagtcttaatggttgcagagtggcggatcagattcttcggcttgttccaaatgttgagaatttccggacaacactcagatgcttgaagtactgggcaaagagaaggggtgtttattctaacattactggtttccttgggggtgtgaactgggctctgctggttgctcgtgtatgccaactctatcctaatgctgtgccaagtatgctggtttctaggttcttcagagtttttactcagtggcaatggccaaatccagtgatgctatgtgcgattgagaataatgatcttggtttttctatatgggatccacgcaaaaatccacgtgacagaaaccatctcatgcccatcatcactccagcctacccatgcatgaactctagttacaatgtttcaaccagcacactgagggttataatggagcaatttcaatttggcaacaaagtttgtcaggaaattgaacttaataaggccaattggaatgccttatttgagcctttccatttttttgaggcatacagaaagtttctagtggttgacatagttgcagaggatgacgatgatcttcgtctttggaagggatggatcgagtctcgtttgagacaacttactttaaagattgagcgggatactaaaggaattttgcagtgccatccgtacccatgcgagtattcagatcccacaatagagtgtgcacattgtgccttctacatgggcttatcaaggaaagaggggttgaaaaaacgtggtcaacagtttgatatccgtgggacagtagatgaatttatgcgtgaaattggcatgtattcattgtggaagcctgggatggatctggctgtcacccatgttcatagggagcaggtcccatcttatgtatttgagcaaggatacaagaaaccctgccctacaatgcatgcaaaccaacaagagcagtctgatggagatggaacatttagcccatatctggagagtcagcttaagagaaagtacatttccgatggagatggtcatgtggatctttgcaaatctgtaaaaagggcttcagtaagcccacctggtgtgggaaccccacctcatcttggaaatagtgtcagtaacgttgtttgtgacagtccagtcaaattcgtttcaagtgtcgtttgcagcggagcgcatgcttcctcatcacatgatgatataaatatagaacaagcacaattaactacttcaccatatggatctgaggatacctcagcatcaggtacaagctgtgcagcagtgggagcagttattttggctgatgaatccagcaagctcggtaacttgacatcagatcttgaagttgatacaattcagacaatgccactgcacacatctttagaatgcgtcgctcaaaagggtgaaacaaagcttgaggaaatcagaaggttggcgagcaacaattgtgctgagtttctagagagctaagttcttgctgacaaggtacacttagacttaggtgggcatgaagtgaattgaaacatcattccagacaagtcaatgaaacatgtggttcgaagcggtttcgaaaggtgatgcaggggtgaagtttgcatagcatcgataggccggaaatcggatttgaggacccaatgatatgccgctgcatggaaagtttcatcatttcatgcctgtggtcggtttgctcgtgaagattgcttttgttcgctgtggaagcgggtgcaagtattacacagcagcaatatcgggactgttgtgaaggatgaagttgagagtcaacatctgagaaccatggagctcaccatacgccacaaaggaactaagctgctggtttaggcatggttaagagagtcagtgctggtcctttaggttaaataaaaactttgcggggctgcacggtgtgcagaaaaggttgagtctagggcactaggctgatggtctatgtatgtgatgtacgcagataggcagatacctatgcgttcaaagtagcgcatcaaattttggccccattattttcactgcagtatcatgatgtgatgttgatagtagagatagagcaagtatgatactccctccgtccaaaagtttgtcgttcttgctttttaaggagtcaaacatcttgaactttgaccatatttatataaaaatattattatttatagt

SEQ ID NO: 26772 - DNA, 5967 bp, Zea Mays
aaaagaatggttaaagaaaagcctacaaaagaccaaccgtatttccctgcctgcttcctaacgctgagcttttgtatggtaggggaggggaggggggagggaaaagatggctccgggctcacacctccttgtccttttgccaaccgccgtcgtccagctcaatcctttgtggcctcttcctcacgcgccaagccagcccgtgatgctcggcgacagtagagtagtggtagccgacacacacacacacacactgcgcatacgattccctactcccatgatcccatcccatcatctcccacccagcattcacaaaaccccaagggcaaaataatatggactgtagatgctgcagtgctccactccattcagagacagacagcgctcggttcatcagttgcattgcgttcatctgctgccccagctcgtgctctctcccagtcccagtccctcgcaagctgacctctgcgttccttcagcactggcactggcagtgaggcgctgtgctgctccagtagctgtagctgtaagtagaaaagctggcaatcatcagaagaattccaagagagaggaggaggagaattctctctgtgtgtggcaagctagagctagcaagcgtaagtaagtaaggttcaaggatgggtcgagggagttgcggttgcaggcatcctctgctcgccgtcttgctgccgttgctgctagtgctagcaatggtgcccgagtcggcgcagctgcagtcgtcgcagacgtggtcgctgctcaagatccagcagctgctcagctacccgccggtgctccgcacctggggcaacggcaccgacttctgctacggcggggactacaagaccgcctccgccttcgtcgagtgctacggcgacagcgtgacgcagctccacatcatgggccccggcggcgccccgccgctgcccaagacgttcaacctggacgccctcttcacgacgctgacgaggctccccgacctccgggtgctgacgctcaccgggctcggcctctggggcccgctgccggggaaggtgtcgcggctggcgtcgctggagatcgtcaacgtcagcggcaactacctctacgggcagctcccggaggggctatcccggctgggcggcctccagacgttcatcgccgacgacaacatgctctccggcgagctgcccgggtggctcgggaggctggcgtcgctggccgtgctcagcctccggaacaactcgctgcagggcgcggtgccggagtccgtccgggacatggggtcgctgcggtcgctggcgctcgcgtgcaacaacctctccggccaggtgccggacctgagcgcgctgacgaacctgcaggcggtggacctctccaacaactcgcttggcccggcgttcccgcgcctggggcggaaggtggccagcgtcgtgctcagcggcaaccgcttcggcaacggggtccccgccgaggaggtcgcctcgctctacctcctggagcgcctggacgtgtcgaggaaccggttcgtcggcccgctcccgccggcgctgctcgcgctcccgtccatcgagtacctcagcgtcgccggaaaccgcttcacgggcctgctcgccgccaacatgtcctgcggcgagaacctccggttcgtggacgtgtcgtcgaacctcctgacggggacgctcccgtcgtgcctgaagacgctcccgtcgtcctccaactccaagcaggtgacggtcctggcggcgtccaactgcctgtccggcggcgccggcagcacgcagcacccggccctgttctgccagaaccaggcgctggccgtgggcatcgtgcccgtgcaggcgcggggcggcggcaaggccaagggcaaggccggagccgtggccggcgccgtggcggccgcgctggccgccgcgctgctcgccggcgtggccgcgttcctcttcgcgcggagggcggccgtgaggcgcgccaaggccaggccgccccggcggctggtggagcacgcggcgtcgtccatgtcggtcggcggcggcggcgcgtacccgtcgcagctgttcgccgacgcgcggtacatctcgcagacggtgaagctgggcgcgctgggcgtccccgcgtaccggtccttctcgctggtggagctggaggcggcgaccaacgacttcgaggtgtcgcgcctgatggggcaggacgcgcacgggcagatgtaccggggcacgctcggcaacggcacggcggtgacgatccggtcgctgcgggtgcggcgcagccagacgtcgcaggcgttcaaccggcacgtggagatgatctccaggctgcggcaccggcacctggtgagcgccctggggcactgcttcgagtgcagccccgacgacgccaccgtcacgcggctgtacctcgtgttcgagtacgtgcacaacgggaacctcaggagcaggatctcgcagggaaccgaagggaggaagctgccatgggtgcagaggatctcggcggccatcggcgtggccaagggcatccagttcctgcacgggggcatcatgccgggcctcttcgccaacaacctcaagatcaccaacatcctcctggaccagaacctcgtcgccaagatcggcagctacaacatccctatcctcgccgagaccgccaaatccgagggaggaggaggaggaggaggaagcaagtatccatctgacagcagggtgccccccaatggcgacaagatcgacatctacgatttcggcgtgatcctgctcgaggtcgtgaccgggaggcccatcacgtccatacacgaggtggaggtcatgaaggagcagctgcagtcggcgctgacgtcggagagcccggggcggcggagggcgctggtggaccaggcggtgagccgggcgtgctccgacgagtcggcgcggacggtgatggagatctgcctgcgctgcctggccaaggaggcggagcagcggccgtcggtggaggacgtgctgtggaacctgcagttcgcggcgcaggtgcaggacgactggcgcggggactcgcggagcagcgccagcgaggagtcgccgctgtcgccgtcgcagatcccgccgcggagggacagggagaccagcgcctggtaataagccaagcccgctctaggtgactgttgttgggcgatccgattaggcggcgaggcaggcatgcatcaagtgagatttcgttggtaaacaagtgtacagcagctgcaggctgcagctgaagctggaaacccaccacaggatgtgtacagctctttgcttcggcctactagtactagcactgctttattttatttttttcaatgcgtctttgccacctcattgattcacctactatatggatcgtttgactatgtgtaagcacaactgtatttggcgtcaatcttaccagaggtctcagttgtaggaccaagcgtgacttgactcgctgttgcagcacatttggctctttgcatggcacgatggcatcacagtcacagagtcagaaggccaaacaggcacactggcaaactactgtggattagtgagtgcactgctctccaacagttcgatgtaatgcagctgctctgcccttctccagacagctatggcggacagcaaccgcaatccttaaatcctgaaagatgcctgccgctggtcctgtcctccagcacagatagtcatcattgcgtacgtccccaatgcgagaatcgtgacatatctcgttctcggcctatatcgttgcccaccgtccacggtccaccatgatcagatgatcttcaaatttcaggtgcggcatgatgaggaatgcagaacacctttcgagcgatagccaaaaatcggatctcacttcgagatcgaccttgtctgccttgctgttccaagttgagtgtgctctgtccctgtcaaactcaacccacaaagcaagagcaacacggtccgtcaaacaaccattcccacgctataatttttgtacatgggcaggatcctttcaattcatgagaagataggtcaacaaccgctacattacgacagccaccaccatgagcaaccggggctcttgatgggggcagaacgacgacgacagactacaaaccaatcactggggttcttcaatgtttcgacaagcctggcgaaccagaaacacaaggagtgggtgtgttttttttttcacgctttcttattgtgcccctatcgggcacgacgagcatccttatgcactagtcggctgtccagctctgctccacgatctcacggactttgcggttgtactcccgcttgttctcgctgaacagtcttgctgcttctgagtttgcaggggagtttgggtttggatcacacagcagggactgcaaaaacaattttaccgcaagttagatagttcaaatacaacagcatattattgatacagcttgcagtcagaagtcatcggtacatggcagttgtgtgaactgtatgaacaaggataacaattaaaagtccattaatatggttctagttaaaatgattccatcaaggtttcaacactgctaatcattcataactatttcaaacactgctaaccaggatgaatgaaacacgacaacaacaacaacaataaagttgtatagtcacaaacaagttggagtagtacagttgaaacccaagagaagccacaaatcaagtttcagtcacgtagacaacggttttccatgcgcttatattcaaggctaaatctttggctacattccatcctttaagtctcattttactgcctctttccatgtcaacttcacattctcctacctctcttccatcactatcacgccttaggatcccactatacactggtgactggtgtctttagagttcttcatcagatatgtccaaactatctcaaccgatgttgcataaccttttctttaactaatgttacccctagcctatcaagtaatatcatcattccagactcatcccttgtatggccacaaaaaacaaaccaaattaatttggaatcgttgttctatgcttctaggcccacaagatcccttcaattttgggctgttaaactagttccagcgttctgtcaattaagcagaaggcaagaaagactttaactaccgcattatttcacaagaatatatttctaaatgtaatatcaaatgttcacccatgtaacttccaactcagtacataggaggtgaattataatggatatgcaagagaactaatcatgtgcatcaagcaagtaaacttgccacttcatgataagacaacttgctgaactggaagcataatataaatacaagcagacagtttcccaagtcaaagccattgcgagaattgattcattgtaacatatttgtggatgtgaggggtaaggtgaggaagctagttgagctgactaagattcgtgtaggtagttggaacgtatgatcccttacaggtaagctaagagagttagtcgatgcagcgagcaggaggcgtgttaatatcctatgtgttcaggagacaaatggaaggggcaaaaagaggtggagaacactggtttcaagatttggtactcaggaacagtggcaaacaaaaatggagtagccgagtaggtatcctgattgataagagcctcaaggatggagtggtgaatgtcaaaaggcaggaagataggattatcctagtcaaactagttttgtaggatgtagtcttgaacattataagtgcatatgcctctcaggttggtcttagtgagagcgagaagaggaagttctgggaagacttagatgacttagttagagcagtacccaccaatgagaagcttttcataggagatctcaatggtcatgtaggttcaacaaatgcacgttatgagttggctcatgaaggtttcgggtatgatagtaggaatcaaggagaggatattttggactttgttgtagcctacaacctagtggtagacaacacttttttcagaaaaagatgttctcatttggtgacttttaacagtggtcatcgtgcgagccagatcgac

SEQ ID NO: 26773 - DNA, 3704 bp, Zea Mays
ggccacaaacacccgcgctcgtcgctgtctcctcctcgccttttgccccgcatcgcgtctcgctgaaaccctctcggtcaccgccgctgtcgatcagacccggctgtagctcagggaccccgtcgctgcagtatcctccgagggtcgttggcgggggagtcgtcgtcgtcgtatttggctgccggaattcgatgcgccacggagcgggcgagaggacctagttgagttgaatacggcagcgacgggaggacgtgatgccgggggtggcgtccgcagcgggatcggggatctggtcgcgccggcgggacgagatcacgttcgatcgccttcagaagttctggaatgacttgcttcctcaagcacggcaggaactcctcaaattagataagcaaactctcattgaacaagcacgcaagaatttctactgctcaaggtgcaatgggttgcttctggaaagttttgcacaaattgttatctatgggaagtcactgcagcaagaagcttcagatattggtcatctgaggacagctattgaattaagaattacacatggagagcaagatggcgctcaggacccatcaatccatccctggggaggcctttcaaccacaaaagatggcttccttacgcttcttgactgctttataaaagcaaaatcattacgggtgcttcagaatgtggcagaggatggatcagccaagggatggctaactataggggtcatggaataagagaaatgtgtgctctacacactgcccacctttcatgtactacactggtggatttctggtcagcgcttggtgaaggaactagatcatctcttctgcggatgaaggaggaagatttcattgaaaaacttatgtacaggtttgatagtaagagattttgccgagagtgtcgaaggaatgttatccgtgaattcaaggatctgaaggaactgaagcgcatgcaaagggaacctcgctgcaccagttggttttgtgttgcagatactgcttttaagtgtgaggtgtttgaggatgctgtcgtaattgattggcaccagtgcttatcagagccagatgaatcttatgaccactttgaatgggctattgggacagatgaaggagaatccgatatttttggctttgaaaatgttggaatgaatgcacaagtccacagaaatggaatcgatcttgatcagtttgaggactacttcataacgttgcgagcttggaggcttgatggccagtgcacagagctgtgtgtaaaagcacatgcattgaagggtcaatcatgtgctcaccacaggctagtggtgggtgatggctttgtgactatgacaaagggtgaaagtattagaaatttctttgagcatgctgaagaggccgaggaagaggatgaagacgatgccatggacagggatggaaatgattttgatggtgatgatgcccattcacagaagcatgccaagagccctgaactggcaagagaatttcttttggatgctgctgctgtgatattcaaagaacagattgagaaggccttcagggaaggtacagcacagcaaaatgcacgtagtgtttttgtgacccttgctttaaaacttttggaacagcgagttcatgtagcatgcaaagaaataattacgttggaaaaacagaacaaacttcttgaagaagaggagaaagaaaagcgtgaagaacatgagcgcgggatgaagaggagaacaagagagagagaaaagaagaacagaagaaaagaaaggctgaaagaaaaggatcatagtaaaggaaaaagactagttgaatcaaagtcaccagacaatatttcatcttcagctccaagcaactccacagcatctatcaatgattattcgacaaatactctggactcaagagattcagtgtccactgcaatgcagtgacagaattttctccaatggacaacagtgacatttctacatcagatcaacccaagtctttgagacgaagtccaagatcaagagattattttcctcaagatcagtcatgttggtatgatgactgcggagatgagtctggaagaattggtgaattacgatggaagtcaagggaaaagacaagaggtactgatagaagttgcaacacagcatccacctcaaataacaagacaagagagaggcactcatacaatttttgcagctgtggccatccagaagactatggagttatggacagctgtttcttgccaacagttagatctgtcagagagatgaagatagcaagaaaatcaggagttgagaaacctaaggtgcagtacaacagatgctatacattggatagctttatagtgccaaaaggaaaccatgctggttgtacacagaaaaatgctatcccaaagcaagtatgggagcctatggatgctcgaaggaagactaacttacacaacacagttcatgattcaggttcaattaacgatgttgatccactgaaacatgtggtttttgataacagcggatctcataagttcagtgtaagatgtgaatcacagcctcaggcttctgaaagttccagggatgtttgtaattcagatcaaagatgtgcaaatggtgggagaaatcaaactacttcctgtgctagtactcttatggtaaataaacaaaattgttactcagaaaatgatgaaggctccaggcatgatgtagagctgatgacgaactctgctagttctgatagcacctcgtcatgcatgagccagggagatagggaaagcagctccagcagtacaacctcttcgagcgctcaaaatccggaatcatcttctgaatctgaggaatcaccggagagaataaacagcacagtaggtacaccatcatcaagagctgcttcacggtctttgcttgaagcatgtgcaggaaatggtttcagagaataccaacccaagacaacccgcccagctcacaatgacatgtttgggtacaatgtatcccctgtccaagaccagctgctgcattaccaaatcacgcatccacctcaacaaccgccaataacaatgggatttcatgaccgttcttgggctgcaccaacgaatggaaactttcaccatatacctccagagcctattcacaaggccgcaggcagctttagagccgtgcctctgtcactgccttttcaaaacggacatcggcaggttgctgagcatactcagagagacatgaatctagagaggcacccttcgaagttgactatgctgacaggcaaggatcccccagaagacaagaacaagtcgggactaaagtatctcccagaagacaagaacaaatcatgggaggcggatgcatccttctcgttgttccaattcaacttgccaatagcttcgcctgtaacaccatcatcgaaagataagagcggaaagttggctgcaaggacgccactggttgaggttcaacctcagctttgcttgagggaacaggcagatgtgaagcagtataacctcttctcctcgaaagataatggtatattttcgtttatgtagataaattaaaaactgtgacaaatctgttatccttcgtttctgctgtctcttgctgcacttcgtgaatgatttgtgttctccggagaaaaataaaggctgttggcattttcctcttgctgtctgtatcttcgtttacctttatgtttgttcccgtgtgcgctaaaagctagcaaactgtaatgctgctgactcttgattttttttataga

SEQ ID NO: 26774 - DNA, 1972 bp, Zea Mays
caagtctcttttgcttaccctctaatatttgtcaatccgtctggctttattttgtttcctcttgttgtgcattcatttgatttggtggtgtcatcagtcggaattctctcaatcagaggaacacgtgactctgggctcatttcccctatcgaagatcccatggcaattatgcaaaaaggctactctgttactattatgcttgctgttcttacatttggagtgtctactcgttggctcctgtacacggaacaagcaccttctgcatggctaaattttgcattgtgtggcttggtggggatcatcacagcatatgcttttgtttggatttcgaagtattacacggattataaacacgagccggtccgccttttagctctttcaagttctacaggacatggaactaatattattgctggaacctctggcttggtggacgagtctggcaacccaactggtggtctttttgggacagctgtagcgacaatggggatgcttagcacagcagggtatgttctcaccatggacatgtttggtcctatagctgacaatgctggtggtattgttgagatgagccagcagcatgaaagtgtgagagaaatcacagatgttctagatgctgtgggcaacacaactaaagctactacaaaaggatttgccataggatcagcagcactggcatcattcctcctgtttagtgcatacatggacgaagtagcttcttttgctcaaatgccgttcaaggaggttgacatagcagtcccggagatttttgttggtggtttattaggctcgatgcttatattcctgtttagtgcatgggcttgttcagcagttggcaaaactgcacaggaagttgttaatgaggtcaggagacaatttatcgagaggcctggtattatggactacaaagagaagcccgattatggacgctgtgtcgcaattgtggcctctgcatccttaagagaaatgataaaacctggggctctagcaattatatcacccatggccgttggcgttgtcttccggattttgggccactccactggtcagcctcttcttggagctaaagttgtagcctccatgcttatgtttgcgacggttgctggtattcttatggcactcttcttgaacactgctggcggcgcctgggataatgcaaagaagtacattgagactggtgcccttggtggcaaaggcagtgagtcccataaggctgcggttacaggcgacacggttggagacccattcaaagacactgcaggaccatcgctgcacgttcttatcaagatgctcgccacgatcacactggtcatggctcccatattcttgtgattaaccaaccagatttatcaagcttgccattaaccctgcggagatgtatctatgcgacttgtagatgaggtgtttacctgcatgtgatgtaatgatccaatcggttttagtgtgactacatgttgtacccaaagaaagaaagaaagaaagcagcgatctgtacccaggttttaatggtccaatcggttttagtgtgactatatgttgtacccaaagaaagaaagaaatcagcgatctgtacccaggtttgacggtagatattattctgaatttctgacgggtagtgatggtgcaaatgccatattttgtgacggacgtcactgaactagtagcccaagtgttttgtatttgtttattgctgggaacattatgacatccgttgagcttagctgtaagaaaggaacgatccacgatggattttaggatcgtgactgggtctacaccttacctttgactcttcacattaacaaagaaactgatgttatgtaatggtgttaatatgaccgattgtgagcacttctaagaggattaatatttaatagcttccagcacagaaaacatgcgcagataacaaaagaaacttcatatcaatctcaacagaagctgcatccttaaccatcctgcatttgtggtgcttgtt

SEQ ID NO: 26775 - DNA, 4156 bp, Zea Mays
ccgctgcgctcctccactcccctattccccacatcactccgcttttgcggccgcttgtggcggtgccttccacggggctgcggctgcgctccgccggagcgagcaaatatccttgcccccacgagaccctcgcacagtcgcacctctccgacgtgaccggcgccgtagaaccaccgggtcttcccttgtgggattattcaagaacatggagagaaagagaaaccccattgtctttctggatgtatctgtaggtgatgagccagatgaaagaatgatctttgagttgttcgctgatgttgcaccccttgtgactgagaacttcagagctttatgcacaggtgagctgggaattggacacaagactaagaagccattatgttacaagggatcatcgttccaccgtgtcatcgaagggttcatggcacaaggaggtgacattgcgaaaggaaatgggtctggtggagaaaacatatatagtggaaaatctgcagatgaaacttgtgttctacctcatgatgatcgtggtctcttgacaacagcagatactggatccaaagctagtggctcccagttctgcattactttcaagcctaattctcatcttgacaggaagcacacagtttttggcaagcttgttgttggaagtgatgttctgaagagaatcgagcaagtagatgtgcaatcccctgattcaactcctgttgttccggttactatagtaaattgtggggagctcactgaccgtaaagatattggatctatgagaataggaattgataaaaagagggccgccaaatcaaagttgtcaaagggtatatcttctgatgaggaaagtaatgaaggacagcacaagggccgccgtaacaaatcttcaaaaaggagaaggaagaagagatatttttattcggagtcagatagctcttctgagtcggagactgaatcatctgattctgagagcgattctgatacttactcaagtgactcatctgatgtcagcagttcaagtgatgacaggcgaaggcgcagaaagagacattcgaagaaaaataaacgcaagcgttcaagaagaaagcatgaccaaaggcgtgaaagaaggcgtaggaagcgtgataggaaatcaaaacagaagtcaaaaaggtctgttaacattgtcaaatttaacattcctgacctttgatctgtaatatatgttcttttattagcaggataaagggtgacagtgaagctgaaagttcgagtgatagcagctctgaagatgctagaagcaagagacaccgccacgggcggaagtccaaggcatcatctcaagtttttggtagtttcttttctttttccctatatatattctttaccccaatgtatgttgggcttctttgtttcactaataccaactaccaaagtaccaataaatcgaagcataggttcctgaaatttgttccgatttctcggcaagtttaggtttttgaacccttagagttggagtaacatgcccttaaacttgtgctatgtactacgtcagccagttctttgtaacttaatagtggggctggggtggcattcatcatcatctatgaatggtataaatgcaatagaataccatatctggttaagtatttcattgtatttcaagaaactgatagaataaatctgacaaggtaatgcaatggcagtagttaatgcgacccaagcacaatcaagggacttcacaaaagtgagttcaatttcttgcatgcttgaatgccttactggttcactgtttacttacccatcataaatacttgggttgtggacaaggatttggtcgaacttttgaaactcactatcaataacttatgaaatgcagatagtatgtttggaattacgagaaccattcactcagatttgtcttaaacatactgtcatattctcataattttattgaatttataatttataaaaacaaatatattacagtggaaaacaacagcttaaggtaggccatgcatgtcctaaaatcaggaaattctgattggctggatatctcttttaggctccggtcgctgtgtggctggaagccgctgcggctgcggcttttctagacgttcgctacagttctcggaagcaggtgcagttgcagctggctgcagtttaagtggcagccgaacaacttgttaatctctagatcatggttgcatggtattatattatcggtggtattgttctgttatatgttttggatgtacaattgtactgattggccatctagtaagggatgtatagttcttgcttggttatgtggtacatgtttagtttagtttagtttaactaacgattgtaatctacacttgcctttcagaggaaaatattgctgcagtgtctgctttgaaggatgccacgtcacctcaacaaaagagtggcataccaaacagtccagcacaagatgtctccccgctgcaaaatggggaaaactatacaaatggtgttaacgaatcaaaaattgaaaggaatgcagctgtcatgcctgttctaactggcaaccaaagcaaatctaggagccagagcatgagtgttaatcactcaatgagcaagagtatgagcatcagcccaagaagaagcccaatgaaaaggtcaattaccaccacaaagaggtcagttagcaggagccctgttcaccataatcgcagtggaagtcctgtcggtgctccccaaaaaagcgtgagcaggagttcagccagaaggcagagcatcagcaggagccctgctaggagcctcagcaagagcccacccagagatgcaagcagaagcccccacataagcaggactcctgttaaagctcacagaagaagcattagcaggagctcagctaggtccatggaacagagaagtctaagcaggagcctggagagaattcatgtacgaaaaagtgtcagcccaagaccaccattggcgaagccaaaaagcattacccgaacccctgtgacatctccattgcgaagcgttagccggagcccagctaggatttcaaggagcccacttaggccttctaggagaagccctatgagaagtccacgacggaacattcacagaagtctcagcaggagccctgcaagaatacttagaagtgtgagcagaagtccagtaagaggtggtcgacctcgccggaacattagcagaagtcccagtccacttcgcagggcattaacaccaccaaacaatggaaggagccgatctaggagtgattctcctgatgggtcacccaaacgcataagacgtggacgtggttttactcaacgctattcatttgcaagacaatatcgctcaccttccgctgatcgcttgcatcgttatggcggaagaaatgaccgtgacagatacatgggttaccggggttttcgccaccgatcacctcctcgacgttataggagcccctctagaggcagagtgtcatcgccaaggtacaggaggaggagccgaagcgcatcacgcagtcctgtccacagaggaaggagaggtgggtacaacaagagtcctgtacggagccgttcaccccccgccaggaaaaggtcacctagcgatcgtgcacggtcagtttctaggagccacctttctaggtcagtatcaaagtctccaccagtgcatcatccctccccacttgattctccatctctggagcgtgcaagtgatgggaaatctcggtccccatcaccgtctggtggaggcaagaaaggtttggtttcctacggtgatggcactcctgattcagctgggaagtaggtttccaccggatgtattgtactacctttggccattgtctcttgatcggtccagtgttacgtcactactgtagagaagagaacggttttggtccttgaggcgccccgtgtactggtgttgtcgctgtagaattgttacttaagttgtttgggatgatcgtcgttgtccttagattatcttaagacctagtactctgagcttagtttacgctcatgctgaacatgtagcagggcttcagcttaattaccattggtggaatttggatgttataatgtttgacgcatagagaatcattacattattttgatctcggagcacaataacatgtataattaataattaattccttctggaactatccaacactagcgtttctgcatgtatgcaataattcgcttggccg

SEQ ID NO: 26776 - DNA, 1424 bp, Zea Mays
gttgcgcccctgtgtcacatacagtttattaacgttcttatgtaactgagtcattgcatacaatgttatattaagcaaaaaattgaatatgaattactggctaatagtgttactgcactgccgtagctttatatgcaatgttaggagatgctgcttttttctcgtactgacgaacagacaggagaactacatgccattgcattaagagggaactaggagatgctcctggtcaaaccacttgaaagttgtactttaaatgaagttttttttgaagtcttttctataggatttgtcaacatatatctttatgtgctcgaatgaaatactcgtccagagttatctgattaaaaaattctaataatctattaacaggtttcctttccagaaagacctgatctgaagtctgtagtgcttaaagagcaaccattctctttgcagagggaaacatcgatgaacaaaccatttttcatgctgttgacattaaatttcagtgatggttgcagctgtttgagctcctcaattggatggcctgttgattttcagaagcgaaaagacagcttcgtcagagatagagctctagtcctacgggagttgtactctgctgcacagcgcgagtcttgcattgggcaacaagaaattctggaaagagagaacctaccaagagctgagacgtctattcatggaatcgtgacaaacatcgttaggtatgacactgaagatgaaaagttggctccacccaagaatgatttgatgaatcacagccgcagcaaccctgcaaaacggcacgtggaaggcactgattgccactcgtcattgccaaagaaactgaagtactttttgaaagacaagaagctgaactgctaaaagtgtaaaaccgtagaaggtagatagagaatgctgtaggtttgtttattttggttattagacgagttatacgtagcatagatgcatgggaagttcgcatgctaaggttgaactcttctgctgcataggaaagttggctgacttcttatattatgcgagcctagcttaggtacctcctgtggggagaagcgattgcaatacatggtagcatgttgtagagctcctcaccccagttagtcagtgactgatgatggtatcctcttaccagtcctctggtggtatcatcttttgttcacggaggtcgatgaagtactgcctccgataaaaaaaagacgcttttgacattattgctccccaaattcttattttgacggctatactttgcccagcgagtaatatctaataaatatacgttttaacgcaattacatttttttttgtccaagaaaaatatttttggaagctgttgaaggtcaagtgtcaaaattttggatagacgttgacgtagtaggttgagagcaggtacttgcgtgcttcccctgtgaagttttgtttcataat

SEQ ID NO: 26777 - DNA, 1299 bp, Zea Mays
atcacacttataaaatataaagggactgaataggaggaattgttggagaggaggtcaaagaggaggaataaaagatatatttaaaaatgaatagaagatacaaatagcgggagatgagagggagacatttaaaaatgaaaagaaggcacaaatacggagagacgagaggggtaattgttgaaatcggtaactataggagcgggtcgccgcaatgcgcacggcagccctcttcctcgggaagatttcaaatccccgcggcctcttccatcttctgctcggcacggcactccggctgcccgaaaaatttcgcacatcccagattcccgcccgctctggttcgcgccctcgtctggttcccttgccaacccggtcattcaacgtcgcagccaccccgcgcggctagggctgggactcgaggcctagggtttggctgtaagtttggtaacacgatggcgggggccgcgggggagagcagcggcgagcggcaggggacggtggagcggcggatgctgcggtcgcggtaccacgccgtgaagaacatcatcagcgatgagcgggatgagatgtcgagggcggattcggacaggttcacagccatcatccagcaggtggattgcctacacgagctcgtgcagaggcctagggagcaaatagcggatgcagaagctctgcttggcattacaaacactttggtaacttcggtgaggtcccactcaagtgaaggaatcagcccttctgatttcataacagctttactcaagaagtttgggcagcaagggaatcatgatgatgagtctgtctcattacgatggggtgatcttgggctttctgtttcacatatcttcaggcctgtgcctggatgctgtaccatgcttggtcctatgaatactgaagtaaagcaacggaaagttgtagctgttggtaggaaacggactgcacggccaacagaaaatacctgtcctgaagagcttgctgagtcttcagaggaagtaaagacagacactgacaggaatgtcttagttatgtttgatatcctcaggcgaaagaagagcgcaaaattggaaaaccttgtgttgaataggctttcctttgcccaaacagttgaaaatgtttttgcactatctttcttagtgaaagatggtagggtggaaataactgtagatgatagcgggcatatagtacggccaaggaatgcacctgctgctagcgctatagcctcaggagaagtctcatacagtcattttgtttttagatttgacttcaaggactggaagcaccatgcctggagttggtctgtga

SEQ ID NO: 26778 - DNA, 1173 bp, Zea Mays
aaagaaatcatgaagtgttgatgtcatgtactcctataaaacacttttaatatgaattctctatgcctacttctagagtgatgttcaaagaggttgacgctccttcaccatccccagctttgtggaatgggccacaggtagccatttaggatgacaaagccacaagggtgtccttcatcaaggctatgctagaagcctcagacttgtgtctgaggaaaattcataaaaatggtacacagaagaaagtggaagaggaatttagcacttgccctctgtcagtcctaatgatgagcgttaagaacaacaccaagatactgaaagcaaacatggcttgttcagtcgggcagcggcagcagaggggatggggccaatgacggaggcggagaggagaacccatcgatttggtggcgtaagtgggagctcatcgaggccgccaccggccggtccacctcttcaataatcgtccttcatcgcccttcagttaggggcgagggttgttcagtgctttgacatgtgtgcaactattcaagcacaatggttagatgatatccccattcattttagattattacattgtggtgttcggcttcttcagtcaagcagcaatcatgcaacatgccttactgtagttttttatcactgcacatgttgctggacaaatttatggactggaggattatagaggactaacaagtgctactgggagattctcgagcaccattgaactaagagattccaaatagttctttggagtctattgttgatgttggcggggataatctagcagagatttgtcagattttttgtgcaacacggaggctacatgaggcagcaacgatcccattcttctcgcatgccactttacacaagctaaggatagcttctggtctcactcatggttgtggcagggaaagccgagtcagtagggtttgtcatgtagctggagttatctcagaccacatattagatgcagtgatgatgttaatggaggatgtttacatttaccgtgcaagcaagatgacttatattatgccttaggacaataagtattgttttcactctaatgaaatacttggtaaaaagttgtctctgtagttgtatatttgactgtgaatatttgaacccactgttacaattgttgctaattgaggtcagatttcagaggccaaataa

SEQ ID NO: 26779 - DNA, 1787 bp, Zea Mays
tgccccgcttgccgttggagcccccacttgctaattcttcctccctgtatatatatatataaataaataattaattatgtaagccttcctcctctcctaatcactcacactcattgcttccctgcaccttttccttgatccacttgtcaaacaaacccttgcaagctgcaaaccactccctgccctttttgttctccttctctacactaccactccttggtttgggaattgggacgagacatgagcggagaggagcctccactaaccaacccttaatcagagtccttaaccctgattagttcgctgcctccctcctaatcccccagctctagagctcattcagcaggctcatcacacgccctctgcgtctctgttgcccagctagcagctgtaccggttcttttcgggggccagggccagggccagggtcagggacaaggagcgagagctcgccgtacgcgagccgggcggtatgtcgaacgccggcgaggccagaggcgtggggacgggccgcgggtcgcggctaccgcggtggacgcggcaggagatactggtgctcatcgaggggaagcgggtggtggagaggagcggccgtggccgcggccgcggccgggtacggggaggagagggcgccggcgccggcggagcggctgcaaagccgaccaagtgggcggcggtggcggagtactgccggcgccacggcgtggaccgcggccccgtgcagtgccgcaagcgctggagcaacctcgccggggactacaagaagatcagggagtgggagcgcggctacgcggccaggaaggaggcctccttctgggccatgcgcaacgacgcgcgccgcgagaggcgcctcccgggcttcttcgaccaggaggtctacgacatcctcgagggccgcggcgccgggaatgcggcggcgctggaggacgcggaggccaaggaggaggaggaggtcaaggcgaaggcggtgctccacactggccgcgggatccaagggggcggcctcttctcctcgtctgaggacgaggatgaccaagaagacgacgcggccacgccaagtccgacgccgacaccgacaccggcgccggcgccggcgccggctgcggtggtcgtgccgatccccggagagcaagctgtcccgttcttcgcgcgtgcctcctctctttcagtgcatgttacagagaagacggatgacgtgctgcccaggcaagcgagctccgagcaaggcacatcaaaagaaaagcagccggagcagatcaccgaggactcgccagcggcgcagtgcgggcagaagaggcagcgcagcgatgacaatgcctccggaagagccgcgaccaacctgcaggggcagctggttgaaatcctagaccggagcagccagatggtggcagcgcagctagaggcgcagaacatgaacagccgactggatagggagcagaggaaggatcaggtgagcagcctgcttggtgtgcttggcaaggtggctgatgccctctacagaattgctgataagctatagccgccactgtgagtgtgtcttgagcacagtaaataatcgctgcaagaatgtacagattggtacaggttgttggcgtcctattgttattgtggattggttctgaaatttggtcagaaacctgaaatgggatgccccattttttaacccatgggatgtagcatttgtatgcccgtatggccccaaaactgtgtattcttacagaggaatggaagtgcatatctgatgacacaatcttgggtcagttaggtttcctctaatttgatttctg

SEQ ID NO: 26780 - DNA, 2702 bp, Zea Mays
ttttgaaccagcgaacggacgctcctcggggcccaaacccggctggtctctctcctctgagttgcccttgccccacattacaccacaccacccccctcccactccatgctgtcaggagcggaaggccgaagcgccaccgcgcccaccctgatctgcccgcccacctaacgtcggccgtcaatcggccgccgccgcgatggggtttgacgggctggtcgtggtgtcagatccttacctgcagcgccgcttcacgcaggccgaacttcgcgcgctccaggcccagtatgcggcgctgcgggacgcgtcgcctaacgggaggctgcggatgcgggacctccccgccgccatctctggcgtccgcggtgcggccaagagcagggacgccgagaaggagaatagcgcgccggagccaggcccctgccatggcctcactgacgaggagtgggcctccgtgcttaaggccgtcgcgcgtgctgacgagaagccgcaccaggacgcgagcttcgagctcttcctccgcgtctacgctgagatgcagctgcgactcaaggcagtaagcgtctgctccggccgcgccggaggaatcgtgcgctcctcctcctcctctgctgttgccttcctcacggcggccaccaccacactgcttcacaccatcagcgagtccgagaaggcgtcctatgttggccacatcaacgcttatctcgcggatgatccgtccctgaagagcgccctccccatcgatccggcgaccgatcacatcttccatatcaccaaggacggcgtgctcctatgcaaactcatcaacttggctgtaccgggcaccatcgatgagcgagccatcaataccaagagggtccttaatctttgggagaagaacgagaaccacacgctttgcctcaattctgccaaagcgatcggctgcactgtcgtcaacatcggcacacaagacctcgccgaagggaggcctcatctggtcctgggcttaatatctcaaataatcaagatacaactgttggcaaatgttaatctgaaaagcacacctcaattagttgaattggttgaggacagtaaggagatggaggagcttatgagtttatctcctgaaaagattctactaaggtggatgaactttcaactgaagaaagcaggtttccagaaaagagtaacaaatttttcatcagatataaaagatagtgaagcctatgcttgtctattgaatgtcctagcacctgaatgcagtgcaaaaccatctgcgatgtctgtaaaagatctacttcatagagcaaggttaattcttgagcatgcagataggatgggctgcaaaaggtacctgactccaaaagacatagttgatggtttacccaatctaaatcttgccttcgtggctcatattttccaaaaaagaaatgggttgtccaaacaaatgaaacaagtttcctttgtggatggactctctgatgatgctcaagtttccagggaagaaaggtcattccggctgtggattaacagccttggaatttcaacttacatcaacaatgtgtttgaagaccttagaaatggatgggttctccttgaggtgattgacaagattgctccaggctcagttaattggaagatggcaaatcgcccaccaatcaaattaccattcaggaaagttgaaaactgcaatcaagttttgaagattggaaaagaactaaaattttctttggtgaatattgctggaaatgatattgttcaagggaacaaaaaactgatattaggaccatataatgaaattgcatttatcctagcttttctatggcaattgatgcggtacaacattctacaactgctgaagaatcttagatttcactcaaatggaaaagagatcacagataatgacatattggcatgggccaataagaaagtaaaagattctggaaagcaccactcttatatgcaaagtttcaaggataaaagcctttcaagtggcacctttttccttgacttactaagtgctgtggagcctcgagttgtgaattggagccttgtgaccaaaggggaaaaagacgaagagaagcaaatgaatgcttcatacatcatttctgtggctaggaagcttggttgctccatttttttgttaccagaagatatattggaggtgaaccagaagatgatgctaactctgacagcaagcattatgtactggtatttgaaaaggccaacatcacaatcattggactctgaaaacgggagttcatgtgaaacaacctccatcacaacttcagatgattctgcatctgaatcatcgattgatgacaatacaactagataaaagagcagggtcatgaaaataattgatatgacctgtcattttgaaaacttgggattgattgtttgctgtaattttaagggcaaatacattcaagaccgaggcaagggaaatggttaagggctttgggtgtttttttgaggtttaatagtgtgattgggtgaaagatgtttgacatcctgtaaatatatctataactagtgacaataggttgtccaaaatccactatttgagttagaacaatttgagttacaatgtacaataaattagtgtcctatccgttaaagcttttaggcgcatgttgtcatatgcttatggaataactacaacattttccttgaaatatgcttaaattaacacgagcttaaatcgcttgtgatttggcttgatg

SEQ ID NO: 26781 - DNA, 4039 bp, Zea Mays
atgggggtcatgaggaaaccgatgacttgctgcacaagcgccgcccactgggtgtactccagattgggttcccctgatgaattgtcacatttcctgctcagtttgctagagtcattgccatcacttgctatacatggttttgttcttccactagctctgcaatggatatcgccaatgcttaaaagggactcaaattcggttttgtatgctatggctgttcgattactctgcaagatatgggctgtaaccgactgggcatttccaaacttacaagtggttctggatcctgagaatttttccaatttcatctctgacagagagatctctgcaagtattgccacatcaatacgcgatgtttgcaagcaaaatccagatagaggcgttgatataatattatctgtctctttttgtattgagagtcgtgattctgtggttcaagctcttggcctcgagagcctctcgtacctttgtgaagcagatgtggtcgatttctacacggcgtggaaagttatatcaaagcaggtgcttgattattacgttgagcctgctgttgctcacagtttgtgtattctgttgaggtgcggagcgatggatgctgaggcatattctgtaatatctggtaaccttgtaagaacattgtggagaattggaacatccaagaaaaataatcccgatccactctgggataaagcaagaggaactgcttttcactccttgtccaactacaaggtatcacttattcaagatgctattcctgatttctggaaactaaactatgagttctttacgaacgaacataatctggcagttctcaaggccatggagcaccttcaagatgagatcatcagatatgagcacataaatcgtcgtcgagtgactactgacaaaagaactgcagtgcataaatttgagaagctactggaggtttttcctcgggcggtatttaaagggatgttatctcatcatcagttgcctggtgctgctcttttaactctcaattttactccaaaggacatacttaatgaagggaaacctaaggatttgcctagagttcattccgcttttgagcaagcttttgtggaaattgctgaatctatgtatgtgtcaagaaacatagtggtagctcttcttgccttgcagtcatggaagtcatttgtttccaactggatgcaagcagttgtggcattgcttgacactaaagactcgtcaaagttgaacaaagcaatgaaagctgctaatgatatatttaagattctgtgcgaccaagttccggtgtctactcctcaagttgttgttaacatagctcttgttattggggcactggccttgattgttccgccaactgctcatttggtagtatcttcggtatcagattttcttttaaaatggttgcttcaatacgagcatgagcacaagcaatggtcagcagctctctctcttggattaatattcaattgttttcatcctacggacaaaaagagcagacttcaggttattaatgggtttcttgaggttatctcaaaaactgaaagctgtcttgtaaaaggagcttgtggactggcattaggctatgtttgccacggtcttttgacaagagcacataatgctgttgattcagaagtagaggctattacacaactcaatgagcgtgcatcagttgaggatattcttcatgctttggttaccttgttaattcaactatgtccatcctcatgctattctctgaagaagcttagtatatacggaatatcctccatgggagggatggaagaaaatattcatagcttcagtgatgatccttgggctgtcgctggacttgtcattggtctgggaaactctgttgttgctctgtatagacttggagcttatgaagcagttactgaagtcaaggatgtattgatatcatggataccaaatgttgattcgaactctgcattatttgatgaaatagattcagtatcactatgtatgggttcatgtcttgctcttccatctgttgtggctttttgccaaagagtggagctgttgaatgacgacttggatgcattgttcaatcgctacacttctttagcttctgagctcctgaacctcaataaatctgggattatctttcagaatttgttaatggcaatctgtattggtgctggatcttttctctcttctatattgaatgatggcgtgcatgctatggaatttaatggtgttaaaggctttctggacactctcagacatatatatacccacccttttcctccccttgttcatttgggaggcatgtttggtgtggtcaacgcttttggtgcaggtgcaggagatcttactggggtgttttcaaagcctatgacttctcaaatcaaacatgaggatgctaaggataagcacatacaagattatgctgcatgggctatttcatttctcagaagcaggtggtcgaagaatcagaatcagattctttatgaggacaatggttctaatagaagtcctgatgatcatgatcaagcttcaagtttttctgaacaaagcttagtttggaacttaagtctctggttgagtgatctaaaatttgaaaagtctggtgatgtggtgccaataagtacagttggaacagttttaaaatgcctttccaaagctccccgattgccaactacagactggggagctattgtacggaggtgcattaaagctgaggcgcagatttctcataagttaaccaatcaggaagatcctaagatactaaaggaggcatgcttatatttgactctagctcatgctgctcacataagtccccttctgcagtttttggatgatctgactgacatactcagattccagagattagatataaatgttcagtctattttgctcaaacatttgttacacctaatgaagctattctctgattcaagattggataaattgcatgaggattttaccgaatacttgtattcccccacttcttcatacttgaattactcatctgaacagaaaagcatgctaagaatgtcgttctgggaaggcatttatacgtgcctggtggatgtttctgaagaatctggtgttttttcattcattgaaaaatgcattcagtgcttgttgcctcttttgacgctccatagtgatggtcaacctgaattcatgaaagagtggtctgttgctatcttatgtcttacaaacgcccagaaaaaatggctggatgatattttgcagattcgcagtactgccttagtcaatgaaggacatgttgatgttgcaaaaaagattatcctcagagcaagattgtgtgcaactggttgtggttcaacacatgagctgggaaatataaagacagcaatattgtgtacaaaagctgatggtgtttggtggagtgtccttgttgagatcacttcagccttaaactcagccgaaaacatcatcaaaagacagtggcttctggatgcattagacattggctgtgttacagctcacccctcaacggtgctgtgttttgttggcttgctttgtggtagctgctgcatctatatgccgcttcttcttgttaattcgataaatgtactgagcgacttgccggtcaccctgcctgcctttctctccaccatcgtttctgatgatttcaggaactctgtggcagacaggctatggctgttgactactgacatctatacttgggctgaacaattagctcacggacacgatcaacctggacatgatcgtattcatagaagtgaaactgagattgcgacttttttggccaatattctgctctctacatgcattacagtcgaggactacctgtctgttgataagcggctaaagcttgcaaatcttgaagcactctaatcaaagggagatgtgtttcttttctattttatgtatgtatttatgtacggtatcagtcatgttttaatagttgatgtccctgctgatgatccagcaatgtttttttcatgtacataattaatttaactaactcatcttatgcactgaaaacaatctattgttcaaagatagatagacctatgaaataatattgttgtgtaca

SEQ ID NO: 26782 - DNA, 1995 bp, Zea Mays
gtgctactggattgccctctcaggatatctattgtgcttacagctggtaacttttgtttcttgtcttgttctatagatctgtgagagatcactgacacaatcgactggaggtccatcaggacccaacactccaaattttgtaagagccgaagtgcttcctagtggctatctaattcgaccctgtgagggaggtggctccatgattcacattgtggatcatgttgatttagatgcttggagtgtgcctgaggtccttagaccactttatgaatccccgaagattcttgcacagaaaacaactattgctgcactgcgtcacattaggcaaattgcgcatgaatctagtggggaaatgccctatggagggggccgacagccagcagttttgagaacatttagccagaggcttagcaggggtttcaatgatgctgtcaatgggtttccagatgacggttggtcactgatgagcagtgacggtgctgaggatgttactattgctatcaactcttctccaaacaaacttattggtcctcatgtcaactcttcccagctgtttactgcgatcggaggtggcatcctgtgtgctaaggcatcaatgctgcttcagaatgtgccacctgccctactagtacgatttctgagggagcatcgctccgaatgggctgatcctggtgttgatgcttattctgccgctgctcttagggctagtccatatgcagttcctggcttgcgtgctagtgggtttatgggcagccaggttattctgccgcttgcacataccttagagcacgaagagttcttggaggttattaggcttgagggacacagcctctgccatgacgaagttgttctgtcacgagatatgtatcttctgcagtggtgtggatgaaaatgcagctggtgcatgtgcacagcttgtgtttgcacccatcgatgaatcttttgccgacgatgcgccactgctaccctcaggcttccgtgtcattccactggatgcaaagacggatccaccatcaggcacacgcacacttgacctcgcatctaccctcgaggttggatctggtgggacaacgcgtgcttcgagtgacgcctccagcacctgcaacacaagatcagtgctgaccattgctttccagttctcatatgagaatcacctacgagagagcgtcgcagccatggccaggcaatacgtcaggactgtggtggcgtcggtgcagagggtagccatggcaatagctccttcgcgcattggtggacagcttgaaatgaagcaaactccaggatctcctgaggcacacacgctggcaaggtggatcggcaggagctacaggttccacactggagccgaactcctccgcacggacacccaatgcacggatgcttccttgaaagcgctgtggcaacactcggactcgatcatgtgctgttccctgaaggctgctcccgtgttcacctttgccaaccaagccggcctggacatgctggagacgacgctgattgcgctccaggacatctcccttgagaagatccttgatgacgatggcaggaaggcgctctgcaccgagtaccctaagattatgcaacagggcttcgcgtacctccccggtggcgtgtgtgtgtcgagcatggggcggccggtgtcgtacgagcaggcggtggcgtggaaggtcctgagcgacgacgacaccccgcactgccttgccttcatgttcgtgaactggtccttcgtgtgagaacccggtcccctagtagtcagtagagccaagtcgcctagcgtttgcggctctgttgtttgaactctgtaccccatgtaccgtcgattttgcctgtgtccaggcaacctatgaaacacacctttgtagttgttcatcatccccgtggaacaaacagctttgtactagttgttcgtcttcgcttgcttgctatcttatgatgggtcctggtttgctacagctcctgaaaaattgattggaccattgcgtctgtgctgctgaa

SEQ ID NO: 26783 - DNA, 981 bp, Zea Mays
cccgacctcctccctcactcttttgacaagtcaccatggccgcggtgcgcgatcagggtttgcagtgcgctggtccgtagcctagccgccacactcttgcgcgcttggcaagctaggcttcacgctgccgttgcgacggccgacggcgccgcttcccagagacgatggagcgaggacggggtggtagtggcggtcgcggtggcggccgcacgtttcagaggaacaatgcgggggaggagtggcccaacctcgtcggcgtggtgctgtcgtggagcctagcggatgtcatgaacaaggacctcttcaaggacaaggtcaagcagataccgtccacgttccccaacctcaagagctacctggagtgctacacctctccattgctggaggagctgagagctgagatgtcgtccagcctggaatccctgtcaaccgtgccttctgtcaggatctcacggatagaagaaaagagagacaaacacgaaatttatctggcttctgattgccaggttgctaagccacacaatcgccctgaatgctacactccaagtgtcggtgatgtaattctcttgtccgatgtgaagccgggccacatttctgatactactcgcaacggaaggccgtaccgagttgcctttgtcacagatgcggatggaggggatgaatacgacgactcaccaccggctaagtatggcatcgtagcgtcaggcaaaatcgatgccgccgatgacgaacgccaagatggtaaaagtacctcactttttgctgcttgtctgctcaacattgtgacatacatccggatatggcgttgccttgattatgaagcactcagaacaaaccgaggccttatagagaagatggtaaactatcagccgggtgataaacttgcagaggacagatatcaaaggactgagaagctagtgttgaacttactatatcaatatccatgtttcctttttctttgttataatattttatcatgga

SEQ ID NO: 26784 - DNA, 809 bp, Zea Mays
agtcatgttgacgagggtgatcagggggtaaatgccacacagtggctgcataacgaacctgtacttgttactgtaagtggtgatggcagtgttggaatgtgggacgttactttaggtcaaccttgtgtcagacatatcgttgcccatactcgatgtgctaatgcggttgctgtggcccctaatgacaaatacctctgcacaggaggaagcgatcagaaagttgttttatatcataacagaagtgggcgtacacatcttaattggcgtctttcacatcctctgcaaggaaatgattgatatgctgccagaaatcatagaattgttccgctaacatgcagggaagttctctaaggcaggcagttgaactttggcagaaacttggttgctccagatggatgtggagccaggacttgtattgaagcttctgcttgatggacggctgaagcttgtgttggcccttgacattattgaattctcgtgcctctttacaagtagagtctgtatctttttgttctcctataaagaaatgttcatgaaatcaatgtcattctgactggtagtaggtctctattcttagattctgtttggataagggggatggaatccaaatccttaggatttagttcaactttgaactaaatttctagagcaacccccttatttgagcacccatgtatgagccagattatgtgattccctgtaccatcaaccagttgactaataaatactcacctgttgcctgtatttctcttctttttctttgagtttgaacatgtagtctttcaacattgccagaagcgggagctttc

SEQ ID NO: 26785 - DNA, 2983 bp, Zea Mays
agcctctaagctccacatgtgtgtttctctggtctttatgcgactggtgatgctgttggtgccccagtgcgtccaagggctccagctccaaaatggttgaaatgccccaccggtgcatcttttggtttcggtggtaaacttgtttctttccatccggtggcacccacccaaggtgcacaaacatctacatctgaggtgcatgtgcacaatttggtgattgagcaaagtctggtgagccgatcaactgaatttgaagctgctattcagaatggtgacaaaagttcgctgcgtgctctgtgtgaaaaaaaatcacaagaatctttatctgacgaggagagagaaacctggggcttcttaagggttatgtttgaggacggggattttgcaaggacaaaattgcttgctcatcttggcttcgaaccacctcaggcaccgcctgcaagttcaactgatgaattgagccaaacattggcagatacacttaatattgatcatgctgcagtaaccgataatgcggatgcccagtttcttattgataatggggatgattttttcaacaatcctcgaccttcagaggctagcttggctgaagaatcagtttctacaaatggtcaacagatagaacaggaagtttctggagattctgtgccatcagatccatcaattgacaaaagcattcaacatgcgttggtggttggagactacaaaggggcagttaaccagtgtcttgcttctaatcgtatggctgatgctttggttatagcccatgccggtggttctgctctctgggaaagcacaagaaaccattatctcaagaacagtatctcgccctacttaaaggttgtctctgctatggtgggcaatgatttaatgagttttgtgagtacctggccactaagttcatggaaggaaactcttgctctgctttgcacatttgcacagaaagaggagtggcatattttgtgtgacacacttgcgtctaggcttctgaatgtcggtgatacactagctgcgaccctctgttatatttgtgctggaaatattgacaaagctgttgaaatatggtcccgcaccttgaaatctgaagatggtgggaagacttatgttgatcttctccaggatttgatggaaaaaaccattacgcttgcccttgctacgggccagaagagatttagcgcgtcactgtctaagcttattgagaactacgctgaattgctggctagtcaaggtcttcttaaaactgcaatggagtatttaaaactgttgggatcagatgaacactcgcatgagctggcaattttgagagatcgaattgcatgttctacagaagagaatgataatgttagttctgtttctgaaagcacgggcactccttccccctatgtcacaaatcaaccttataccaccccagaccattctcagaatgtttaccaggtacctcaaccatacaatgtgccaagcaatacatattcagaagcttacccacaacaaggtacaggagcctatggatacaacaatgcatatcaacctcagcaaccagccaatatgtttgttccacctagcacacctcccaacactcagcaacagccaggcccttcacatgtaccagtgcctcagcaaacagtaaagacatttactcctgcgaacccagctggtctaaaaaacccgggacaatatcagcaacctaataccttaggttcccagctttacacggtaggtatactggtgacctatatttactagtatttctgtgatattagttacaaactggtcttaacagggcgctacgaatcaaccgtattcttctggaccatctgctccttatccaagcggacctccaacaacatttcatcagcctgtagcacctgttcaatatcagagtgctgctccaccagtatcttcttttggtccaaccacccctgtaccaggaacagtccctaaccagatgtttccccattctgctgctactaactcgacttccaggtttatgccatcgaacaatcaaagctttgctccaaggccaggtttaagtcctgtgcagccctcaagtccaacacaggtgcaggcacagccagctcctcctgcacctcccgcgactgtgcagacagctgatacgacaaaagtgtctgctgagctgagacctgttattggtacactaaccagactattcgacgagacgaccaaagccttgggaggatcacaagctactcaagcaaaaaaacgtgaaattgaggacaattcgaggaaaataggggcattattttcaaaactaaatagtggtgacatatctccaaacgtttcatcaaaactcattcagctgtgcagtgcgattgatgctagcgattttgtcaccgcgatgcacctccaggtactcttaacgacaagcgactgggacgagtgcaacttctggcttgcggcattgaagcggatgatcaagacaaggcagaatttcagaatgtaaaccttgtgtggccttctcctgcacccagttatgtacacaccttttcccgctgcttgccagaaatgatagcgtttgcggttcagaggattctccagcacagcggttgttatcatgcagcttttgctctgggcctttgattctgcctgcgagttggtgaaatcgccctgatacttccgtgctcttatatacatttcgataatagttttggtttttctgacatctactgtaaggtgacctgttgctgggttgttggttatctgaatattaattgtaagaggccacttagtctgttatagctggtggatcgcctttatcaaacaatattttttttttttgcactgagaattctgtcagttcggacattcgaagaactctagatggttaatacgagtgacagtggcttgtttttttattggtactgtcaaaaagaaatcaataaacctgtggatttttgaggtccgtattgcctgttggacgtgccgcttgtgctcttcgcagccgttgacttccggctaggatgcc

SEQ ID NO: 26786 - DNA, 1161 bp, Zea Mays
tcgatggccctattgcgtaaaacaataaacccgccttccccaccactggtcatcagtctccactccacgcccgacagagcaggaggactcagaaatggcaatcccagtgcgatcggctgccgcgccccgccgcctcgttccgtcgatacctccggcgagctctggacatgttcgaggactggcgtgcttcggtacccgaaccgggcctcgcggtgcaagagggttgtcaatggtggtcgccgactccaccagccgtcgggccaagcaagcggacggcggggacggcgtccttggggcgcctgttctcggagggctcgggatggagggattgggggatcagctcagcgtggtgatgaagttcggggggtcctcggtgtcgtcggccgcgaggatggctgaggtggccggcctcatcctgacgttccccgaggagcgccccgtcgtcgttctctctgccatggggaaaaccaccaacaaccttctccttgctggagagaaggcagtagggtgtggagttatccatgtttctgaaatcgaagagtggaatatggtcaaaagcctacatatcaagacggtggatgaacttggacttccaagatctgtaatacaagacatgctagatgaactggagcaactattgaaaggtatcgctatgatgaaagagctgacgcctaggaccagtgactaccttgtttcatttggagaatgcatgtccaccaggattttttctgcttatttgaacaaaattcgtgtcaaggcacggcagtatgacgcatttgatattggtttcattacaactgatgaatttggtaatgcggatatcttagaagcaacctatcctgctgttgcgaagagacttcatggggactggatacaggatccagcgatacctgttgttactgggttccttgggaagggctggaaatctggtgctgtaactactttaggccgaggtggtagtgacttgactgctacaaccattggtatggaaagatgttgatggtgtacttacttgtgatccaaatatctacccacatgcaaagactgttccatacttaacatttgaagaggccacagaacttgcttattttggtgctcaggacttgaaccctgtatagtgtgaccaggctgcttctcagtgaataaacaaatctttcagtt

SEQ ID NO: 26787 - DNA, 515 bp, Zea Mays
accgtctctcacacgctctcatcccttccacgctgccgccgccaaactcagactcgcaagcgggagctccgtctctgccagaaactcgccaccaccgcggcggccacggctccactcgcttcctcgcccaccacctccgcggacaccgagcggaggaagcacgaactgctgcgcgcggttcaggaaatgcggcacggattcgcagcgcgtggggcccgaccaacgcgctgccatcgaggaggccgtcgtggcggtggaggagcgtggtgcggggaagggaacgacgatagatctcgcggcgctcgatggcacctggaggctgtgttacacatcggcatcagacgtgcttgtgctgttcgaggcggctgagaggcttccactcctgcaggagagttacgtatctcatacaacccaaggggcaaacaccgcactaggacctgccacacacactaatacatgaccaataccaaggagggggaatcatgaccataaactagggagctatttagctccca

SEQ ID NO: 26788 - DNA, 885 bp, Zea Mays
cagctaagcaacagtaattcgtttaggactgaagacagtttctgaagaagattatctcctctccctgctggtttctttggatgtttgggtagagataaggtcgaagtccagagccagggatctagtggcctcagatctactaaaaaaatatccaaattttgacctattttgtgagcagtgaatgagagggggtcctcatctaatgaatctttaatggggtatgctggacagcagcagttctagtggcttcatccctttagaaatatcagtttggatccatttaagtctgcacacactagaattcttatctgttggtttactgtctacagaaagggacaaatcagatatttggctgctagaagtgaccaagttcagtttttcttgccgtgaccaactttggaataggatgaagattgggatggagtgctggcaggggtattcagatttgttcatcactgaaatatcacctgtgcaaatatccagaacagtgccatcctatcttcacctccctcccttgccctggataatcttcaccctgcagcaccggcgtgggcttccttgaagcaacagggtgagggaaagaaagcagaagccagtgcagtgatccgtgcctcgatcatcaaccgtagtgagtagcttcagtcagcagtattgctcttccttccccaaatcataccctggacgcgcccaattccatcgatcaaggcactgaatgtgtctggtgaccacacctgcagatcttccactttaccgtggccagaaaacgaagaagagagtgaagtgactgaagagaagacaccaccacctttggattctcaggcagggacttggctctacttcgacatctgcggatccgagcctgactcacctgtgaacgaaggcaag

SEQ ID NO: 26789 - DNA, 3439 bp, Zea Mays
cgctcagctagctcacacgccatcattgctgcgctgcctcccaacgttcgggcaagaacgaaggcgtctttcgcttccattgctgctgcgagggagaagaagccagaacaagaacgtgagacacacatacatcgtgtgaggtggcgtgctgacggcgagggatgcgggcgggggcatacactatccaccagtcgctcaccgccgaggcggccgccgtgctcaagctcgcgctcgcgctcgcgcgccggcgcggccatgcgcaggtcacgccactgcacgtcgcgttcgcgctgctgaccggccccgccgcgtgcgcgcagcctctcgcggccttctcctcacccgcgtctccggcggtgccgtacggtctactcaaacgtgcctgcttgcggtcgcacccggcgcccggtccggcggcgtgtcacggcgcgccccagcacccactgcagtgccgcgcgcttgagctgtgcttcaatgtagcgctcaaccgcctgcccgcttccggcccgcagtcggcgccctcctcgacgtcgccattcacgtcgccgcttatccagcccagccccacactctccaacgcgctcgtcgccgccctcaagcgcgcgcaggccaaccagcgccgcgggtgcgttgagctccagcagccgccgccaccagcaaatgcgccgccagcacagcagcaggcgctcctcgccatcaaggtggagctggagcagctggtcatctccatcctcgaagaccccagcgtgagccgcgtcatgcgggaagccggcttctccagcgccaccgtcaagagcaacctcgaggaggagagcgcgctcatgccgccgcgttcctcgtcgtccccaccgctgccgctgccgccgccgcccatccctccccacttcttcatcgaccccagcattccctccagcggcaaagctggtgaccgcttcgggctctggccggcgcacttcttgtccgcggcgccgggcccgggcgcatgcaacgacgacgtccgcgcggtcctggaggtgatggtccggaagcaggagcggcgaagcaaccccgttgtggttggcgactcggtgtccatggcggaggccgtggccgacgagctgctccggcgcctcgagcgcggcgacgtcccagaagagctcgccggcgcacacctcctcaaactgcagctctcctacgtgcacatccgcctcatgagccgcggcgacgtgaacgcccgggcctccgagctccgccgtagcgtggacgccgtccagctccagcgcggcggcgggctggtggtctacgtgggcgacctgcggtgggcgctcgacgaggaagcccacgacaaccacgcggtctcgtcgtacagccccgtggagcacatggtcgccgagctcggccgcctcctcgacgacctccgagcttcctgcggccgcgcctggctcgtggccactgccagctaccagacgtacatgaggtggcagcagcggcgccggcggccgctggagtcagcatggacgctgcaggccgtggtggtccccaccggcagcggcaccggtctgtccctcaacagcctcggttcctcatcgtcttgttcctccctccaaagtgcaggggtgcctccgccaatgctgacatcccagccgcttgggcagaatccttttccagaggtcggggcggcgacggcgtttgcaggcagagatgagcaggaggatgagatgcagctggcgctctgcaccgagtgcaccaagaactacgagagggaggcgacgctcgtgaaggcagaggctgatgcggagggcccacgtgccagcctcccgggctggctggtgctggacagaccaccggcagaccaaacaccacacgagaagtatctgaccgtgttgaagaggaaatggagccggctgtgcaggaagcttcacctctgctctgatccaggctcccctcagtgtccatggtggtctggttcttgctcgcaaccggccagcaagggtaagccaagcgagccgaggttcttgggcttggatggcttgatggggcaacacacgagcaggaggtccccgccgtcaccatcgaggagtcctcgttgggctccgagtccaccgatggggtcgggatgccagggcgtgggaactacgcttgctctcgccagccacctgctctcggactcggcgacctccgacagccgcgccccgggaagcggtgatggatccgcggcggcgcgcgagctggagcagaggctgcgcaggaacatcccgtggcaaccccgagccatcgtcgcggagattgccaatgcggtggtcgctagccgagagagcgacgacggggcgacgggcgtgtggctgtacgtgaaggggagcgaccacgtcgccacgcggcgcgctgtcacggtgatcgcggagacgcgctgcggctcggctgaccgcgtgatctgcgcggacccgagcaagttcagctccgcagagaggttgtgctcagatgttgtctccagggcgtccgcgatgggtggcaagatggtggtggtggtcgtcgacgatgtcgagaacgcgtcacgcgacgtcgccgactgcctagtcgccgcatcgaagagcggttctctgaaggatcgtcagtccggacaagcactggatctctccggctgcatcgtgatcctgctagcatcgaagtggaccggcggctccagcgaccagatcagcctgcgtctgtgggcggagaacgaggcgtcgtccgccgctctcaagaggaagacggagtcaccgctgcgcgagagcaagcgagcacggcacgacgccgggctgggcggccttgatctcaacctctgcgccgaggatgacccagcagacgaagacgacgaagcccttcccagcgacataaccgacgaaggcgactctagcgacacgagtgagcacggacaaccccacggcctcctcgaggccctcgcggcccgcgtggtcaccctcgacaatgacgacggcgacggcgacgccacagcctccatccgcgcgaggcttgccagggccatcggccaaggatggacacgtgtggaggagacggcggtgcaaatgcttgcagcggcgtccggacagttcctcgaggacgagtttgagagttggacgtcggaggtgcttgaaccggcagtggcgctggcaacggtcaaaaatggcgggaaagggaaggtgatagtacttggattggggccctgtggcgagagccgggagacaccagggtttatgggctctgtccttccaagtagggtccaggtggactgagctgtgtactgttttttagttctcatttttttagaggggaagtggtttgtatgtatggtatgtaaagcgtgggattggggcctggaaatgaaagggatcaaatgtactattattatatataagtagttttgcaggattaattatcactacggactaatttggaaacttaaatcctctggagattagagagc

SEQ ID NO: 26790 - DNA, 768 bp, Zea Mays
atggtgtttaaagagaagcaaaaggagttctacaagaatgctaaattaattagcaagtacaaaaagacaaagaagcaacaaagtcagtcaaacaaccatccagaaattccagtccatgaggatggtggtgacactgtccgatatgtggcaaaaccgcatcacaaagggaagaagcaccctgtgcatagtttgaaggaagagtatgagaaaaaacgtgctgaggaggagaaggctaaggaagagcgtgatgcaatggttcaggcaaagagggagcatcgggagaagtctgaggcgaagcggaaagaactgagggagaagatgttcaagaagacaagatctggccaacctgtgatgagataccggatcgagcatctcttggagactgcactgagcaagaaagtacaattccagctaccatcttcataatgttagttgtgtggacggaggacaggtcggaggctccctgtccgtgacccgacgaaggttccaatggtggcttgccgcgcatcgatggaggaggcactagcaacatggccacgcccagcagatggtggcttccgtggccaaatcggatcgaataacttggtattagggggagggagggagaggatcgatttgtacactgaattcgatgggatgggattgtactctcaaataacatccatttccatcgatccaactttacccctatcaataaaccttcaattagcacagtgccctctaggctacatgttcaatatgaccccaacttttaatagccaatccaaa

SEQ ID NO: 26791 - DNA, 785 bp, Zea Mays
ttttcctgcaattatattattttcaaatgaacctgtgttgcaaaagcaggttctgaggaacccgctaagcacttgcacgttaaatcttttttactgacaggattcagctgaaagcaagttcttttgctttgtccaaattctacgctaaattttcaacgcatccaatcaaatttgatctaattctgaagtcttcaaaaccctaggcgttggagaccgttttgcagtttgccactttaactgtagctacctcaagttgccttgatagagcatgctgaaatttgtgctacaatacacactccatagggactatgtaaggaagaaaggaagaaataatgtgagggtagatgacctcattcatgttattgttccgaaaggaagagcatcagtgcctgcttcggtgaaggcagaactcctgcaacgtatccggtccttcatggctaccacacttcggtagtcatttatcgtgacggttggagctacatgtaccattgtacgaacactgggaggtcgatcttgttggggaccaagggtgcaggtactgagcatgaaaaggatcagtgtgatcttcatgatgctatcgacatgttcctcgtcagacaggcggttggcgtgatttcaggtgtagcaacacggagttataaccctgaatactgtaccgttaaaggaaccttgtagtttgtaatgctacattgccttatcattgtatcaacagatgctttatttcacaattagaaaacagaaacacaatcttgatataaatgactacactaatgtgcatcatgtga

SEQ ID NO: 26792 - DNA, 3647 bp, Zea Mays
gttgggcctaggcccaacgcatggagggttgtggcgcatggaacacggtggaaactgccaacgcgctaggatccgtagcggacggcgatctgtcttcgactgctctctgccatcgctgtggcgaccccgacggagccaagcgacggttcatcttcttgcggcggcggcgacctcgagctgattgcagcgagaaggcggggacaaatcgatctcccctagctggctacacccgatggagccgagggttccttgcgttgacggcggcggcgacggcctcgagctgagggccgcgagaaggcatcgacgggagggcgggcgaatccacgtcctcgatgcgcaaatcctggagcctcagcgacagagatcgaatccattcaggaacatctttcatctattaactcaacgagaggtcttacctcgaacgaaacaccatgctaaaaggatatggaataactctccaaaatatgatcctcatttaattgagttaaggttttcagatgcagatgctaaacttggtattttatcttgggcagaatcactgtccctgcatcgctggtctgccaagtattgccctcttttgccacctcctaggtcaactattgcagctgctttcagtccagatggaaaatcacttgcgtccacacatggtgaccatactgtgaaaataatggactgccatacagggaaatgtgtgaaggttttgagtggacatcgacgcactccttgggtggtcaggtaccatcctttacattctgacattctggctagtggaagtttggatcatgaggttcgtctgtgggatgctaatacttcagactgtattggatcacaagacttccatcggccaattgcgtccattgcatttcatggaagaggagagattctggcagttgcatcaggtcacaaattgtacatatggaactacaataagagagatgatgcttctgtcccaaccatcatactaaggacccgccgttcgttgagagctgtgcattttcacccgcatggcgctccatatcttctaacagcagaggttaataatatagagtctgcagactcaccgctgactctggcaagatcatctggatattcaaactacccttcggccctgctggtgtcaaacactaattctagattctgtccacttcctgagtccaatgtgacgtcaccgtgcttactgtggcctgcgtacctcagagatgatgggattttacatgtgcttggcaatgccagtagttcaaccattgtgcagcagagatcatcattagttcaaccttccacatcagatactgcaaatctacagcttgaacagtttgctacccctatggatgtatgtcctggagagccaacttcatttaataacatatcagatgcagtaactgtgcctacttcaaatgcaattgaaatgcatggtgctggcggccagtctaacccaagactgcagggcagcagctctattagtaatcttgagaggttcagtgctagagatgctttgcaagtgtcttccctgagcagcattgagccaatcccatcaacagctgggtcttcgggatccaattcacgccgtgctatgccactgaatatgctcctcactggtggattagatgttcaaatgttccaaagaaatgtaggaagtggacaacaggatcattttctcttcggcgactcaagtaactgggaagtgccatttgtgcagggttttttgatgacccaaaaccatacaggtttgcaccctgcacttgtgaacaataatgtccttgaagacctatctggtgctggtactgcagggattaacaactcaactagggaatcatcacacatgcataactttggacgtccaggtgcttcatcatcgattccccttacttctggcagttctaggagaccaaatcgacactatgcctcacgctctgtgcctggggttgggagtttgctcctagtaggtcctcaaattgacgaagctgaagctcatgctgcttcactaggtgctggttcagaaatcactgcgtcgatgcttgctcctggtactgaattgccttgtacagtgaagctcagaatatggcggcatgatatcaatgaaccatgtgttcctttagcacctgaggcatgccgtctgacgatttctcatgccgttctttgcagtgaaatgggtgcccatttttccccatgtggacgatttcttgtagcctgcgttgcatgtttgttgcctcaaacagaaggtggccgtggtagccaattgcctgtgccttatgaagaggctggatcatcaccaactcgtcatccacttccctctcaccgagttatttatgagcttcgggtttattcgcttgaggaggagacatttggggatattcttgcttctagagcaataagggcagcacattgcttaacttccattcagttctcacctacatccgaacacatacttttggcatatggtcgtcgtcatagctcgctgcttaggagcatagtcgtggagggagaaaatgggattcctgtatatactattttggaggtatatagagtttcagatatggagcttgtgagagtgcttcctagtgccgaagatgaagtcaatgttgcatgctttcatcctttaccaggaggtggccttgtttatgggactaaggaagggaagctcaggatccttcaacacaatggcgcaaacatgataaacatggggtcgggttgcttcattgaggaaaatatggttgagatccagaggtatgcattggaatgctgaataagcttgaccacatcatgtgaattttaggcttacttccatgaaagacttctctgcaggcttcatctgtgtgatccgtccaagggaaaacattagatccatctccaactacattagaacagataattctcaatgggctctttcaagtgccttggggactggaaacattggtatccagtttactgattggaatcgtgtccttacaagcatcattagctcttacaacttgctgaagcaagctgccctacaaattttttccgctggatcaggagccttgaatatttgtccagttttgcaggtctttgcaggggcggcaggagatgtaaatctacatggccaccgtcgtggctgccatcacgatgcttctttttgttgtatacttcacctatcctaacaagcggtcgatgatgcaagaaattacaaaggcgaatgggattctctgggtttgattttacacgtgataatcatgtatttttttcctgttctcgtctgggttgattaatcattaaacgtttggagtttctatatctgtatgaaatagcatctgttgcaacataagaatatggttgacactagacgtctacaagggctggtctagaatgccgtgctattgtcattattttttaagtttaccaagagctatctgaacgcgttccatttggattgaggtgtattgaagtggatggatgaggattttgattagtagtggatttattccctcttaatccttgtagatttaggagaaaacgaacatggcctaaattatttttttcatttcttccctggtggaatattattagacgccagttacatttaatgctcggtcgacaaagttgtcatgaaaatcatggaatcatttggtttctttgggatttttatttttaaccctcaaaaaaataaaaaa

SEQ ID NO: 26793 - DNA, 603 bp, Zea Mays
tggttatgtaggtgtaaataaatatttagagctaataaatatgatttaaaccctaaaaatgcatacttttaggatatttttatcatttaaacatcatatattgttatgggctcgttaggcccgtgggctggctcgacacgattattaaccttacgggccgtgcttgggcctcgcttggggcccgtgggtcggcacggcatgccccgctagctaatccgggtcgggcctaaccgtgcttgggacgggccggcacgacccgcccatttggacatctataccgagaagtacgggtaggatacgggtacccgcttcagttcatgcgtgcgcaggggtgtaaatctgaacaaatattatctgacattcgaaccgtccgaaatggtcgaatggaaattcggatacatttttccagatatccggacttattttcaaataacaaatacaaatatggatatttatatcgaatatcgaattcgaatataatatagcaaacatccgacggataccaaatatctgatacattttttgaatacatccgaacaggatccgataaatatccgatcaaattttatttatattttttttaaaatacgacatcgaggtcgc

SEQ ID NO: 26794 - DNA, 1203 bp, Zea Mays
atcatctaaaaaggctaatataataaaaaaaaactgcgcgcactgctgtcaccgcggcggagggaaaaatcgggcgtaccccggtgcccgttcaccgccgttcacgccgcgtgtgcgctctggctctgccgctctctctctctcctgcgcgtggcgcaactgccgtcctataccaggcgcccaggtctagcctcgtcggtgccttcgccaggtctttctcgggcccttcgccaacgacgagcgcccgctaggttagaaggtatgcattcgtgttcataatattgtatttgactaaaaagactgggcctacgcatgggggctccaaaacagaggtggacttctgaggaagaggctgctcttagagctggagtagccagacatggagttggaaattggcgcatgatattgaatgatccagaacttagctccacattgcgctaccgctcgaatgttgacctaaaggacaaatggcgcaacatgaatgtaattgtcacttcatcgagtactcgtgacagggggagaacttccacgaggagaacccgagctgctcctaagaataatgaccaattgttggcaatgagcacaatcacttctgaggttgatgatgagattgttgatgtaaagcccatagtatcaatgtctgttgaaggatggaatacttcaaattcaaagaaatctcactcaaggctagacaatattataatggaggctataaagaacttgaatgagcctacagggtcccacagaactactattgctaattacatagaggagcaatattggccacctagtgattttgatcacttattgtctgcaaaactgaagtatttagctaccagtgggaaattgttgaaggtgaatcggaagtacaggatagcacctagtttgctggaagacgtgcaaagagaacccttgaaattagggagtgatgctagtagaacccttacaagatcccaagtcgatgctgaattggtccgtatggcaactatgactgttgaggcggcggcggcagctgctgctcatgcagttgcagaggcagaggctatcatggcagaagctgaagcagctgctagggaagcagaagctgcggaagcagaggcccgagctgcacaggcctttgctgaagcagcagttttgacactgaagaacagaaatgctgcgaaattggtggtggtgcggtccttttgctttgggctatttttt

SEQ ID NO: 26795 - DNA, 1478 bp, Zea Mays
gggattgacttcgtctgggcccacgagccagtcaccccatgaacctagggccctgtccgaacgcgcctcccacggcggcgcgtgcgactccccaacatgggaaataaatagatgtcccaattacccatcgagccgtcgtcgtggagcggcaggatttgaaaaatctcgcgagagggccttgtccttgtccacttcctccgcttcgccgtccctcaaagcagcggaaggggagaggccagggtgcagcagcaggaccccaacggcaacctccgccacgcaccacggagcaaccaagcagcaggcaaggcaaggtaagtgacgagacaaagatggtgcaggaggagctgccgcaggcatggtggttcgacagccacaacctcgcgaggccgtcgccatggctgaacagcacgctctcagagctggatgacaagaccaagcaaatgctgaagctgatcgaccaagacgcggactcgttcgcccagcgcgccgaaatgtactacaagaagcggccggtgctggtggacatgctcggcgacctgtaccgcacgcaccgctcgctggcggagcagtacgacctgctgaagcacggcagcggcacacggcacacggtgttcggcctgtcttcctgcacacagagccggtcgtcgacgaacggcaggaccactcctcgctcctcctgctcggcctctacgtacgactcggagtccgaagtggacgaccccgggcaggaagaatacgaggcagagcagctggcgcgtgcggggatggccaagacggagtcgccgccgccgccgccggagcagcagcagcaagaacagcgtgagcaggcggagcagcagatgcgcgcggagatcgagaggctcaaggcgcagaacgcggcgctgcagaaggcggccgaggagagcgcggcggcgctcagggcggagctggccgggaaggacgaggagaagcgggaggtgatcaggcagctggcgtcgtccatggacgtgatgaggcaggagaacctcacgctgcgcgagcacatcagcaggggatcgtcgaagcgttcctctgcgccccgcgcgggagctgcgttcgatctcaggaaggtggccaggggcctcttctccgcgaggctgttcaccgcgcactgcaggcctacgggccccatcgtcgcgctctgagcaggatgccaggatcgtgaagagagacagcgtagatatgcatttgttgtaggcgagtgatgtgcatattataggatggcatcgatcgatattccctccgctgtctgtttctcaggttcaactaaactagagggagcactcgttttttactatgatggcgtagtagtagtagttaactgtagttaaatatttactagtcatatggatgcatgtttgtatgatggcgttaattattgttaagtattattttgtcagttcctcatctgctatgactatgatttttggacctgggtagaagataagtcgtggacttct

SEQ ID NO: 26796 - DNA, 952 bp, Zea Mays
gttttacaacttatgaaatgtattgcagcattataggcgggagatacttcatagttatggctttgagcacatgcacttattatacaatctggagaaggctggccttcttaagaggcaggaatcaagaagcaattgggttggtattacaagagcactgcagcttatagttgacgtaaatgatacagcaaaccctactgatatatcctacatcttttctggatacgcacctcttagtattcgccttgttcagcatgcagtgagatctggatggcggtctattgaagaactgttgaaactattgccaggcccacatctggatttgaaaagaggtggtttgacaattaattcatcaccggaggtacatccaggtttaggggctcaacagagtattgacagggttggtcatcgctctctggttttggttgtattcattggtggtgtcacatttgctgagattgctgcccttcgcttccttagtgcacaggaaggaatgggctacgactttcttgttgcaacaacaaaggttgtcaatggaaacacaatactcagacccattatagcaaatagcaaagaggggatgatgtaattttattccttttctgtgcatgtgttttttgtaattgcaattgcagacaaacccaagcttgtgggttttcttgtttggctgtgagttcgtgtttggtcagcaactggacgataaggctaaccacgcttgttgatagatggaatccaacagtcccattttttgttctgttctgttctgtagtacatccgctaaactgtaaatcctgggtttcatgtgttcgtctgtctttttattcaataattgcttccttgaaggccgtttatgttgtttgtggaccaatattgtgaaaaaagaaagaatgtatggaacctgttgcaaatctgcatattcttattcctcttttttactgaaggaaaatattgtcca

SEQ ID NO: 26797 - DNA, 787 bp, Zea Mays
ctaacatggtatcaaaggccgaggtcttgagttcgaatcccggtacatgttcagtctgaccctgctggtcgtttgatagttactggagagcccgagcaattggataacccatggggtgtcactccattcaagaaggtcattaggttgccttcccgcattgatcctcaccaaacctctgcagttgtcaccctccatgggcagctatttgtgcgtgcaccatttgaacaatcaaaataatgttgatgccacaatgaagcacaatactacaagtttgccttatgagtgggattataccgttatgacatgagcttagaagtgctcaccctgaccgtcctccaaaactagttccttgctgattttaatgcttcaagcctcctccatgctagatctctcatgtatcaagttaaactcattagttgacatagttctgtgtgtattcggttgtgcccgttggctgtgaattgtagctaaagcaaagttactaagcctagagtttaggatgttgatagtctgatgctcaacatgtccatggtttcttttcaatttagtcggcatagaatgtactgtttgtagcaatgtagtatgtagcttgttcccagtatttaagctccggaacatggagagcggtagagattcattgtatgtaactgttgctggtgcattgcaattgctattcaacttgtattgtcaaacaatctgaaactctatggcctccttgtaccctgccttcgtattgtgtgactttgtgtttccgtactagctgaaagaggaagataaatgactgcca

SEQ ID NO: 26798 - DNA, 1181 bp, Zea Mays
cagaactgatggattccaacagatgtgacatacctactagttcagccctgcctgctattttagtctggatctgccactggtcaaggttcaagtatggcttctgtagggttggctcgggtgagtggtgtggctcgccctctcatgaggcttgtcaccatgagccgcatgccgatcctgcagcagctgcacctggaggagcagctcctgcgacgcacatcagacaactggtgtattatcaacgatggcacggcccctgctaccatcgttatgggcgtgtctgggagagtctcggagcttgtcaatatacagctggtcctccgggacaaggtgccgattgtgaggaggttcagtggaggtggcaccgtcattgttgatcagggaacggtgtttgtgactttcatttgcaacaagaatgttgttgctgggctgcagccctttccacgggacatcatgtcatggagtggtcagttatatggcaaagtttttgacagatttggtgaatttcatctacgtgagaatgactatgcatttagtcatcgaaagtttggtggaaatgctcagtcaataacaaaaaatcgttgggttcatcacacatcgtttttgtgggattatgatgtaaaaaatatggattatctcaaaatcccaaagcgtgcacctgaatatcgactggcaagaaaccacacagatttcttgtgccgcatgaaggagtacataccttcgcgatcagttttcaccgatggggtcattgctgccctgggagaacacttctcagttcagcccatggatctacaagcaattctttccggtgatgaagaatttgtgccttctacaaagctgctgtcacaacaatacctagaagaaattgtttcctccaaagaatcccttgaaattatagaaagctgaagcatgacctgatgaccatggttgtcgtttttgttgtgaaatgtgagcaattttattgtgaaatccgagcaattatcggcgagctgtgaattcattcaactttgagtccgacattatttcactgaaccacttacattgttttttaagacccagtacatttttgtggttactggttacatgccataaagggcatcagcagtcgatgtttaattattttttgaggggcaattaaaagtcattgtttagattggggggggggggtagataatggatctttt

SEQ ID NO: 26799 - DNA, 1624 bp, Zea Mays
cgttggagaggctttgctcccagtcgtcccccccggccccgacccccctccgtttgccaacgactccgggctccactgtcgctcgctctcgctcccttccctcccacgcaatggtggccgatcgcctccgcctcgcgctgctgctctccgcgtgcctctgctccgcgtgggcgcgcccacgcctcgagccgaccatccgcctgccgtccgagcgcgcggcggccgacgacgccgtcgggacccggtgggccgtgctcatcgccggctccaacggctactacaactaccgccaccaggcggacatctgccatgcataccagatcatgaagaagggcggacttaaggacgagaacatcgttgtcttcatgtacgatgacatcgcgcatagcccggaaaatccgaggcctggtgtcatcataaatcatccccagggtggcgacgtctatgctggggtgccaaaggattacactgggcgagaggtcaacgtcgacaatttcttcgctgttctgcttggcaacaaaactgctctcaggggtgggagcggcaaggttgtggacagtggccccaatgaccatatatttgttttctacagtgaccatgggggtcctggcgtccttggaatgcctacgtatccatatctctatggtgatgacctcgtagatgtcctgaagaagaagcatgctgccgggacctacaaaagcctggtcttttatcttgaagcatgcgaatctgggagcatctttgagggcctcctgccgaatgacataaatgtgtatgcgaccaccgcgtcaaatgcagaggagagtagctgggggacgtactgccctggcgagttcccgagccctccaccggagtatgacacttgcttgggagacctgtatagtgttgcttggatggaagacagtgatttccacaatctgcgaactgaatctctcaagcagcaatacaacttggtcaaggataggacagcggttcaggatacattcagctatggctcccatgtgatgcaatatggttcattggagttgaatgttaagcatctgttttcgtacattggcacaaaccctgctaacgatgacaacacgtttatagaagacaactcgttgccatcgttctcaaaggctgttaatcagcgcgacgctgaccttgtctacttctggcagaagtaccggaaattggcagacagctcacctgagaaaaatgaagctcggaaggagttgcttgaagtgatggcccacaggtctcatgttgacagcagtgttgagctcattggaagccttctctttggctctgaggacggtccaagggttctgaaagccgtccgtgcagctggtgagcctctggtcgatgattggagctgtctcaagtccacggttcgtacttttgaggcgcaatgtgggtcgttggcgcagtatgggatgaagcacatgcggtccttcgcaaacatctgcaacgctggcatccttcctgaagcagtgtcgaaggtcgctgctcaggcttgcaccagcattccttccaacccctggagttctatccacaagggttttagcgcctaagaatcataagagttagcaagggacacgtaagtggtgatccttacagggtttaagtgaccttgagatta

SEQ ID NO: 26800 - DNA, 971 bp, Zea Mays
cgaaaattgtctaggacatgagcagcgttgccaacggttcgcgtagagccagtccgcggatccacacgaaactgcacacgacgcaggcactcggcctgccgtgtgtccctttcggccttcataggcgcacttctccctcccgctctcgcgccgccgccctcgtgcgtttgagcgagatccatacatccccatcccattttgcacccggattggcttcttcttctactactggagctctctttgtgatcccaaagtcacaaaataaaggtaaatcaaagagaaacgacttaggagctggaacgacatctaggagctttacgacagaagagatctctaaacattccacaaggaaggactgttggatcattatcaaggacaaggtctatgatgtcactccttatgtagaggaacatccaggcggagatgccattctaaataatgctgggggtgattccacggagggcttttttgggccacagcatggcactagggtcttcgatatcatcgaggatttctgcatcggtcagttgaaggcttcatgatgatgacaggatagtttgtattgaatttattacgggacataaatttgtgagaagctacattttatctatgtttgagcattgcgaccatcgagcatatgaatgccagtataattgttccacaactgttattaggcctgccctgagctgtgatgtaggagatcgttttttttcccctctgatggggcaatgtgagctgttcgaccactggttgttgtgcttgcacatttctgttgttggacaagactgaaacgtttttttcccaattgttttgtttaaatcaggactcgtttctcatgatcacttctgaagggatgttatggttaagatgttgcaagtttgattttaacttggtcgttgaatgcgttttacgatttgttgctctctaaggttaggtggtgtgcaaacatgaaagtgaaacaatttcaagag

SEQ ID NO: 26801 - DNA, 1888 bp, Zea Mays
cttcgtcttctgtcactgtcccacactcctatcattctcgccttcgacttcccaggagcgcccagcgccgcggagcttctagaacacgcgactggggcgagctagacgaagctaaggaggcgcgaggggtgacgatgcggggcaggtgacggtgcggcgtggtggaggcgggacagaggccgggggatggtggcggcggagggtgggcccgtcgaggagggcgtcggggagagctcgtccccgccgcgcgtagacgcagccccagcgccctctggctccgttgggagcgggggcagaggaggcgccagcgacatctgcgccgaggtgctcgagcgcctcgtcgccgacggccacgcggaggcgtccgaccccgagttccgcgacaggctcgccgcacatttcgggcggctcccgcacagctatcagctggatatcaatgttgacaaagcaaccgatgtcttggtccaccagaatgtcttagcggaagcaaaggaccctgataggcgccctgcattctatgttcgtttcttgaggattgaagatattgatcctgcaaacgactccgatgcatctgaagaaggggatggtgatggtgatgatctctctgtaaggcaggacacaccatatactcacattcatgaggtagtattctccacaatcgacaagccaaagctccttagtcagctatctgcattgctatctgacattggattgaacatcagagaagcacatgttttctctactcatgatggctattctcttgatgttttcgttgttgatggctggcccattaaggatactgatggtttgcacaaagcactggaagcatccattttaagaaatgagggttcatggtctggttcatctcattcgtcagcagctgaaagaacactgcccttccaagttaaaggtggtgaatgggaaatcgataaacgacttctgaagatgggagggttgattgtttctggttcttgtggggacttgtatcacgggacttacctcggtgaggatgtagctgttaaagttctaagagctgagcatttgaataagaatgtttggaacgaatttactcaagaagtatatatactaagagaagttcaacatacaaatgttgtgcgattcattggtgcttgcacaaaaccaccacaattttgcataattacagttgatgtatgccgagggatgtgctacttgcatgaaaggggtatcatccatagagacttaaagactgccaaccttctaatggacaacgatcatgctgtgaaagtggctgattttggcgtagctcggttccaggatcaaggaggtatcatgacagctgaaactggaacatacagatggatggcgcctgaggttataaaccaccaaccctatgatagcaaagcagatgtgttcagctttgccattgttctctgggagctgataacgtccaagatcccatatgataccatgacccctctccaagcggctgtaggtgtgagacaggggttgcgcccaggacttccgaagaagacgcacccaaagctgttggacttgatgcagagatgttgggaagcagatccatccgaccggcctgctttctcggacattttagccgaactggaggatcttttggcacaagctcagggaacatcgggaaagacggtccaagatccatcaaactcgaacgcgaaagattaacccccatacctgacattttttctcaatccagtgatttgccacatctaggattcgagttgccaattatgaggaaatttgttttgcttgtgtacattcgaacaatcttcttggggccaattttttatgggcacctcattattcttatacaaaagaaattgggctcgacgcttgggataccacacagattcaggggaaaaaaacaaagacg

SEQ ID NO: 26802 - DNA, 2712 bp, Zea Mays
atgctgctgcatctttttttgaaactcttcaaccaaaaccaagcagggcccacagccccaaaccaagcaattttctcatgcctctgctacctaggccacactgcggccggtcccaccgagcagcctcactggacaagtcaatcccgaccccacacgaagtacacacccccgctacacgtccaccgcgtccccatcggcccatcccacctccgtctctcttcttttcctccggagctcgcagtcgcagcacctccgccggctcctcgtttccgtccgttcgatctcaccccccccccacgccccccccctcgtgccccaaatcgcaacccgacccgagacgagttcctccagatcagcgggcagggtgccgtagcaaggatctcgccgggccccggccatgaccgaggtcgccgacgcgtcccctccccctccgaccgccggcggcggagaccgcaagcggggccgcgcctcgcccgtgcccccgctgccgggccagcacaagaggcgtagggaggagggcggcggcggcggcttcgaccggcgccggctcggcccggttggcggcggagggcacgagcaggacgacaggaggtatggaaatggtcttggtggcataggaggaagaggtggtgacagtcgatatacaaatcgtgcaccagattctggacgcggtggatggaatgagggttctgggaacagtcgtagggaaggactgatgtcatacaagcagttcatccaggaacttgaagatgatgtttcaccagttgaagcgcaaagcagatatgaggagtacaagtcagagtacatcacaactcagaagaaagcttactttgccctccataaggatgaagattggttaagaaataaataccatcctacaaaccttgaaaatgtcattgaaagaaggaatgaactggcaagaactactgcagatgatttcttcctacaattgcaaagtggaagtctggacaccggtccaggtttgactggttcggcagtgagcaaatcaggaaataacagcagtaaaaatctagatgctgtggaaggggatggtaaaaaggggaaacttggaaaaggttccgacgattcatattatgctgctcccaaggctcacccagttagttctgaagttcgtcgaattcgaattgatattgagcaagctcaaggtctcatttgtaaacttgattctgagaagggtattgaaaacaacatcctctcaagtagtaatcatgaaaagccagacatggataagtcacatggttcaatggggccaattgttatagtacaaggatcatctactgtgaagggtcttgagggtactgagttgctggacactcttgttacttatttatggcgtatccatggtgtggattattatggtatgtctgagacaaacgaacctaaaggcctaaggcatgtgaaagcagatgcgaggacatataatggggctagctcaagtgccaccgaatgggagaataagcttgattcattctggcaagatagaattcaaggtcaggatccattagaaatattgaaagcgaaggagaagatcgatggagctgctactgaagtattggatccatatgtgaggaaaataagggatgagaagtatgggtggaaatatggatgtggagccaagggctgcacgaaacttttccatgccgctgagtttgtccagaagcatattaaactgaagcacacagacttggtggttgatctaacttcaaaagcaagagaagatatttactttgaaaactatatgaatgacccaaaggcgcctggtggtacgcctatcatgcagcaacctgctccaaggggaaaaggcagacaaaggccaccaatagagagtcggctgagggatgagcgtggtaatcataggctcgacagtgatgggtccggtgaaaatcccgacgatcctgtttatgattcgtttggtgatccaactatgcatggcgccttccctccagatattcctgctccccctgttctaatgcctgtgcctggtgccggtccgcttggaccgtttattcccgcaccgccggaagttgccatgcatatgttgagggatcagggcgcgccacctccttttgagcccagtggaggtccacatcctaggaaagcagggaggggcagcggcggcggcggtcctccaatgcgtggtccgtccccagtcttcagtgctcctccgcctcatcatatgcatgaccctcgtcgaatacgaagctaccaagacctggatgctcccgaggacgaagtgaccgtcatggactaccgaagcttgtaggcttgcctccagatactcgtttaggtaaacattacagtgcgaaatcaaaacatcttgctctgtctaaaatcaccgcggaggaaccccagcaggcatctcagcacctgtgtctcgactcctgagctgtcatcttctcactgtttgtgaaacgaaacacactacaggacgctcgacaaaataggccaccgtgaaacacggtgttagctcagtctgtgcaacgcgaaagattttcgtccatgtttgagcactgtaaaacactgttcccaacataacgtccagctggacagagtagagtttaaatatggttagtgagatggatagtttgatggagataagatttattaggggattatctcttacattgctgctgtatcctttgcgccgacccacccggcatccacgaccagcccacccgccccgcgtgcggt

SEQ ID NO: 26803 - DNA, 3513 bp, Zea Mays
atgaggaagcccaggctgagtgtcggcggcggcggcggcctcctccatggctttccctcccccgtgctgctgttcttgctgctgctgctgctgagttcttggagggtggctgcccaggcgcagcaggcgcctcagactgatccggtggaagcggcggcggtgaacgcgatcctgagcaagctgaggctgagcgcgccgccgtcgtggaacatcagcgggaacccctgcagcggcgccgcgacggacgacacgtccatcgacgacaaccctgcgttcaacccggccatcaagtgcgactgttccgaccaaaacaacacgctctgccatgtcactagactgaagataaacacactggacgcagttggccccatacctgaggagctgcggaacctcactcacctcgttaaactggacttcagaaaaaattacttctacgggccattaccagcattcattggagaactaactgctctggaatcaatgaccgtgggcatcaatgcactatctggacctgtcccaaaggagcttggaaatcttaccaatctcttatcactggcattgggctcaaataattttaacggcacacttcctgatgagctggggaaactgacaaaacttcgacaaatgtgggcatcagacaataatttcagtgggcagattcctgattatcttgggagtttgactaacttgacccaactgaggctccaagggaactcttttcaaggtcccattcccacaagtctttctaatcttgtcaacttaaaaaaattggacctgagtttcaacaatatcacaggacaaatacctcaatcaattttgaatcttacatctcttagttatttagatttttcatacaaccatatctcaggaaactttccttcttgggctactgacaaaaatttacaattgaatttggtagcaaacgactttgtgatggatagctccaataacagtgttttgccatggggattggagtgtcttcagcatagtactccctgtttcctcggttctccaaagtctgcgtcctttgcggtggactgtggtggtagtagagcaatatcaggttcagataattctgtctatcaagctgataatgccaaccttagtgctgcatcgtactatgttgcgggtgcacctacatgggccgttagcagcgttgggttattcttggacgcagatgcacccaatgcaagttacatcatctacagttcacgccagttcgagaacaccctagactctgcactgttccaaacagcaaggatgtcgccatcatccctgagatactatggcattggacttgagaatggaaattacacggtcacacttcaatttgcagaggttgactttccagacatgcagtcttggagaagctgagggaggagggttttcgatatctatgtccagggagagcgcaaggagcagaactttgacattagaaaggcagctggagggaaatctttcactgctgttaagaagcagtatgttgttccagtaaccaaaaacttccttgagattcatctcttctgggctggcaagggcacttgttgcattccttataagggatactatggtcctgcaatatcagccctgagtgcaactccaaatttcgttcctacagtccgtagttctgaagacagcaagagcagccataaaactggtgtgatcgctggggttgcagttggtgtttcagtttttgcattgatcgcactggccggaatcttcttgtggtgtcagaaaaggagaaagctattgttagagctagaagaattgtataccatagttggaaggccaaatgtcttcagttacagtgagcttaggtcagctacagagaacttttgttctagtaacctacttggtgaaggaggatatggatcagtttacaagggtaagttgagtgatggaaaagtggtggcagtgaagcagctctctcagtcctctaaccagggaaagatgcagtttgcggcagaaatcgaaaccatttcccgagtgcagcaccgtaacctcgtgaggttgtatggctgctgccttgagagcaaaacaccattgttggtctacgagtacctggagaatggaagcctcgatcatgctttgtttggaaaggggagcttgaatctagactggccaacacgattcgagatatgtttgggcgtagcaagaggtatagcttatctccacgaggagtcaaccatccgcattgtgcacagggacataaaggccagtaacgtgttgatcgacgccgatcttaacccgaagatctccgatttcggccttgccaagctctacgacgacaagaagactcacgtcatcacaaatgttgctggcacgtttggttatctcgcgcctgagtacgctatgagagggcatatgactgagaaggttgatgtgttcgcgtttggcgtggtcgcgctggagattgtcgctggtgaatcaaactatcagaatgctctggacgaaggcacgacctatatctttgaaagggtgtgggaactgtacgagaacgggcggccgctggagttcgtggacccgaagctgacggagtacgacgcgtacgaggtgctgcgggtgatccgcgtggcgctccactgcacccagggctcgccccacaagcggccgtccatgtcgagggtggtcgccatgctcaacggggacgccgacgcggccgaggacgttgcgaagccgagctacatcacggagtggcaggtgatggcggccgacgtcagcggcagcttcgcgagcagccacgtcgggtcgtcgtcgacgcagacgcagccaacgtcttcgtccggcggccacggcggcgcccaggcgagccctgagcccggggacctgacgcccgcggtcccgtcgccgctctacacctccatcatcgaggagggcaggtgacagctagcttgcctcggaatcgcgaatgcctggcagtggcatgcatgcttgcctcggaatcgcgaatgcgttgctgtgctctccagttttgtggctaatacaatactgatgtcgggtcgccatggttgatgttgttgtgaggaatttacttgaatgtgaggccgcaagcagcagatttgatttgggaggcacactgaaatggcagccgacgcagattttgggatggcgtgcgcgtccctgtcaagaatgggatggcgtgtgcgccggcgccaggcctgcctcgccttgcttgccggcggcagcgtgacacgtctggagggtggagaccccgacgaacgttccaagggatgtttctcctgaattcggcatgcatcacctggctggtagatggtcacgtctccccctcctatgatttaagtgtgtgaaacgtggtatatatatgcattagttgtgcaatgtgttgcagacatccacatacaagtcttcccacatattttgattttgttattatatactccctccgttataaatatagtagaaagtaaaacaaatttaaatttgagacagaaagtatgttttatttttcgttgaacgcttaaaataattaagcaccactttaattaagtcgga

SEQ ID NO: 26804 - DNA, 1331 bp, Zea Mays
ccatcacaaacagagggaggctaatgaagaagtacacaagcaagtgaatctggactcctaccgagcaagctattgagtgagagggacgcactcaagctggccgcgctggacgttgtggagcctggcattcaccacctgcttcaccttgccgttgacgctgtccctcgggatccagatgccacctttcgccagccattcgttaaagctgtgcggtgctatctgtgttctgcgatagccgagggaggtctcgtgagctttggcggcagcaaccagggatgtctgggccatggagcgtggacgtggcctgggaacctcgggttcaataatttcagattttaatagatatatatatagttcggtgctggctgaagaaacagaaggatgtcatggcccctgctgttattgcaaagggggaggacgtcatgtggacttctggtctaatctttggaaaaggagaggggattgtggggcttgaaacaaatttagggacacttcatattcaattgctgcctggttgcgcgccccgttcagtggaccacttcatcgagctcctgggcttgcgcaactgtgctggatgcagattttatcgtgcagaaggacgtgggaacgtctgggatgcaaaaggcgaccatgaaaaaaatgttgcatttggccccccatatgcattgcttcaaggaacactggaagttgatggtgtgcccttcaagaagataccaagagaagcatgtccggcggtgaaaagagggtccgttgcctgggtagggtcagggccagagttcctgatcagcttagcggaccacgaggagtggagggacgcctacaccgtgttcgggaatgtgcttcccatggacatggcgatcgctgaggagatgacactgctgccgacaagcacagacgtgtggagcaacgtgaaagtgaaggtgctgaaagatcctgtctacttcaaggtcaagagaagcagcaatgctagcgctgtctaggtgatgggcatatttcttcttgcttgtttggatggaaggctgtggcaacaccggcaaatggttgtttgaccatgaaaacctgtgttataactcacaggagacgatggtctcgcttcattgtgcaaagaaaggggagagttctaatacaacagtaatatactagcacagtagtaatatactagtacaatactcctagtacaaaggccggagattctctcttttttcctcgtgtagaacacgtgactcaacgagttcttcgtgtcttttagtttgcctcctgcgttttggcccgttaggcatctccagcatatcctatatcatatttctattttatcatctattttaaacttc

SEQ ID NO: 26805 - DNA, 6097 bp, Zea Mays
tgcaagggcgggattcgaaatttgaagttcccttcccctcctcccgctagagtctggttgtgtgatccaggaaggggaagcgccgcccgctacgcttgatcaatagatccattcacccggggagattcccgaccgtgtgctcgtgtgtggagttgagttgtgatggaggccacctccccgcatcctcccaccaccatccgccggaacccaccccgccgcgcgaggcctcccccgaccccgctcgccggcgacaaatccaaaccctcccccctctcccgcctgctcgagggtgaagcagcgttcgccgcctccgttccctgtccaccgcaggaggagcgcctcaaggtgttcctccgcatccgccccctcccggaccgcgatcgaagccggccactccccgctgccaaggacccgcgccggaagcccaagcaggtcggagcccccggggagctctgcctcgcgcccgacggacccaactccgtcgtcctcaccgtcccgcggtctaagctagtcgaccccaagcgaggccgcaccgaggtcttcgacggcttctctgccgttttcccatccgactccacccagcatgatatcttcgcgcaagtcatgaacccactggtggatgacttcctgggcggaaagagtggccttctggttgcaatgggtcccacaggctctggaaagactcacaccatctttggttccccaaggaatcctggtatactacccctcacgctgaggagaatcttcaacgcacaaggcgaaagcaaggtttccaggaaaccaacgcggtcatttttcttctcgatgtttgagatattttctgagggaaaaggggaacgcattcttgacttactgtctgatactgtggagtgtgttcttcagcagtcagtgattaaaggtcttcaagaggtttccctttcaaatcctgcagatgctgagagcttggtttcacgtggtatgctaaagcgcagcacggctgcaacaaatgctaacagcaactcaagtcgatcacagtgcatcattactatacgtgcagacagtgaacatctacttagtagtgctgttctgaccatagcagaccttgctggcgcagaacgggaaaagagaactagaaatcaaggttcaaggctgttagaaagtaacttcatcaacaacacatccatggttttcagtctctgtttgaggtctctgttagaacatcagaaaaaccagaagaaacccttggaaaagcatttcaagaattccatgttgacaaggtacttaagagactacctagaaggaaggaagaaaatgactttgatcttgaatgtgaagccaggggatgatgattatttggatacatcatttttgcttagacaagcatctccttacatgaaaataaagtacactagtcttgatgattcttttgacctggcttcgcaaaagagaatcaatgtttccttgatttgccaagagaacaagaaaaaaaggaaggttcagaagcctgcagtccttgtggttgaacgaaaggaaaatgttgatacagatgatatttctaaagtttctgaaaaagatggcgtgcatcacgtgtctcttaacccagagatgccaagggtatccagaagcgaagcaataatgacaaactttgcaagggctttattgactgtattaagacaatataagcacaaacttttggagtccgagaatgctgttgaaagcatgaaagaattgattagagataaagatatcgaaatcatggagttgaaaaaggagctgaaggctgtaaggtattgttcatgcaagagttctccaataaatgaagatgactctgtggaccatgatgattcttcatcatttggtcaagctgctcagagtttagttaatatatcaaatcaagctgacctgggatctaatgatgcttcagaagataatttccatgtagagttacaagcgcttcataaggaatcagataaatctgaaagttttactgtgccaacacctgcacccactggtggtgcaatgcctgcatctagttattcagatcaaagcttcacagggcaaagtgatgaagaaacggaagagctgagtaagatcacactagagaataaggatattcagcttgatatcaatataagagaagagaagcaccatgaatcttgtagctcttcacagcaagtgaactttgacacagaaggttggttctgaaaagaagcttgaggaactgaagcagaaatctggaagatgtgtgtctgctgtagaaaaggctaacgtggaactggagcatggtatagacggtggtcaagctctagacgaaaagtgtgatcatgcctcagcgaaagctgcaaaggctcctccaagcaagggcagggaggcagacgaaactgcggatacagataaggaagcttttggttctaggacagagaaaaccaggaggaggttacagccagctgctgctatgttgctcagggaattcactggcgctgacattgatgcggataacgaaaggaaagaggcagatcatcgtccagcgtggcaaccgggagatcagatgcgcttgttcaacttctgatgaaaggccgtccggcgcacggcgacgagtcgcgccagctccagtcgctcatgcagctctgcgagatgcgctccatcggctccgaggacttgctcgccgccttcgtcccaatcctcgtcgggatgctcggccagcctgccaccgctggtgccagcccaggcgtcatgctgctcgctgcgcgggcactagccaacctcgtttatgtgctcccctcctgctccgcgatctctgaggagcacgcacccaaccgcctgtttgcgagctggaatctgccggccgatgcttctgagtttgtcatggaagctgtcccatcgctcacgaatctcctaaaccaccatgattccaaggtactagagcatgcttctgtttgtttgacagtgacacgcattgctgaagcttttgcctattaccccgacgaacttgatgaactctgcaatcatggattagttgctcaagctgctagcttgatagctcttggcaactcctctggccaggaaccactgagtacatctacatatacaggcttaatccgtcttctctcaacatgtgcaagtggatccctgctggcagttaaaacactactacttcttgggatcagcggtactcttaaagatttcctttctggccctgctttgatttctggaacattagtcccccgtgctgtaacaaggcctgccgatcagatatttgagattgtgatccttgctgataatttgcttccgcatatgcctgcgataatcattgagttaccaacatactaccatgcatataaagactcttcaacaaataaatctgcttccatcaaacaagagggggctggttctacaggaaacgaaaagtctggcaatgagaggctattgcgtgaccaacctaagctcctagaacagttcggtatggatttgttacccacaatgacacaggtgtatggttctagtgtaaatgcaccaatacatcgcaagtgtttatcgatcattgggaagttaatgtactacagctccgctgagacagtccagtctctccttggcacaacaaacatatccagcttccttgcaggcattcttgcatggaacgatcttcaagtgttgattcctgctcttcagatagcagaaataatgatggaaaagcttccagagacattttccaagttgtttgtgagggaaggtgtcgttcatgctgtggtgtcacttatatgtttggaatcctccaggctccaacacaatggctcgtcaggtgccacctcaggataaaggtaatgattctgccatgccatcacgtccgtcaacactggcgtgggggtgatgtggcagcagaaaatagttcagtagatgaatcgaatagttccaaccttggggttacatactcaacaacaatcgcttcagaagctctgaacaccagccttcatttcgtagttagtgaccatgcaaagtctttcaaagataaatatttcctgacagacactgattcaggtgatattggggttactgatgaccttcttaaactcagggcattctgagctatttttttggacatctcaattgatgtcgaagaacaattagacaaaataatatctgaaatgctctctgagcttagcaaagttaatggtgtttccacatttgagttcattaggagtggtgttaccacagcattgcttgactatttgtcctgtggaacatttgggaaggaaaaggtatctgaaagaaacctacctcagcttcgtcagcaggtccttagatgatacaagtcgttcgtatctgtttccctttctattgatcatgaacgggatgaaactgccatgacactgttggttaagaaactgcaaagtgcattgtgttcgctggaacgtttccctcttgtttcagccagtctagtaggattggtaatggagggtcccgtctgacttcaggtcttagtgctctggctcaacccttcaagcttcgtctgtccccagctcaaggtgaaaaaccacttcgggattattcatcaaatattgtgcttatcaatccatttgccagtttagcagctgttgaaggatttctttggcccagagttcaacacagtgaggttgcgtcaaagcctataattccatctggtaataattctgaatctgtggttcctggcaccatagctggtgcatcattagcaactgcaatggatcaatctggtcggcgtccaacaacaagatcaaagtcatctgctgcatggggtggtacatcaaagaaggattctcatgatgaaagcactactactgccaaaggaaaactaggtgattccaatgagtgtaacattggctcagccagttttagccaggtgcagccatcatctggttccggtgctagaaacacttctagcagaggacccgattctactgaatttcaaagtacgagcacattcgggtcatttgttgctgcgacgatggctgggctagcttctgttggtggtcgcagtgttataggtggttgagatcggtgtggtctgtcacttggaggaagcatgaatgaccacaataaacttgtatgtattcactgctggtggggagcagcttagcaaacatttgactgtatgtcaagctatccaacgtcgtcgacttatgcttgacgaggatgatgaagaagtgtttaatggatcttgtatacaaaacgatggaaaccactactgggatgatgttttcacaataacgtaccagaaggctgataaccaagggacttgcacctcattgaacataaaatcagattcttacaggtctatctctgaagcacaaggggtttctcttcttgatagcatcttgtgtgaaatccgaagtgtttgtcaatagcaattgtgtgaaatgcgggttccttgctcttgtttgtagattcagtcagaattgtcccctgagcagcagcatgcgtttctgccagtttgtaaccggggtttccacttggtggattggctgcccttagtcccaagcttactgtagttaggaaggtactatctactatctatcatggcatttgctattatggtaacttgatgttacttttgattatcgccagcacccttcaagtgctgcgaatacttcaaattcaactggggcaacagagtctgctgctgctgctgctgctgatttgcctagtgtgatgacgtgcgccaattatgtgaagctgcccccgtactccacaaaagaaatcatgcgcgagaagctgctttatgcgatcctggaaggccgaggatcgtttcatttttcataagaatatccgaactaacttacaggtggccagttttatgctgttctttaacaggctcagcaaggtcggatgcaggtgctgctgtcgatttctcctttcttttgcatttgttcagctacaagtttctgtttccattgggcaggctaggccatagaggaagagcccccccccctcttccagtacatacatgtaaataaaatggatttttagaactggtgatgttgatccagaattgttaataaatgtggcccagtgtaccatttctacccttccgatacagaaacgcaacgctacatcagaatgaaaatcatgctttaaacaagta

SEQ ID NO: 26806 - DNA, 2901 bp, Zea Mays
actcaacacaagcgcccccctcgtcgcagtcccgccgttacatggcccgctctgttcccctttccggcgcccgcgacggactgcgacgagcggatagatagatctgtgccccgtccctgtctcgccatcctcctttctcctcctccactccctatcgactatcgagcagagcgaatccttagcggggaagtctttccgagctcagggagtggggtttaaaacgcggctcgacgaaaggaaggccgcactcgctgctgctgctggtcgcttgctttcggtggcgagcgtctcggtaaagcggcgtcggcgtcggaggcggcggcagagactggacttgcttgctccttgctgcgcagtgtagtgctgtgctaccttggagacaggatcctgccgcagggactcataattgatcagtgtgccccaacataagagcgaaacgtgactgagtttgccagctcccccttcatccactgtggtcgctcgtctgctaatgcccgcatcggaggattgctcacggatatgcttctggtgatgggcaacccggggcgctcgcggcagttgtcagcgctggttgcttccgccgccatcttgctgtcactgtccgcgttgccaatttgtcggccctacacctacgagcaagatgtgtttgcgataaacggcttgtacacggcacttggagcaccacagctgcctaattggacttcaaatggtggtgacccctgcaatgaaggctggcaaggtgtttcatgtgtagcgtcaaatataacctccataattctcagcggtgcaaatttaggtggacagctgggcaacactttggggaattttacatcattaatcacctttttcctttcagctaaccaactaagtggtagccttccaagtacattgtcatcccttacacttttgacaagcatgtcactcaatagcaatcatttgactggagcgataccagatgtattttcagcactcactggacttgcaaatttagatttttctgataacaatttgaccggtccgttgccaccttcaatgggaaatttgacatcattgactagcctacatattcagaacaatcaaatatctggaactcttaatgtgttgcaagatctccctttccaagatttgaacgttgaaaacaaccttttctctggtcccgtgcctgtgaaattactgaacttgccaaacttcaagaaggatgggaacccattcaatacaagcatagctccatctgcgcagcctcccatcgcgccaacaccattaccgtctatcccaccttcgtcagggcatgtcccctcaaaagaacctgcacattcttctagtgttccaggtggtagtacttcaggatcaggaaaacatactacactcaaattagttggatatattcttattggagtggtattagcagtagttcttgtgctaattgcaatgtactgtttatccaagtacaaagaaaaaaggtcgagagatgatatttatatgaaaaacaagataggaagggtacctcagaagcttggagagcctaaaatcaaggagccaccattaaaactcaagaatgatgctgagaaagctccgaatgttgtttctgatggaagagaggagcataagttaaaagtgccaacatcagaaacttcaaatgtggtttatgatccaagtccaagggatggggcagaacttagattcatcaccgacagtttcagtgaggaaaatatcataagagacagcaggtttggtaaggtgtatctggcaaagcttcctgatggagagctactggaaattttgaagattgactcttctaactcaaaagtgccagtagatgcctttcttgagctagttgtgaggatttctgaactgaggcatcctaacatacttggtcttgttggatactgtgcggagtttgagcagcgattacttgtctatgagtactgtagcaagatgaccctacatgatgaacttcgtcatgtggatgactcaagcaagccattatcgtggaatgctcgcctccaagttgcttcagaggcagcaaaagcattgcaacatcttcatgacggttgccaaccaccagttgtacaccagaattttgaaccctctgttgttctgctcaacagcaccttagttgtgcatatttctgaatgtggccttgcatcactagcatcaaaatcagtttctcagttgtctggacacaccttattccattatgaagcacctgaagtgcatgaatctggatcagtaagcgatcgaagtgatgtttacagcttcggtgtagttatgttggagcttctaacaggacgtaaaccttatgacagttcgtatccacgagctgaacaacatctagtacgatgggccacttctcaactctatgatattgatgccataacgaagatggttgatccttccattcgaggacaatgttctgataaggcattatcccgttttgctgacattattagccgctgcattcagcatgaaccagaattcaggccaccaatgtctgaagttgtccaagacttaactcgcatgatgcctttgacgaccattgatgcggtagtaggatattttggccaatgcaaaatgggtggaacacagtggcaggatgcagagactgcaccacgttttgtccactgccagtaatgctcctctgaatctctggtcaatttatagttcaaagctattgttgtaattctgtagtctgcactctgcacaatatatttcttagtgcccagttccagatcacgtggtgtgattatgcgtggttatctagaccatatgtaaataccaagaagttaaacaaatgtattatagcgtgcttgtttgaggaatgagaaagtacatcttcttactcctcactttattatttgatttgttaaatgaaatgagttggtccatcatatttcattcttt

SEQ ID NO: 26807 - DNA, 841 bp, Zea Mays
tggaacttggaaatacgatctatttgttctaatcctcatcttacctgtgaagcaaatgattcaatttataaatttattgttgtggtctgccctatatttcttgttggttttgatgaatctgatttgccgaagggtacaagtttgtgcggacagcactctgtttctgcttgccatgctagttatagggagacaagctacggaggcgtggagcatgggagaattgtttcgttctgttggacttgagggggcaacgtaccatccaagcatgcctgggatgtctggtgaagctctcctgacaagatcagcaacttcagttagtctaggttaccatgcatcaaccttcggtgggctacagagcaatgggagtgaacctctctttgggccgaagtctgcaagaaatctactcaggagcgataccttttgaggctatatattcaagagaagttaagtacaatggcaggccgagttttcacagtaacggcatgcacaccttatctcaggtgagatgtaaaaacagctgttaaataaaaccaaaaaaggcaaaagcataatacaaaaaaaaagcatacacaaagacaaaaaaatacaaaatgcaaaaacaaaaataaaaagagcataggcagcttttgtgctagtactcctgtcctttgtgttatgtggtatattacctagtaggtttgttttctaatgctaggagtttgatggctcttctgtgtgaaccgagttatttaagtgttatggatggtaccattgggaaactgttgagtggacgacgttatataaaagtacatgaaaacattgttaattatgctgctctctgctgatttgtgccgcatttctt

SEQ ID NO: 26808 - DNA, 1604 bp, Zea Mays
gggaccaaccgttgcggatgatttcctctcgtctcgtcccatactcccgtcctgtccgtcttcacctgcgttccccgggtcccgacacgccgctgtaccagtcccgcccgcctgcgcacttctcccacccccgcgccgcctccggcgccggcgagccctcccgacgctcctcgaacgatccgtccctgtcgcggcccttctctctgccgcttccagcccaaggggaggagagggagaggatgtggtcgtcgagccaggcgagcacgaggggcgtcgtggagatggggagggtggaggccgggccgtcgcatttccctaagagacccgcgcctcagaactccgccagggtcaatctgtcaaggacacacacagtcaaacctacctctgctggcgaccgttcaggaatttctgttaaatgcaacttggggtggtcttctcaaccatcgcctgacttgaggcatcactttagaggatactcatcagcatcagaggcagttcttacttcccaatctgatgtgagaaaactgtttgttggcaatgaaaaaatcggtgttctcttgctgaatcttgggggcccagagactcttgacgatgtgcagcctttcttgtttaatctttttgcagatccggacattatccgtcttcctaggctctttcgctttctgcagaagccacttgcaaaattcatatcagaagtgagagcaccaaaaagtaaggaaggttatgcatccataggtggcggttctcctctacgacaaattactgatgcacaggctgaagcacttagggaggcattacatgggaaagatgttcctgccaacgtgtatgttggaatgcggtattggcatcccttcactgaagaagccatagaacaaataaaacgggatggaatcacgaaacttgttgtgttgcctctataccctcagttctccatatcaactagtggttcaagtctccgtttattggagagcatattcagagaggatgagtatctcgtgaatatgcaacatacagttataccttcctggtaccaacgtgaaggatatatcaaggctatggcaactttgattgaaaacgaattgacaaaatttcaagaaccccaaaaggttatgatatttttcagtgctcatggagttcctctggcatatgttgaagaagctggtgatccatataaagcagaaatggaagagtgtatcgatcttatcatggaagaactggaaaaaagaggaataacaaatccgtgcatacttgcttatcagagccgagttggaccagtggaatggctgaaaccgtacactgatgagacaattattgagcttgggcagaaaggggtaaagagcctgcttgctgttcccattagttttgttagcgaacacattgaaactttggaagaaatcgatgtggagtacaaagagttggctttagaatctggcatcaagcactggggacgggttccagcactaggttgcgaacccacattcatttcggatcttgctgatgctgttattgaaagcctaccttatgttggcgcaatggcagtttccaatcttgaggctcggcagggtagtactaaagacagtttggaagaagacgagaccaatgaa

SEQ ID NO: 26809 - DNA, 3326 bp, Zea Mays
ttcagcgtacaaatttcagtagaatggatctcaaattggaagaagcaggcccggcccaattccagaatcatcgttaacaagcggccagactagatacgagggtgggcccagttatcaaggtgattgtgtgaagtgtagagcgcccacctccgtcagctgggcacacgtagatatagcagtagcagcagcggagctgttcgacgaaatgccgccatggccgccgtgtctccagcctaccctcaccaccgctcgccgcgccaccgtattctccaggacgagatgtctctcttctacccccgcctctcctacctacgagcaggagcttggtgtcatctcgtctgtgcaggggcagcacgaggaggagccatcgttggtcgttgtggggggcggcgcggcgggcgtgtacgcctccataagggccaagacccttgctccgcacctcaacgtcgcggttgtggagaaaggcaggttcttgtccaaggtcaagatctccggcggtggccgctgcaacgtaaccaatggccatcaccttgagcccatgggactggcgagaaattatccaagggggaacaaggagctccgaggatccttctttaccgctcacggtccgcaggataccatgcgctggttcacagatcacggtgtaaagcttaagacggaggacgatggcagagtcttccctgtcactgacaattcagcttcagttgtagactgtctactgaacgaagcaagaaggcttgggggccggcaaaactgtgtctagtgcatctgttgctcaagacgggaagtttgttctcaaggtggagaagcgtactgccgatcttgttgattatatcaacgctaattacatcttggttgctacaggtagcagccaacatggctattcaatcgctgcacaactcggtcattccattattgcaccagttcccagcttgttcacatttaaaatcgcagacaagcggctggctgatctcgccggggttacatttccaatagtcaaagcaaaactgaagctagatggtgttcaaaaaagtgttcccgagttaactcaggtgaacatgccatttcttttcagcaattggcgggctcttagagaggtagtcaactggttatacacatcgcttgcaacaagtgacttgtctttacagactgggcctatgttagtaacacactgggggcttagtgggcctgttgtgctgcgattgtcggcatggggagcacgtgagctacatcagtgcaactaccaaggaaatcttatggttgactttgtacctgatattcatatcgaggacgtgaagcgcgtcctattccactacaaagatcagcatgcgaagcacaaagtgagtaacacgttccccacggagtttggcctggtgaagagattttggagattcctgctagaacaggagagtttaaatggtgatacacactgggcctccatgccaaataatcatctaaacgcagtggccttccggttgaaacaatggacgtttgaggttgttggaaagggccaatttaaagatgaatttgtgactgcaggaggtgttccaattacagagatatcgcttggcactatggaaagcaagaaacagccaaacctgttctttgcaggagaggttcttaatgttgatggggtcacaggcggattcaattttcagaatgcatggaccggtgggtatatagctgggacaagcataggcacattggcatcgactagcaatctcccagagcagcagtcatgtttccagttgtaactgggagtttcagagaaggaaatggattgagttatgaaagagactcctcagatcatctgggaatgattcagggataccaacaagtttgcaatcaagataaggatattccaagatgaccaggatcagggagctacaattgctactgaattgtaacactaacctaagatggggtacatatgacaagaccgcacgattttggttacaatctaggtgtacaaagtgcaatctggaacgataatagttacaatcgagttaaacaagttgtgatttgtacttgaccgatcagagtgtgcatccagctatgattcttctgtctcaattaataatcatcaatttttttcaacaacattacctgtcagcactcagcagcgactgtcactggctaattgagagaaaatttatcttgagagaaaatttatctcaagctaaacgaaaaaatccatctctaaatgttatcacaatcacaataaatagtttccaagcatagactatccggctaccaaactacacctggcctgactaaatcagagcgaactatatatggtgcgcatcttatattcattccaagctgattcttccacaaaactgtgcaagcttacaataaatgcatgcgctcaacataaggattgtgcaaccacttgttgagtggctccccgcagccgacaaagcagccagtatttccacgggtggtgaagaatggggattcaaagaggtttagaagcttttgaatcgattgcctaaccagcgaagatccagttaccctgctcctcctgccccagccagtgacaatgtcaattctttcaggaccagtgcccaatgtcagaacctgcctatggaaccaggcaagcgtcctggacagtgcagtcactgctgtgccctcagacatcagatgaaggttgatgagccaatacgacgagctcttctcccttacagaatctgggtacacgttcttctgtgcagcaacctcccatataaagcctgcttcctccttgagaccggacttgtgcaagaagtctatgacagcatccattagaccccttttactctctctgtcctcactgtgcatcatgtccaagaaataaccagtgtgatccctgacgttctggccaccagcttctgcatcaggcaagtacagcaggaacatgtgagctggatgtccagtgatggccatgagctggcagcacaaacccatctgtgcctgacccacggtgcagcagctgagtagcagggtgtaagtctgcacagatggaacaagcccccgagcaagcatgttctggagcacgatgtaggcatcttgaaatctgttcatcttcaggaaagcactcaagagcgaattgcaggtcggcacgttaggctgcaaaccatcctgaagcatcgcttggtaccatcctagcgctttgtcaacattgccagctttgccccagagatcgaccaaaagtccatataccggctcatcaggagcccaatcacgcctcatctcaataaaaaccgcctcagcctcatccagatggccgcaatgaccaagaacttccataacgatgctaaacatgtgatgaaggtgaacatacactg

SEQ ID NO: 26810 - DNA, 1700 bp, Zea Mays
acccgcgcgacagcgggcgcgcgcggctgcgactgctgctgctgcttcttctccacttctccttccttcccctataaagcaaggaatagtcgcagcttgccccagcttcgcaagctttcctgctaatccctgccattagtagcaagcaagcaagaaagcagtggtagtaggtgccacccacacggttttcacggctgccggctgggagcgaccgaggagatcgtcgtcacgctcgatggaggccctggtggggaggtactggggtctggggggacggcggtgcggggcgtgcggcggatcgccggcggcggcgcactgccggacgtgcccgggcggcgcgtacctgtgcggggggtgcgacgcggggcacgcgcgggcggggcacgagcgggtgtgggtctgcgaggtgtgcgagtgcgcgccggccgccgtgacgtgccgcgccgacgccgccgcgctctgcgccgcgtgcgacgccgacatccacgacgccaacccgctggcgcgccgccacgagcgcgtccccgtgcagcccatcggcgccgccgctgatcccgccgcggagaaggcggcgctgctgttcggccttgccgcggaagggaaggacggcggcgacgcggccaaggtcgtcgtcgacgccagtaagctggacctcctgttcgcggacgacgtggtcgacccgttcctcgcccaagacttcgccaggttcccgcacgccgacagcgtcgtgccgaacgatggatccaactgcggcgccgctgtggacttcgactttggtggcggcgtcgccgtcgccgccaagcagccgtcctacagctcctacacggcggcgtcgctgggccacagcggctcgtcgtcggaggtcggcctggtcccagacgtgatgtgcggccgcggtgggagcgtgaccggcggcgtcatcgagctcgacttcgcgcagtccaaggcggcgtacctgccttacgctgcaactcctacccacagcctgtcgtctttggacgtgggcgccgtgccggagcgcagtgacggggtcatggcgggcaggctcgcgacgccgacgccggcgacggccacggagagcagggaggcgcggctgatgcgttaccgcgagaaacggaaaaaccggcggttcgagaagacgatccgctatgcgtcccggaaggcctacgcggagtcgcggccgcgcatcaagggccgcttcgccaagcgcgcggatgacaacgacgccgacgccgacctcgacgaggctgccgcgccggctccgccggcgcggtcgcagccgcagccgcagccgcagccatcgtaccgctacgtgctcgacttcgccgccggctacggcgtcgtgcccacattctgatgacgcgtgccgtgtgagtgttgccgcgcgcgtcgcgtgccccatgttttcacggattgggccggcgcgcgtgcgagccatgctgcatgcgcgcctacgtgtttgctggagcggcgagctcctagttggcgatcacatgccgttttgggctagccatggttaaattagcaggctagcgtgtactgctgctgcgtttgtttgctggggcgaccagttctactaatagtacgtagtaccgtgtaattttgggtcaggaagagatgcttagcatctgtttcgattgatcgatgtagtattatgctataattggaaaggcctctcgatctatttgcaaaaaaaaatt

SEQ ID NO: 26811 - DNA, 1794 bp, Zea Mays
gaactatctttggtccgttactggcagtatccatgtacagaagatgctctctgcgccctatagtactcctggttcccttaatgcaggatgcctaataaaccactttcagcattgactctacaagatcgaaatgcagaggttcaaatacaggtccacaggaaatgggagtttcgaggtgccgttgacaatggccctatattacacatcgacatgatcctgacagactgcacaggcaatgctatccattgtcagattccttcgttcctagcagctacaagaggcgatgaatttcaagttggcaaaatatacaagatgacccgcttttcagtagcccgtgcaaaatccacctacaagcctgttgatggtgatctcatgttgtatgtcaaaccatacacaacccttgaactttgccacacttcaccatcaggttttcccctttatgtttatcatctaacaagctatgacaagattgatccagatggatcaaatgcaagaaacttccatgacgtccttggtattattacggaaatctctgcgattaagcctgtcggaaatgcacacataccctcatcttacaatcgacatgttctgataaaaaacctcaggggaagtactgttaagtggtggcgcagcctgtcattggtacttcaacccatcaattgaagaagctgaagctttttatagcaggattgaatctgaaaagataaacatagaattgcccagtcttgacaaacaagaaattacacctccaagttttccacaacgagaacatcacaaccttaaatacatactgtctttaaacccacatgatgtaccggatcaaggatatgaatgcacggtaaccattacatgtattcctgaaggcaagacttggtattatattgcttgcaacacttgcccaaacaaaccaagcattgatcccgtcatccgtcaatgctccacatgtagatcaacaaattactgcttcagatacaagctcactttcaaggcatcagatggaactgaagaagctgaaatgtttgcattcgacaatgttgctaggacaattattgggaaaccatgtccaacagttgttgcatcctttcctgatgcatcagctatcccacctgaaattgcagcaatagtttcacggaaatacacattcattatagaattcaacagccagtcattcagatttctagaaaaaacattgctcatcaaaggaattgtagcatcatatggaagaatgacatcactaccaatagtacaagaaaaagatgatgtgcaacttcctctcactccaacaaaaaacaaactgataacaacagctgccgaatctccttctacacccatgtctagactttccacagcagactcaccaagcatgccccaaaagctgacatattctccagcaaagaataagccttagacaaacctccccgatgctaacagaagcagagctcctacaactacaattgagtcgccaacaaaaagaatcaaacaaaatcccaagaatcaacaagagtagacgttgtctacaacacaacacagcgaggaatattttggatcgtcggagccaaaattcagatgaaaaaaacatgttcgtcgctattttgtctctatatataattagagtcacagcttccatgaagcagatcttattttggacatgctacatgatatctatgtactactatgtcatgtacctttctgtatacttatctggtgctataacgaaccgtcatgtttcatatatagaatcgtttgctttggcttgctgaaaacgtataacatcaaaaacaagatgaacgcgcg

SEQ ID NO: 26812 - DNA, 2298 bp, Zea Mays
gctgagctctcagccatggaagtggtcgatctctcccccacgtcccgccccctctcaccgctcctctccaccgcacccgcccgccgcctccgcctcctccctccccgctgcgtcgtcggcctgcgcgcctctccccggacccgaggactcggctgcgttggaggtagtctcagcagaaggcattctttttgtaagaacggattcttcgcaacaagcagttcgtcagcctcagtagaacccgctacccaggaattgggaacagcggatgcagtggagtggagtggggatgccatacgtcggcgtttccttgaattttatgcagcccgtggccacaagatccttccgagctcgtcgcttgtgcctggcgacccaactgtgttccttaccatagcgggaatgcttcagttcaagcctatattcctcggcaaggaacctaggcgtgtgccacgcgccactacctctcagaagtgcatacggacaaacgacattgaaaacgtgggtcgcactgctcgacatcagaccttctttgaaatgcttgggaatttcagttttggtgattacttcaagaaggaagcaaccacatgggcatgggagctggcaaccaaggagtatggattgcctgcagaaaggttgtggattagtgtttttgaagatgacaatgaagcattcaacatctggcacaatgaggttggtgtgccaaaggagcggatacagaggatgggtgcagaagataacttttggactagtggcgcaactggaccttgtggaccttgctctgaaatttattatgatttctatcctgagagaggatcatcagatgtggatttgggcgatgatagccgattcattgaattctataatcttgtctttatgcaatataacaaaaaagacgatggatctctagaaccgttgaaacaaatgaacattgatacaggaatgggccttgagcgtatggcacgcattcttcaaaaggctcatcacactgcaacacatctactacaatctgctcttaaaagcgtagttggttcagaaacttcacaggctggttcccttgtggcgtttgaccatctccgatttgacttcaatttccatcgcccactttctgaagaggaattaacaacaattgaagcacttataaaccaatggattggcaatgcagcacatgttgagacaaaagtcatggctttgcaagatgcaaaaaatgctggtgcgattgcaatgtttggagaaaaatacggtgaacaggtcagagtcgtagaggttcccgggatctcattggaactctgtggtgggactcacgtcagtaatactgctgagattcgtggtttcaagataatttcagaacaaggaatagcttctgggatcagaaggatagaagcagttgcaggtgacgcttttgttgactatgtgtgtgctcgggacaattacatgcggcgcttatgcttatcccttaaggttaaggctgaagatgtgaacagtagagtagaaacaattcttgaagagctaagagcaaccagaaacgtagcatcatctctacgcagcaaaattgcagtgctaaaagcagcttctcttgcaagtagagctacaactgtggagccccagaatgtcaggattgtggtcgagaacatgggtgatgtcgacgcagatgggctgaaaagcgccgcggagtatctcatagataccctcaaagaccctgctgcggtgattttaggatcaagcccaggggatggtaaagtcagcctggttgctgccttcagccctgcaatcgtcgaaatggggctgcaggccgggaagttcgtgagtggcatagccaaactctgcggcggaggcggtggaggcaagcccaatttcgcccaagctggggggcggaagccggagaacttgcccgacgcccttgagaaagcccgagctgaaattgtggcacgggtatcaggttcgagctgattctccgctgcctcacacctgatactggaagtatagggataggattcatatgaaatgtatatgtaattgtcattggcattctaagcgaaaacacttgtatttctccctaccttgccgtgtacgctttctgcagatgacggagcaaattttgtagcttgtaattgtaactagtggccgaacagaacggggaaaagatcaaatcttcacacagcaaaactactgctcatgtttaatctaatcttaaaaacataagaaattatttgtcacatgatcaactaatagtctaatacctagactagaccaaatacatctgatcaagtcagccagccacgtgcgtccaagcaaagattgagc

SEQ ID NO: 26813 - DNA, 2944 bp, Zea Mays
cccgtcccaaatccgttgctctttcccccttgcccccttcccagtctccactctgagcactctcctccgctctgctcctttgctccccacggcaaaccgtaaaccctagcctgaggggcacccctgtcgcagccatgggcgccagccggaagctgcagggcgagatcgaccgcgtcctgaagaaggtccaggagggcgtcgatgtctttgacagcatctggaataaggtctacgacactgagaatgccaaccagaaggagaagttcgaggcggacctcaagaaggagatcaagaagctgcagcggtacagggaccagatcaagacgtggattcagtccagcgagatcaaggacaagaaggctctgatggatgctcgaaagcagattgaacgagagatggaacgatttaaagtatgtgagaaggaaacaaaaactaaggccttctcaaaagaagggttaggtcagcaaccaaaaacagatcccaaagaaaaggccaaagctgaaacaagagactggcttaataatgtggttagcgatttggaaagccagattgataacttcgaagcagagattgaagggctttcaattaaaaagggaaagcaaagaccgcctcgattggtacatttagagacgtctattacgagacataaagctcatataaagaaattggagtcaatcttgcggcttttggataatgatgagttgagtcctgagcaagtcaatgatgttaaagattttcttgatgactatgttgaacgtaatcaggaagactttgatgaattcagtgatgttgaggacctctatagcacattgcccatggagaaggttgaagcacttgaagacatggtttcacttgctccttctagtcttgtgaagggtgttgctcctgtttcgactactgcagttttgagcacaaagagttctgttgcaacttcacctactcagcctacagtatcaacagcttcttcacaaagtacatcacaggatcaaacagaggagacagcttcccaagaaagcaatcctgaacctacgccacaaacaccacctccaaaagccacagtgctttcttctgctattccacgaagtgctcctgagaatacacttgctgttacctcaattcctgcaaacttatctaccactttgaaggatgatgaaagcatgagtgttcctccacgacgaccatctcctgctactgaaattggaattggcaggggcataactcgaggaacaactagtcaggcattaggtacagctcccataactattggtccagtttcaggaaatggatcgttggttatgcctcttggtagtaaagttcaaccccagcaggttcccaggactaatgatgcaatcggctctgattctgctaacacaaatgaaaaccctattcttggtggaagagtattttctcctccagttgtttctggggttcaatggagacctcaagctgctgctgcatttcaaaatcaaattgaaactaatcagtaccgtggaaggcctgagatttctgctgatcacagggagaagtacatacagagactgcagcaagtacagcagcaaggtggcagccttctgaatgtttcccatataactggcataaatcagaagcaatttccaacaccacagccaaatccccttctacaacagtttaattcacagagttcctctatatcttcccaagtgaatcttgggcttggagttcaaggatcagacgcggggcatataaaaagtgaagatcaacaaattttggctgaagatgttggtgtggaatcttccgcaacaacaggagcaaataaacaaacaagtgaagatgacacaaagattccatattcgaatccttcagcacctgcagcagaaaacactcagctgcctagggatactgatctatcacctggacagcctttgcaacctggaatgccatcatctggtgttggtgttatcggccgaagaagtgtatctgatcttggtacaatcggagataaccttactggaacttctggtagttctggtcatgatcagaattattatctgcaaatgcttgaagctgcattccacaagcttccacagcccaaggactctgagcgtgctaaaacttacattccgcggcaccctgcagttacccctgctagctacccccaagttcaggcatcaattgtatcgaatcccaccttttgggaaagaattggtagcgacacattagctaccgacatgctgttctttgcgttctactaccaacagaacacatatcaacaatacttggctgctagagaactgaagaagcaatcatggagatttcaccggaggtacaatacctggttccagcggcatgtggagccacaggtcacgactgatgagtatgagcggggatcatatgtatactttgatttccatgtcactgaggatggctcaggatggtgccaaagaatcaagaatgacttcacatttgagtacaactacctggaggatgagctatcagtacaaacaaactaaagtgccatggcagtaggtctggtcaaacctttatgtccaatttgaattttgtagttctcataagagcttgttcggttgcttctggatcaaagaaggttggaggggattaaattccttctagtcaaaattgaatagaaattgatttaacccccctcaatctcctttatccagacgcaaccgaacaatgcctaaggtgactgactgactgttataatctggacccttgacaaaatctccagctgtaaactaatgtgtgaagttggatgcaccgaacatgctgaaattataatcgtgttatgccagccgaatctgtttgacgcagctgtacattgtcgttattatctggatgcgcctgaaaaatattttggatctttcttggcgcctacctgtttatttttagctaactcctggctggcgctttcgatctttctggttcgtttttttatcaaaaaaaa

SEQ ID NO: 26814 - DNA, 1435 bp, Zea Mays
cggctatgcgttgcgagcgcctgagagatcctgtgtttagctctaccgccgggaattcctcttgctcttgcacaagcccacgaaactcgagaaaaactgaaagccacacactctgagttagctgaggagagggccattgagatcgtcatcataaagaccacaggagacatgatcttggacaaaccccttgcagacattggaggcaagggtttattcaccaaggagatagatgatgcgctcttgcagggaaggattgatatcgctgttcactctatgaaagatgttccaacatatctacctgaaggcacaatattgccctgtaacctaccacgagaagatgtcagagacgcattcatatgtttgactgcaaattcgcttgcagagcttcctgctggcagtgttattggaagtgcttctctgcggagacaatctcagattctctacagatatccatcactgaaagtagttaacttcagaggaaacgttcagacacggttaaggaaactcaaggagggagatgtctctgctacattgttggcactggctggattaaggcggctaaatatggcagaaaatgcaactgctgtactatcagtggaagaaatgcttccagcagttgcccaaggtgctattggaatagcttgccgaagcaatgatgacaaaatgatggagtatctatcagcgttgaaccatgaagataccagattagctgttgcatgtgaaagagaatttttggcagttcttgatgttctgctagagaagggtgtacctggtgtagtggtgagctgagtcatcaggtcgcgggttcgaagcatccagtctccgtatttgtgggagaaggtttgtctcggtttatctcttttccgctactcatatgggagaaatgtgggagcctcagtctgctcttttttttttccatactagttctgctagtgccttgtactatcactcgtattgagcagccccattcagctttgtagtatctcactctgggttagagcctttataggtatctgcacagcacagctatatgttttgtcgaagaggtatctgcacagctacgttctcggaagactccagcagccagctgcgtcagcacgatcagatcagtcatgctcgtgcccatccagcagccagcagtcgagatttcagatttgttgcagcgaatatgattttaaaagtctgaaccgatttgctgcagcgaatatggtttaaaaaaccggaccgaaggcagttttgatattcgggttgttcacttcggattgaaattatagagataaaaatacagtaaaaacaaagaagctggtatggattaaagaacgaacaagttgattaatgtgatgtttactccggatctagatataaaaatgtgcatatgcatatttcccccacgttgttccaatataacattgtcatccatttttatgttttgtcg

SEQ ID NO: 26815 - DNA, 3091 bp, Zea Mays
cgaaactgaaacatcagagcaaaacccccttctccccactccccagcaagtctctaccaccatctcttctgctactgcaactgagaaccccagcaactgaaaaccccattctccgcggagcagccccattgtagattaagcaatgctagtagacattgttgatctttccagtgatgatgacgaggtggctgttacagaagaacacagtgttgatggaaaaggtgtttatgcgaaggcaaatttttttgacttaactattgacgatggcattcttgaaggagagcatattgcttacgaacaagaacaaggagattctgctcagggcacatcattttataaacaagagttcattgcagatgatggacaagctgaagctgcccagtgcatagtaacattagagttgcaaaatcttggagcagatggtggatgctatgcttctcaatgcacagagacattgttggtgcaacaacttagaagaaatgatggacaaaatgatgctgcccactccacaggaacactaccgatacaagaacttagaacagatggtggacaacacgatgcggcccagtgcacaacaagtctacatatgcaagagcttagagcaactgatgtacaaggtgatgctgcctgtttcacaccaacattacagaggcaagaacatacagcagggaatgaacaaggtgacactgtccagtacacaacaacacaacagggtcaggaatctattgcagatgacacacgaggtgattttactcactgcacaacagcactgcaatggcaaggatctcataaagctcagtgcacaacaacattactaaggcaggagtttctagcagcaggtgatagaatgcaagatgctgcactgttgagaaattcagctgaagctaccacatccttgacaagtacacaacaagggagacacatgagaactgaattattcaatgtgtcaactgcaacaccatttccccggcaattttggaaagctggagagaaagctggagactatggattagcttctcaagctgatctcaacaatgaccacaaccgcttacagattcaccccaagtttcttcattctaatgctacttcacataaatggccattcggtgctattgcagaactgctcgacaacgctattgatgaggtgagcagtggggcaacctttgtgaaaattgataagatgaagcattctcctaagggggattattcattggtaatagaagataatggcggcggcatgagtccaaaatctctacgacaatgtatgagctttggattttcccagaaaagcacaacttcatccatcgggcaatatggaaatggcttcaaaactagcacgatgaggcttggggcagatgctattgtattcacatgcactaaagatgataggagattgacacgaagtatcgggttgctgtcttacacattccttatgagaagtaactgcaatgacatatttgtaccagtggttgattatgaattggatgccttgtcttcaactttcaagaggaaaatgaactgcggtgaaaaacattttttatctaatcttttcactattttgaagtggtctccattttcgacagaagatgaattattgaatcaattcagcaatatggagtgccatggcacaaaaatcattgtattcaacttgtggttgaatgatgcattggaaatggagcttgactttataactgataaagaggatattttggtctcaggagcaccggaaatacgagcagggcggaatacagtggaaagcttgacacagatgcatgtagcaaaccgtttccgatattcgcttcgggtgtatgcatctatactatacctacatgtacctgaaaactttcaaatcatcttgtgtggacgagctgttgaaccacattatgttgtcaatgatctcatataccgtgaatgtatcatatatcgaccacatgttcaagtaaccacagaggttgatgtcattactacaattggctacttaaaaggtgctccacgacttgatatctatggatttagtgtctaccataagaaccgtcttatactgccctattggcctgcaggttcatgtagtggacgtagaagaggcattgctggggttttggaggcaaacttcataagacctacacatgataagcaagattttgagaggacgggtcttttccaaagacttgagacacgattgaaagacatggcaaaagagtattggacttaccattgtcatatggttggttacactcgggtcatgaaaaagcctcctccagcacattatgtatcaactattgctgagaagggtgatgataacttagcagctcagtctaccacaaagacttatggttacaattcaagagccagggtaccggtagcattgcagccttgttccaatgcatataacacacaagatcctatgcatgctgatgttggtgtcgtgatggatcaaatgaactatggtgcatgcccttcaatgactataaatgtggggacaacattacattcactaagatatgcaccacaacaatctcaatctgaactatgcaaacgaagaaagtcttcggagattcactggagatctcaaaaaaagcagaacaccaatatttattcggataaacctgaaagcgatagtggaacagagatggcagagttcagagttgtacttgactcgtccaccatgctaaaggctgagtgctctgaacttgaggcagcaggaaagcagctggcctctaaggcagataaattgaggatagaactcgatgtgtggcagcggatgtaccagggcctaagtgacaaattgcgatcctacgatgggcttcaaaggttgcgttgcagtcgccattgcagcagctccagtattgggttcatatgagctaagagaagcaattccagcgttggattcacaatcaagttagaaatggcattagtccctcaaagtctatcttttcgtgactgtagatctggcagtatattatttgttagacctagtaagggtttttggggctagtccccttgtaattaactgcataccctgtgtaaggcagacccatctatacttagtctattaatacaactcctaaccctagttagggctagtttttcc

SEQ ID NO: 26816 - DNA, 1800 bp, Zea Mays
acgtcaatcacttttctgaccaccataattacagagtggcattggtaaaatcagccattatgatgcttccacagttcctaagcagcaaggatgataagagtattaaggtttctatttgccccacttgcgcaggagagggcgaagtcatctcagagtattgtaggaaatgttctggagaggggcgtatccgtgtcaggaaggagatcaaagtaaaaatccctccaggagtgagcaaaggcagtactcttcgtgtacgtggggaaggtgatgcaggatcaaaaggtgggcctcctggagatctctttgtttgcctcgatatagaggagccatcagatatcaagagggatggtataaacttgtattcaactgtgtcaataagctatcttgaagctattttgggcaccattaagaaggtcagaacagttgatggaaccaatgaccttcgaatacctccaggtacccaacctggtgatgtaattgccttagcgaagcaaggggttccatcattgaataagccgactatacgtggtgatcatctgttcactgttaaagttgcaatacccaagcgcataagtgggcgcgaaagggaattactggaggaacttgcatctttgagtaatggtggctttgttcgaacagatgccaagccaaaacctgcccagccaaaacgtgtacatctagagaaagaagttggtgctagccaagaagatacagacaaatctaaagcagcgggtgattggttgaagaaacttacacattttgctgggtcaattgctaatggtgctgcaaagtggctgaaagaaaacctgtaggctgtaaatatttactgcaggatagaagatttcttcagttaccatggtgctgtagtccaatctccaattcttagattcattggggtccccaagagctcttacatttttgttttgttttgttggagagtttcaagattttcaggctgtgagtaacaaccgagggagtgagaattgtctactaatactgtcggcatattggtcccttgtcattcttgcaaagcaattattttttatgtagttggagttattttcagtttggcaagtgcatgcagcagtctgaaagagtgaaagttcgccctgaaagttatgggatgctgctgctggtcccaaaccttgagacttagacaacactgtaaatatgtctctgttcctgattctgtacttgaggttttgggttaatcaaattcaagatcaacgggcgttctttttctgatttcttctggagctgcaaagcttgcatcgagcgatgccaaaaaaagatcattcagcagagttcaaacattttcatcttacaatgaagctatcattagaaacaagtttcagtaatctcgaattctaggtttcgtggagtcctcgcgtcgtatcactatcaatccaccgagctcgctttgagcaaagccaagactgcggctaccacgggcagggacaccatcagcagagctaccacaatgtttggcctcgtgatgtccgggagcaggatgcttccgtacttgataaccgcggcgccaccaagggacccaagcaccaatgtccacagatagccggagtcatcaccctattcatcaacacatcataacaaaggaaggaaacggactataaaattctttgcatccaaataaatgttgctatcgaactagtcgctcacaaggatgaaggatctacagccacaatggttgctgttgctgaatgttgacaagagaatgcagaggtaccttgaggatttgccccacgcccgcgtcggtcccggcctcgccggggtcgcgcccgg

SEQ ID NO: 26817 - DNA, 970 bp, Zea Mays
aattagccagagcccagagcccagagcccggaacaggcgcggcggatataacacactccaccctctccgcgactccgcctcgcggcggagacgttccgcggccattcatacggcgtggctaggagcactccttcgaatcggcatcgcaattcatacggctacaacgtctattctgtgggcacttcgtctccgatcgattcacggcaagagcgagagttcatggattcgacagggcccatgagggtctccatcaaagcccaccgccccgactggaaatcggagcttagaacaaattgcctcagaagagttagaaaggacagaaatgacttgctttggaagatcaggaagcagggactgcccggcaatgtcatggaaaaggtcagatctgctgtcaggagcgtcatatctgatgaggtagagaaactcaaacagtccaatacagaaaacgaggaccaagaaatggatgtcatatgggagtatcaaggactgcatgctgctaagcctgctgaaattgaaagtgaagatatattgcttgaaatggaaagacttgtttgtgaagatattagagaagaagtaatcagaaaacgtgtggtgcctataacctctgttattctttcattcccactgcttactgaccagcaatctgtttgcccatcttattgctggagtttagctgcaaaaacaacctgattaactgtttttgcatagttgtgcggttgtgccaattctatgatacttattttactcattggtccggaatttttcatcagttaatcatttgcagaactagaggcacttgatgaggaagatgcatatttagctcaaagtgttttggatcatatgcaactaaatgacattgagctgttcatatgactgtcattgttatggtcgctatatcggtgagggattggagagggatatcgatggacagggacgtcgcccgggggcctctgcccacggctaagcaaga

SEQ ID NO: 26818 - DNA, 1735 bp, Zea Mays
gcgagcccacgtacttttacggaaacgcccacaccgccggctcgtcttctcccgaacccgaacccaccctccccgattcaaaccgtcgccgccgtcgccgagagagtcgtgactccccccagcggcggcctgcgaccacccgttacccagccgtcccttctccgcagacagcatttgcgcccaccccgtcccgtcccgtcccctctccctcgcggaggcccgagagctttgagctgcctcggttaagtcgtcgagtggtccacagggccgccgccgcggcggcggttacaaagcggggagggaattccggcgcgggatgccgcgatcccgctgcgatgcgcggatcagaatatgggtgtgacccaaccgggaagtagtggacactgctggtggaggactagggcctggagtgggagggagctgcggccgcgacgatgtacgtcgcgcgggagtctaccaagctgtggaggagggtgtgcgcggagacgacggcggagctgcagctcctgctccagaagtggcaactgctacttgcagggttggtatttcagtacatccatggattagctgctcgaggagtgcattacttgcatcagcccggaccactgctccaggacttgggatttatggcccttccatggagttttcacccttttatttatcatagcaaacgtttctacactgttctactatggcgaagggtgctggcatttctagtggcttcgcagtttttaaggattatgacattctattccactcaacttcctggtcccaattatcactgccgtgagggctcaaaactggccactctcccaccaccaaataatgcacttgaagtgctcctgattaactttcctcgtggagtgctttttggttgtggtgatctgatattttcatctcacatgatcttcactctggtttttgtgcgcacataccataaatatggctcaaacaggttgattaagctcctttcttggtttatggctgtaattcagagtcttcttataattgcttctcgcaagcactacactgtcgatgttgttgttgcttggtacacggttaatttggttgtattttttgttgataacaagctgccagaaatggcagaccgtacaaatggattgtctctgcttccagtaagcacaaaggataaagacggcaggatgaaggaagaactccataaacttgagaaggacgggaggatgatggatgagttccataaattgttaaatggaaactctatcgatgctacagattggcgacaacgagtgcagatgaatggaaagcacggagaagacacgagccacactgtcgctgatgccacctctgctgggacatgaccagcagcatttctctgtcaatatcgtcttcaatatccacagatggaatctgcgagcaaaaagaaaattgtgtggtgtgctgcctctatcattgtgtgatgaaaggcttctcaggtacccgcgaggttgcgacattcataacagagcgttttgttgtgctttccatggcacgatgacagtctgttgaagtagtaacggaatcaggaccttttcggcttttctatgaggccgcagctacagttttgcatccttcagacgtttcagtgtcgatgatgttagagagggagattgatgtttgatgtaaatattgattagattcagctgtggcaatgggtaatgaacgactaacttatgctgattggtaatttaacgtgagcagctgttatgaccgcttt

SEQ ID NO: 26819 - DNA, 1324 bp, Zea Mays
agaagcgcgtaaggattaaatccagcgaagtgttcaccttcttcaacttgaactccttgtggtccggactgacgaatcggggacggagattcacatcaacgcagatgtggaccccacgaccgagtcgtcgcgtcgtctcctccgcttccgacactctcctgctctgcctcctcctgcttgccggcgccgccgacgccgcgccgctgctcgtaggcgtttttcccaaagcttgtccagaaggcaagttttactgcagaaatatcggagatacccctcgattgttgttctcttcgtttgtgaatgacaaaatttgcgattgttgtgatggaagtgatgagtacgaaagtggtatccattgccagaacacctgtagaaatataaaggatactgctgaggctgatggtggtggtggcgacctcgcagtaacacatttagattctactgatgattttatgagtaaacatgcaattgctatggaagaccatatccagaacaacagcaacagagaccttgtccagaagataagaggattgagaacagccctagttattgagctgggccttgttgtatgtatttttgctttttgcattgctcggcgtcgcactagaacacgcaggagacagcatattttgaaacgttagctgaacagtagtaatatacaaagacgatagatcggtgctcatttgcaaacattaaagcttccggagatggtggagaatcagagatgggatgaaggagcctgcacgtcatcctctttaaatcacgaggtccatctgctgttctgaactttgtagggtaggaaaattaagtatgtactccctctagtcgcagaaacttgtcatttaggacagatatggtcaaacctttaaaagtgcaagtatttacattatttactttggaaccatgtaggtctaatgtcgatctgcattcgagattcatgcaaaatctcttatatcggaagggttttaagaatatattctagaatagtggtaaaaacatgcactgaagatcgtgcaaaatcaaatgtgtcaagttgtgaccagatggagtgtacatgtttaacataaataacttaattgttgtaactgatttgtggccccgtcgtgcttcctctgtaactatgagttgctcctaccaggaggaattgacgatgctccatgcctgaaccttgcaacttgttgtatctataatgtttgtctctagcagtgtactctatacctattctatgtgttcgttctttatgatcttctctaaaagattcactctatatctttggtagtagtatcgttctatatatctaaatacttaatattagagacatgtt

SEQ ID NO: 26820 - DNA, 3850 bp, Zea Mays
cagacaggcggacacatacctaagacctaacaaaatcccaaagccgataccggtgacgcggcggcgcggcccaccacggcatcgggcccgcggggcggagggcgtcgctttcgcgagccaccggccgcgcgtacggctccggcaccagcgcagcgcagcgcacgccgggctgcctggcgtccaggcgtattttccctcaaggcaatctccggagagcgacggccgttacgatcagaccagacgtcagaccagaccagaggtgtcgatccgttcccggctcggttcttcctactttcttggacttttgatcgcgtcgcgtcgattagaaactgcctgcgagttaccgcgcgacgacttgctgatgacggtgtgtcatcgcctttccaattggaaaaccagaaaggtgaaagcttcggaatgagacgatggcggaatggaattggctgcagaaagcagcttatctttggcagcgatagtcacagccggagatcccacccgcggcggcacaggtctaaaaggagcaaccgcagatcaactttgccagtgatacgtccgtagtccctgccgaatactcgtacctgctgatactacctcaccacccacacactcccccctcccacgaccaaggttctaaaacttttttccccaagaacatccttgtctgtctccacctgctgacccttgcaaccgcagctataaaaagtacctacgcaggtctcgcgattgtaaaagattgctgcagagaagtttgggaggaacagggttacagtagaagccagtttttgccttttttccaatccctgttcttgcttgtcctggccccgctccttggacttggatttcgatttcttcctgaccatgagtggcaattgccaagtaaaaagctgcgagggttgaagcgagcacggcaagatctgttggttgttgcaggaggcttgccacaggaaggaaaggaggtgccgcttgcggactgtcctgcttgtcctctcacaagacgactccaagccgagaaatcttcgcccaaattctcgctcccccgctctcaattagcgtgcatgggcgcaggaaaggcggcgccttgagctgctgctgcgtcagggggggcgaatggatgcagagagcggccgcggcgccgcgggtgcgcgcaagaagtcatggcggtcagagctggtgctagcctaccagagcctcggcgtcgtgtacggcgatttggcgacgtcgccgctctacgtgtacaagagcgccttcgccggcggcgacatcgagcactctgagggcaacgaagagatctacggcgtgctgtcgctcgtgttctggacgctcaccctcattacgctcctcaagtacgtgctcgtcgtcctgcgcgccgccgatgacggcgagggcggcaccttcgcgctctactccctcatatgccgccgggtccgcgcggggctcctccctggcgtcggcgacagcgctgtcgacgagctcaaggaccagcccgacggcgcgctgccgccgccagcgtcgagcgtgcgcgcggcgctgcagcagcgcagggagctgcagtggctgctgctgctgttcgctctgctcgggacgtccatggtcatcggcgacggcgtgctcacccctgctgtctccgtgttctcagcggtttcggggctcaagctgtcaatggtcaatgaacagcaccaatatgttttgcttccagtaacatgtgtgatcctggtaggcttgttcgccttgcaacacttcggcacgcacagggtcggattcctcttcgcgcctattgtttgcttgtggcttctctgcataagcaccataggggtctacaacatcttcatttggaatccccatatctataaagccctgtcaccatactacatgtaccgatttctccagaagacacaagttggaggctggatgtcactgggtgggatccttttatgtgtaaccggttctgaagctatgtatgcggaccttggacatttctctcagtcttcaatcaagattgctttcacagcggtagtttatccgtcactcgtacttgcctatatgggacaagctgcttatatttcacggcatcacaattttgagaggaaccaccatattggattttacatatcagtacctgaaaagatcagatggcctattctggggattgcaatccttgcagctgtagttgggagccaagcagttatcactggcacattctcagttatcaaacagtgttgctccttgaattgctttccaagggtgaagattgtgcatacatcctccacagtacatggccaaatatacataccagagatcaactggatcttaatgatactgtgcttggctgttactataggcttcagaaacacgaaacagatggcaaatgcacaagggttggcggttataacagttatgattgtcacaacttgctttatgtcactcgtcattgtcctttgttggaacaagaatgttgtatttgctcttgccttccttcttttcttcggtgcaatcgaagctgtctacttctcagcttccctgatgaagttccatgaaggagcttgggtgcctataattgtttccttcattttcttgactgtgatgtgcgtttggcactatggaacagcaaagaagtacgaattcgatgtggaaaacaaggtctcaataagttggcttctgaatttaggctcttcgttgggtattgttcgggtcagaggcattggcctgatacatacagagcttgtgtctgggattcctgccattttctcccactttgtcaccaacctccctgcatttcatcaggttctggtcttcctatgcatcaaatccgtttctgtaccacatgtccaacctgaggagcgatttttggtcggacgcattggcctgaaacaatacaggctataccgggtagttgtccgatacgggtaccgggatgttcaacaggacagcctgcagtttgagaaggccctagtgagcagcattgccgagttcatccgctcgggggactcggatcaaaacggttatccggatggctcagagagtccgtatgagaggttgtctattatcagcaaaggcctgccatttcaagaggctgacggtgacggatcaccatcacctgaatcatctgctcggaaggatacaaacccaatcttagtatcctccaagtcgaggagagtgaggtttgtgctcccagaaaatgcgcagatcaacagccaagtgcgcaacgagctgcaagagctgactgaggcaagagaggcaggcatgtccttcatcatggggcgctcgtatatgaaggcgaaaagtgggtctagcctgatgaagcggattgccataaacttcatctatgagttcctgacgaggaatagccgaggtcccgcctacgcggctaacgtgccacatgtttccacccttgaggtaggaatggtctgccaagtctgatagatatgatatcactgtggccatgtcacgttgtatagaggtaaaaatagttcttatgcctgtacactcacacatatatatcctaactaacaaaagagttagattgtgttgatgaagcggggcatgcatcattgtggcctgcgagtgcagatgttggatagacaaagtgtgcatagttttgtgttttctctataatatattcttttgtgttaggctcttccttgctctgctttgtcaatataccaatgccactgttgctatgtgctatagttacagagtaggagggaggccatttttgtgtgcataaattggcttgttgccaattaattgtatgtactgtatcagaatctgaataagtttatgctgaaattgtttcatccaagttctgagagggggctgaaaattgctacttgttaccatggcagtgatttac

SEQ ID NO: 26821 - DNA, 520 bp, Zea Mays
acacttggcattcattgttcactgtaaaggcatttagcaacagagctcaatgccacatctatctgggagctttccctcaaggtcttgaggatgcagagaaatgtgttgaactggatccaacttttataaagggctacgtgcgtaaagctaaagttcagttcctgatggaaaattatgaaaatgctatggcaacttacctagagggtttgacgtacgacccaaataatctggaggttcttgatggcttaagaagatgtgcagcatgcattaagagggctaatgggggtgatgttgagcttgaggacttgaaagatatgttgggaaatttccaatcagaaaataaccttcttaaatttcgaaaagcaacagaacaagctgcaatactcaagaaggaagcttctgatgagcgtttgaagcgtattgaatctgaacgaatgtagtgctagtgctgtatatggctggtgggtggatttagtaatctgatatatttagtgcaatgatatgtagctatcctgcaata

SEQ ID NO: 26822 - DNA, 664 bp, Zea Mays
tggctaccactacttcgtccaccacctgatattttgtgtcaacaaatgcaacgtccacatttcgttccatagtttcaagttatcctggacggttgactcttgtcacaatacagtgcccaaatcctgacttcaacaaagagcaaaataggtggagaatggtgcgaagaatgctcattgaagctatcgtcgaccttcttcataccaatggacaggtttatctgcagtcagatgtggagtccgttctgctcgtgatgaaggagcagttcctctcctacagcaagggtcagcttgtcacggacggcgatggtggcaactgcatcgataacccgttcggcgtggtatccgactgggagcgccatgtcctcgctcgcggagctcccatgtacagggcgatgttaaagaaaatgtgattccatttcctccgtctctgaggtctgaacattgcattgttttgtcaccatggctgcttcggacatggacaacgttcatggattcactcggttagataaaactctcttcttttcggagaaaactacatgacaaaaaaattgtgtggttaaatcttaaaatcgaatcaatccaatgggagaaacgcatatcttcccaattgtggctatgtcatctgccgccggagaggccgatgtcagacatggtggcaacgctt

SEQ ID NO: 26823 - DNA, 3569 bp, Zea Mays
ctaacccttgctgttcgctcgctgttcgccccccagccgccaccgccagttcttccattcctccgcgctctttgagccttcgtctcccagtctcctcaactcagttgagttcctctcggacgctggttgtctccttcgacctccgtttccttgtcatttctgtgcctgacagcaacccgcgctcccgccgcatctattcatggcggagccgacccccaagtcgaagcgcaccaagaaagcgaagaagccctcggcccgggaaggtgatggagaggacatggatacgctcaagtctgacgtcgccacattcgcctcctccctcggcctcctccctggcgctggcgactccaacggcggcttcgatgactccgacttccgcaagtccggccccatgtataaatcctcaaaatttccttccaaacaaccccatcaaaaacctgataacacggcaaacccccatctaaaccctagacctaccaagaagccacaccctctcgagctacgtgactcctatgctgccaccaaacctggtgctgtcaacactaattaccccctgatgaaggcggcagcactctcagggcagtggtacactgatgctgatgagctggaggcgagggtcctaggcggtcgtaagcaggtgcctccagctgtggggcttcaggagatgcagggaatagtggagagaaaacgagagctggcagagaagctcatgttgcagtatgcgagggaatacgatgccgtgaggcgagggcatggtgacctgaagctcctggacatatcagcaaagtctggtacatcagctgacaaggtgtcagcatttacatgtcttgtcgaggacaatccaattgcaaacatgaaggcactcgattccctccttggtatgataacatcaaaagttggtaagaggtatgcgttcacaggattcgatgcaattaaggagttatttctcatgaggttattgcctgaccgtaagctgaaaagtcttatccaacgcccgctagacattttacctgaaacaaaagatgggtactcacttctgctcttctggcattgggaggactgcttaaaacagagatacgaaaggtttgttatggcattggaggatgcggtaaaagatatgctgccaaatcttaaggacaaagcaatgaagacagttttcatgcttttgaaaagtaagtcagaacaggaacgtcgtttgctcacagctcttgttaacaaacttggtgatcctgaaaggagagcagcatcaagtgctgcatatctgttaacatgtctcttggctgctcaccctaatatgaagatggtggtgatagatgaggtggattcttttctcttcagaccacatgttggacttagggccaagtaccaggctgtcaatttcttgagccagattcttcttacaaacaagggagatgggcctaaaattgcaaaacggttggtggatgtctacattgcacttttcaaggtactaatgagctctggtgataccaaaggagatacatatagcaaggacagcaagaaaaaggtaggaaaaatagagggaggaaataacaagatggactccagatccaagggaaacaatgaagtgggttcaacagcaggatcagatttggagctggactccagaatcctttctgcgcttttaactggtgtaaatagggcattaccatatgttgcaagctcagaagttgacgatattgtggaagtgcagacacctattcttttcagattggttcacgctgaaaatttcaatgttggtgttcaggcattgatgcttttgttccaaatatctataaagaataatatagcaagtgatcgtttgtaccgtgcattatactcaaaactcttgagtccttctgctgttacttcctcaaagccagagttatttcttgggctgttggtgaaagcgatgaagaatgatgtaatgttgaagagagttgctgctttctcaaagcggctgctgcaggtggctcttcaacggcctcctcaatatgcttgcggatgccttttcattctgtcagaagtccttaaggcaaagccaccattatgggggattgtgctccagaatgaatctgttgatgatggtgatgaacactttgaagacattttagagattcccgaggactcttctgttgcctcagcagtgctacataaacataatgaaaaagtagctgcacatgagaaacacaaccttgatgctgctgatggaattgatagtgtaaaacaagtaaatttggtagatgagaacaatgcatcaactgactcgtccagacaacatgcattctatgatccacgacacagagagccttcttactgcaatgcagatcgtgtcagttggtgggagttaacagtattggcttcacatgtgcacccttcagtttctactatggctagaacattgctatctggcaacaatattgtttacagtggtgatccgctgacagacctatcacttcctgctttccttgacaaattcatggaaaagaaaccaaaagggaaccgcatagctgaaggaagatggcatggtggatcacaaattgctccggctaaaaagcttaatctgaatcatcatctcatcggagaggagcttctagaattggcagaaaatgaagtgcctcctgaagatattgttttccaccgtttctatttgaacaagaccggcactgttaagcgtaagacaaagcagaaggactcagttcttgatgaagatgcgggggaactcttagctgataatgacgctgatgaggctagtgacgagagtggagatgagatactggatctgggagatgggttggcagatgatggagaatatgactatgacgaccttgactcaaatgcatttgaagaggaaaaagatttacttagagatgacagtgatgtggaatttgatgacgtttcagatgatactgcatctggggatgaagggtcagaaaatgacgatgacattcctattctcgcgggcgattcagatggcaacttaagtgatgacgagatggttgatgctggtaagggcggtgtctcttacacaaagaaaaggagggcagggaagaagagtgggttgtctccatttgcaagcctggatgattatgagcacctaatggttggggatgctgatgcaacaacagcaaagcggaagcacatggcaacagggagagctggtggtgagaagaaaccaaagttgagaccacgaaagaaaaggtcgcggagttcagaatgagaaacatgccttttacccttaactcttttaaaatgttcaccacaatggtgttcattacatttttgtacttctggaaggcacaggattgggtaacgctattgttgagccgagaatgtattgagattagattatacaggtgctctcatatagtagtccttatcccacacaacgcatttatacgggctaagtttaagaccaactcaaagagttgtttttcttattgagtcaaattttagattttctgagtaagaaattattctccaacaggtattctatctagagttgtagattagctagcaaaggcatatcgtcctttccacttgctaagccagtcctaattttcctgtctcag

SEQ ID NO: 26824 - DNA, 314 bp, Zea Mays
attgtgtatgtgtgctgttttgtttttctttgtgggaggaaccccgtgtttgcgtggaggagaaggcaagtcgttcaacgctcgtcgatgtcatagcgatgcacaaatcggaatcaccgtcgttcttgcaaacgctgattgggtttgtttatggtgagccatgtcgctctcgattgactcgattaataaattatatagatgcggttgaaatgttttggcggtaggtcgtaatatggtcgtgctcatgatttcgagttagagattggtggtcgtcgattcgtataaattggtcgatgtggtgcgtgtttaaaaat

SEQ ID NO: 26825 - DNA, 4111 bp, Zea Mays
agtagtgctgatccagtgaacctatccacaccaacttgattacagtctctctgacacaactatggcgccctctgccgctgccccaggcatctctgaggctgagggggcaccacgcatggccaagttcctctgcagctttggaggtagtatccttccccgaccacttgatggctgtcttcgatatgttggtggcgagacaaggattgtcatattgccgcgtgacatatcatatgccgacctagctgcacggatgagagatctctacaaggatgctgataccatcaaataccagcaacctgatgaggatctggatgcgctggtctcggtcgtgaatcacgatgatgtggtgaacatgatggaggagtatgacaaagtcactgccacaggggaggcgttcactcggctcaggatcttcttattttctcagcaattggatgacaatgctgcatcagtggctgtgcattacaatgtagacgagcgggaaacagagagaaggtatgtagatgcgctcaacagccttggtgatgttaggtcaccttcctcccctgtatctgtggagcagctttttggcatcggaggcaatgattcaggaattcctgattttgctggcttgagacatttgaatgtccctcgtccatcacatggtcagaggtatggagagatggattctccttggagccctgcttatgtctcaccaagccagtacagagtgcatgacccgagggattttccaatttcaccgtcatctgcaaggttccaagtaggagcggaggattttgatgacaggattcctgacgactttgtaaggcagtcaccaaaatatcattattatgaggctcaatcaccatcacatatggataatttagtctggcttccacctggtgctgtaattcagcaaaatgcaggtttccctggtgatttgagcaagcacaataaatttttggatgggaacagtggatgtgatcactgtggttcactattccacaagggtcagggttcggtgactgatcctatctatatgaatcctcgttggactcggccagtccaacaacattttgaccaaccaagcatgattaatgattatcccggtcaccatgctaattcttgtccagattactgccgccctggtgagcattatgcgggaggtcaagatgttagattggaaaatggtgtttatgttaaagagcaaaatggtggtcatactcccatgctttataatgagtcacgtcctcacgatagagtctggtatgcgcataccaaccaaagtcatcagcggtatgaggatccaaggctgcattatcctactaatgatagagtgatcgagccatacattgtcgatgctagctctgtaaattccgcatttgcaccaaacaaagtatatgaaatgcattcagcatctcttggtcattctagttctagccatgaaagtcctcactattttcatggtagcagtgagctcataaatgacgcatatcacaaccaacaagttggaggcagtgggtcatatgtgcagccagcagggtctgaagaatcccctggtcagcattacaaccacttttcggcctatggtgcagattccttttatcaaatgcaacaaaatttgccacccattcaatctttgaggaggagagcgaacagtcctgttcacactgcctcaccatatgattccccacacctgccaataccaaatgggagcattaacatgaattctgttagaaatacaggtgatgcgagtcccaggatagcaggtcttattggatatgatcgaatgccaaacccatttactccgcccaatggcagcatactatatagagttggtgggcatgatgttcctgcagctatggagaacactagtgcttttggtcctaggtctaatccaactgctgctcagtatgttcagccttttattgctcctgaatcaatccagcatcaacctggagttcccttgagggaggtttatcctgaaagagcataccctgaacccatgccgtcatcatatgctgatggcaaagtagctgtttctgcattgcccctcaccgaccaattattcaggttggatataaacacaatgaagaaacttgaaggacaagatgatgggaactctactcgaaatgtgaatgaaacaactcttttgcatgctgtggatgaaccaagtaccttaccccaccatgttggatctgtacatgaagtcgatcctaagcaggagaagctaaccgaaaaagaaagcaggcaaaagcaacatgaagctggggctacagcactgcaggaatgtgaggatatttcagaggatatgttgaatttccttcctgaattaattgcctctgttaaaaaggtaacactggaagatgctgctgagacacaaatagcccaatcagatgctaatgctgctgtttcacctgttcctgatgatgacgataatggaaagaagctggatgaggcaacagctggtaatacaaatgcaaatcaggaccttgatttgcaaggaagccttgatcggcagaagagtttcaagattgagtctacaactgctgaagctgaagctttgtcgaaaggactacagactataaaaaatgatgatttagaggaaattagagagctgggttcaggtacttatggggcggtctatcatggtaaatggaggggatgcgatgttgctattaaaagaataaaagcaagttgctttgctggaagaccatctgaaagagagcgtttgatcacggatttctggaaagaagctctgatcctaagctcacttcatcatccaaatgtggttgcattttatggtgtagttcgtgatggtccagatggaagcttagcaactgttactgagtttatggttaatgggtctctcaaacagttcctgaggaaaaaagacaggacaatagatcgccggaagagagtaatattagccatggatgctgcatttggcatggaatatttgcacgggaagaatatagtccattttgacctgaagtgtgagaatctactggtgaacatgagggatccacagcgaccaatctgcaagatcggtgatctcgggctatcaaaggttaaacagcatactttggtatctggtggtgttagaggaaccttaccgtggatggcaccagagcttctgagtgggaaaaacaatatggtgtcagagaagattgacgtctattcgtttggaattgtcatgtgggagctgcttactggggaagagccatactctgatatgcgtgctgctgaaattattggggccattgtaaacgattccttacgccctcaaatcccttcatggtgtgatcctgagtggaagggattgatggaaagctgttggtccagtgatccagcggagagaccgtccttcactgatatatctcaaaggttgaggaaaatggccgctgcaatgaatgtgaagtgaaggttcggaagccatatttgtcttgtaagtgttcccacatccagtataagtgattacaagaggaaggtagagttcaaacaggattgatttgagtaaatatgcccaaaatgtcttggcagcatctcagtttaccctactccaagtgataattttattatgtcatggagattccaaagcatgtttgatgcgagccagctgttgggtttatttactccttgtatgaccattagtaaaagggaaaactgacgtttctgcttacctgtttcaggattttccttagtcctggagtaacccggctgtcatttgccttgtgtcgaaaataagtatgctataaagcgttctgtcttgatgggaactgttgggctgtaattgtaaataagttttgacttgcttcatcttgctgtgcaaagtagtaattaataggcacgatcaaagctgggcacagttatcttttccccccatacaaaagtgtgtcctaggactaggaggagagatggatcgaacacgactagagctgtacatagtatactgtttgctctgtatataatcatcacttcctatttgaatgctcataagtttgcacagtcccttgtggtcttcctgttgagtcctaatcgaccagggtgattggtgaagccactgtctatccgaagagaccattgagccacggtgccacttgcatgacattgctgtgttccattgtttacc

SEQ ID NO: 26826 - DNA, 1860 bp, Zea Mays
cttagagcagtatggctcgatgtgtgagtgctggtaaatagtacaaaactgaagagccagttaagctttgggtgaataaagttggcccttacaataatcctcaagaaacctacaactattacagccttccattttgtcaaccgtctgagaaccccacacataaatggggtggtcttggagaggtccttggtggaaatgagctgattgatagtcagcttgaaataaagttcttaaaaaacgtggagaagggcttcatttgtacacttgagcttgatgctaaaaaggtccagcagtttgctgatgccattgaaagctcatattggttcgaattttttatagatgatctgcctctttggggttttgttggggagtctgacaagaacagtgaaaacaagcattacctttacacacacaagaacatccttgttaaatacaatgataacaggataattcatgtaaatctcacccaagagtctcctaagcttcttgaagatggcaagaaactggaaatgacatattcagtgaagtgggtagcaacagatgtgtcatttgcacgccgttttgaagtgtacctggactatcctttctttgaacaccagattcactggttctccattttcaactctttcatgatggttattttcctaactggtttggtttcgatgatattgatgcggactttgagaaatgattatgccaagtatgctcgtgaagatgatgatctagagtccctggagagagatgttaatgaggaatcaggatggaagcttgtccatggtgacgtatttcggcctccccgaagtttgatgtttctttctgcacttgttggtatcggcacccaattggcagctcttatcctacttgtgattgttttggccattgttggcatgctatacattgggcgaggggctatcatcacaaccttcattgtgtgctatgctcttacatcgtttatttctggatatgttagtggtggtctttactcaaggagcggtggcaaaaactggattaaagcgatggttcttacagcatccctctttccgttcttgtgtttttcaattggtttcgcactgaatacaattgctattttctaccgctcattagcagcaataccatttggcacaatggttgtcatgtttgtactttgggctttcatatcttttccgttggtgcttttgggaactgttgttggtagaaactggagtggtgctcctaacaacccctgccgagtaaagactattccacggcctattcctgagaagaagtggtaccttacaccttctgtcatctcattgatgggtggcctgcttccctttggcagtatcttcattgagatgtacttcgtgttcacatcattctggaactataaggtgtattatgtctatggtttcatgttgctggtcttcgtcatccttctaatagtcaccatctgcgtcaccattgtgggtacttatttcttgctgaacgccgagaactatcactggcaatggacgtcgttttcctctgcagcgtcaaccgctttgtatgtgtatctgtactccatctactactaccatgtgaagacaaagatgtcaggcttcttccagacaagtttctactttggttacacactgatgttctgccttggtctaggcatactttgtggttttgtggaagtcagtggaaccattggaatgctttgactcaagttggagaggaaagaaggctctaggagatggctggggctaaggctgtctacagcaacgtctactaaattttgtcccctaaaagaatattctctgtactttacaaaacactctaaaagattctgtactctatatcatctcagtctccaacaacgttccttaaattcggttctct

SEQ ID NO: 26827 - DNA, 3790 bp, Zea Mays
ctttcttgccgtgcccccactccgctcgattctcgactctagtcaccccgccggaccgccgtctcacgttctacacccacccactcctgactccgacgacgccgttcaaacccacgcaatccagcagaggagaccatctccgccgccgacgacgccgttcaaaccctagccgatccgctggctctgccatcgcaagccaatgccccacaccgaaccctagcaacaccatagtccttccacaaccggtgcgaacagtactgcccgaatatggcggccgaacccgccgctacggccgctgcttcggcggcggccgctatctccgctgtcatggactggcgctcctcccccgacgcccgcgccgctgccttcgcgtacctcgaatcagttaagagtggggacgtccgagccttggcaagcacatcatttttcttggttcggaaggaccagacgtcagagatccgcttgcacgggttcaagatgttgcagcacctggtaaggttgaggtgggaggagctcagtgctgcagaacggaatgaatttgctaatatgacaattaatttgatatcggatgttgttggccctcatgaggtgtgggccttgaagagtcaaacagctgctttagtagcagaggtggttcgaagggagggagttgatttgtggattactttactcccatctattgtttctctctctaacaatggccctactgaggctgagttagttgccatgattctaaggtggcttccagaggatatcactattcataatgaagatttggagggtgataggcggagatctctgttgcgcggccttactgagtcactgtcacaaattctgcctctgttgtattctctacttgagaaacattttggtgctgctttaagtgagcatgcgaagcagcaaatggatttggctaaacaacatgcagggacggtgactgcagttctaaatgctgtcaatgcatatgctgaatgggttcctgtgacagatctagccaaatatggtttaattcacggatgtgggtccttgctttcttacagcgattttcgcctccacgcttgtgagttttttaaagtgatatgtcagaggaaaagacctgtggatgtggcagttgctgagtatgatgctgcaatgtgcaacatattccaggtgttgatgaacatttcacaacaatttttgaccagatctggcatgcaacccagttctattgatgagagcgaatatgagtttgcatcatgtgtttgtgagacaatggttgctctaggatcttcaaacatgcaatgcatactagccgatggagccaggactttccagttcttacaacaaatgctggagtattaccaacactacaaaatcacacttcatttccagtctctattattttggctggtggtattgagagaaccatcgaaatctaagtctattgcacgtgtttctggtgataattctgctgctggtaattctgcatctactggtgacttatcaacagaaaagaagaaaggggtatcggtatttgtcactgatgaaatatacagtacaattttggatgtttctttcaagagaatgctgaagaacaatggaagtgcaacttctgggttgttagaaatatggagtgaagagcttgaggggaagagcgacttctgcaactaccgcaccaaattgttggatctcattaaagtcattgcttctcaaagatctgtgattgctgcagcaattgtagttcagagaataaatgttgtctttggagatgctaatcaagcaactaagtccccacaggatcttgatgcaatggaaggggctcaactggggcttgaagcagttgtcaatgctattttcgatggctcagttgattgtgggaaaactgatttggatacgaaatcccaactgcacaagatttttgaaggcttacttcaacagcttctttctttaaagtggacagaacctaaccttgcagttattcatggtcattatttggatgctttgggccctttcttgaagcatcatccagatgcagttgccagtgttgttaataagctttttgaactgttgacgtctctcccaatcacatttcaggatccatcaaacaattctcgcctagcaaggttacagatctgctcatcattcattcgtatatcgagagctgctgataaagcacttctgcctcacatgaagaacattgctgataccatggcttaccttcaaggagagggtcgcttactacgtggtgaacataatcatttatgtgaagcgtttcttgtgatgtcatcctctgctgggattcaacagcaacaagaagttcttgcttggttacttgaacctcttaataaaatgtggactcaagtggaatggcaaactgcatacttgtctgatccttctggcactcaagagaagtggaaccaaaaagtcttcagcaactccacaagcacccaccacaacagtacctggttatctgcatccgatgtcttcacatctagcatggattgtgccccctctcttgaggctgctgcgatgcatacatgtcctttggtctgagccatttgcccagtctcagacggccgaaatcaaagcagcaaaaagcatgactgttgcagagcaggctagccttctaggagagacaggtaaacttaccaaaggtcaggttgctccagctgatggtttgctggatgttcaaagagatggagaatctaaagaaaacaatataaaaaactggttgcgtgggatccgagacagcgggtacaatgttttaggactagcagctactcttggggaagcattctttcgatgcatagagggttcttctgtcacccttgctattatggagaatgtgcaagttatggagtttcggcatctgcgccaacttatccaccttgttattattccatttgttaaatattgccctgccgatttatggctgtggctagtgaaccttttgcagccgttatttgtccactgtcagcaagctcttaattattcatggtccagtcttcttcatgagggtcgggctaaggttcctgacagcattggtaatctttctgggtcagaactgaaggtagaggtaatggaagaaaagttgctacgtgacttgactcgtgaagtatgttctgtcctttgggctttatcatcaccaggcttaaataatggacttccatccttggaacaacttggaccttccaaccggatggattctgttttgaagaatctggagtcctttgcttcaagttctctaactgggcaacagtactcgttccatcgcatgttgttgcattgtccaagcaagcctgaaacgaagtgacacaaagctgtaaagtatagacgagccgttacctttggaggacaccagggacaagcgctattttaacggatcctttggcgcatgctgctggagataaaaaggacacaagcacacgctaaatatagaggagaggagcatatagcgcaccttgctggagagagcctaaaactggtgttgggcagttgggctattgggttgattgattgtgggcttttttctttttatttttttcctgtttttccctactactaggctgaaatggacctactagacttgtgctagcttgcttattaatttcgaattagtgttatataaataatatttggtctaatctttcgcattactatataattataatatataattaaggcgtcgcctcaacttacgccttaccgcctaaaaggtaaaaaggggggggggggcgctcgccttaccgccttaataactatggttgggttttttattcctcatggatttgtttctttatgcttgtttctg

SEQ ID NO: 26828 - DNA, 2042 bp, Zea Mays
  misc_feature (2042)..(2042): n is a, c, g, or t
gtgattcggcccattgtagccccgagacagcgtccgcctacggcctatccgcgtcagcccgccggcgagtcgcgcacgagacctgcgaggcgcgatggcaggccgcggcggcgccggccggcggcctcgcgccgtcttcatggccttcggcactcagggcgacgtcttccccatagcagcgcttgctgcagcttttgcgtgtgaccaacaggagtatgctgtggtgttcatcactcattcagcgcaccggagtttgtcagcacatctagcagccagcagtgttagatacatgcctgtgtcaagcccgcctgtcctcgctgccgaacagttagagaatatctcaagtgattctattcaatcaaaccatgagcgtgagtccttttcaatgcggaaaaaagccattcaagcggagcacaggaaagaatgcttgtcttttgtggaagaagtttttggaaacgacccaagcatcagtggggattttattgtgatcaatttcttcgctttggaaggttggcaccttgcagaactattccaagtaaagtgcgtcattgctgctccctattttgttccatatagtgctcctacatcattcaaacgccaatttaaacaaacttttcctctactttacaagtactttcaagaagctcctgcaaatacggtctgctggactgacattatccattggatgtgggcactcttcatggaaagttggggatcatggagaaatgattgtctgaatcttagccccattcctttcacagatccagtaaccaatcttcctttgtggcatgtgcgagaggagtcacctttattactgtatggtttcagcaaagaaattgtggagtgcccaggatattggccgttcaatgctcatgcttgtggcttttggtttctacctatggattggcaattttcttgtgacaaatgcatggagttgtctggaaatatcaattcttcatttggtggtatgttgtgtgcaaaccattcttccctggaacacttcctcacaaggaatgcttattcatcaagacctatatttgtaggattaagttccattgaatgggctttcttagaaatcctaaagcatttttaatggtgcttaaggctgccatagagtcaacggattatatgttcatccttttctcatctggatacaagccattggattctgcaattcaatctattgcttcatcagtaaatgaatcaagaggggtggattcaccttctcttggtggtgacagcgctctcctttttaatggccgccttttctgctttttagggtgtgcagccgctattcaccatgctggcagtggatcaacagctgcagcactacttgctggtatccctcaggtgacaacaacactttctacagcttcaccccatgttttgaggctgtctttctgctgctcttttcttgtccttttatttattcgcaacctgtgatacctggatgtgtaggaagcatcaagcctggtaattctataacccaaaaaaatgttctgatgccgactcaaacaaatacgttatctcccaacttctgcattttcttgatgatgctttgagatggatccattgtactaaattttttcgtgcaggtaacatgccctttcatgatggaccaattttactggtcagagaggctacagtggttgggagtggcgcctgaacccctacaaagacaaaatctagtcccagataatgatgacgccttgagcatccacaatgctgcagatgtgctagttggagctatcaggtcagctttatcgccggaaaccaaagctcaggcggccagaattgctgataggctttcttctgaggatggaattggagaagccctcaggatattgaaggcgagagtgttgactcagaacaaaatcatcagctcattcatcgcaagtaaataattagtactgatatgatatgaggcattgatttaaaccactaaatttaagaaatggacttctaatgcaccgccccatgtaagatagagtaatttctcaaaccaatcaactttacggggcgtttggatccctttattttan

SEQ ID NO: 26829 - DNA, 598 bp, Zea Mays
gtagaaggcagtgaaggcaaggtacagagtgttagggtcatctctcccgttagcatgaaaaaaatgccagtgttacatggaaatcccatttgaaggcagttgaacagaacccagcaaagaaagtgtgggaaaaaaaaactttctatagtttgggacatctcaaagtcatagatagctacggggaaggcaagaagaaccagagccagtatttttggattcatctgtagtgttaaattttgtagcactgcaatggtttttcaggaaatataattagctggattgagtcaaatggcaacgatacatgatagttttccacgttctgggtatattaaccgtacatcactgaccttatggtgtcagatatgatggcagggtttatggcaccagatagatttttttggacatgtaaaaaatccaattcaggagctcaaaaccatttttaataatttcgagaaatgctaggtgttccgggaaacgaggaaaacactagctgcaaaattgggcatggataaagatattaagttatactccctcttcgttttaaaacggagggagtaataatgattttgacaagctacaatgtttaactaacggatcc

SEQ ID NO: 26830 - DNA, 664 bp, Zea Mays
gaacaagatatggtatatgcatataatatttcaaaccatcacatgcaaagtgaccagactgcatgtgaaattagatatagaaaatataaattagagatatattataaattggtactaacatatgctagccaaagaatacaggcttagaaattagggcaccctgaaaatgaagtagggcagtaggaacttgtagagcagcaatctaaaattatagtgttgtcctctccacagcaggcggtgaggctgaacctgaaacaaaacaccacacaatctcaatctcaatatgcagttaagcagcagcgacaaccacacaatctcaatctcaatgtgcagttaagcaacagcgacataggttcatccgatggacgcaggtaggtggtaaccgatcctcaattttgccgtggccatggaaatagaccggcagaggacgacatggctagcagcttcatcggagttgcatgcctaagaaaatggaaaagcttcatcggagctggtcccacatgatcctagtaagccaaaaacacatcattaaggggaaagaaaaaggccctcaatatgatactatctattcattgagaagaacaaccctaccagtccaacactttcaccaccacatatcaaaaggtgaggtacggtctataaacaaggggatcctcgtccacag

SEQ ID NO: 26831 - DNA, 2081 bp, Zea Mays
cgccgatatgccagtggctatggctttggggccgattcggcgctggagagctgttaaacctctccggctccgccactttcgtttccgtttctgcgcttggtttggtgccgaattttctgcacattttaccaattctgaacgaaaactccctttctgttttgccgactgtagggctgttgaatccgtatgggctatggtcgccgaggcactcgcagtcggacgtgtcttcatcggagatggagtttggtacagcgcgccagtacgacaccaccgacctcttcttccaggaggactggctctacgacgatcacctcttccctagcaagctggacgatgaggacgacgaacgcgaggaggaggacaagtttgtactggatgctcacggtggtgcctcagcgcagacagagataggcaagctcggtgcaggccataaccaccgtcatgaacacatcggtggtgaccgatgtgagggttgcgctgaggtgtacacatgctcatcgccactctgcggttgctgtggagggggactcaagaatgacgggcttcatgtggccaggagctcaagctctactgtgtatgggagataccagatcatggatgaccggacagagacaatggatgattgtgcgcaggatgggtttcaattgaagcagagtggagatattatgtttgaatgtggtatgcagagggatcctggacgaggagatgatgattcagacctgagtgttgtggagaaggagcttcaaatgctcagttcatttgatactgatgctgttacgaatcacggtgtacatgatttcacggacaacggtgacctcaatggcatctgtgacaaaaatccgaaaatcagcattgataaagaatatctgaaaggtcataggatacagccattccctgaaattggtgatcctgatgaagcatatgagtttcgaaatgtaggatcattaaatgcagatgttcaacattctactgctcttgaagctgaggaagatgcggagacaaatattgatcttgctctctctgattttcacagagaatatgaggtatttgaattgagaattatccaccgcaagaacaggactggctttgaagaaaacaaagattttcccattgtgctaaattcggttgttgctggaaggtattgtatcactgaatatctaggctcagctgcattcagcaaggttgtgcaagcacatgatcttcagacaggaatggatgtttgccttaaaataattaaaaatgataaggatttcttcgaccagagcttggatgagataaaacttctgaagttcgtgaacaaatatgatccactagacgagcaccatgtgttgcgcctttatgactacttctaccatcaggaacacctttttattgttactgaactattgcgagcaaatctatatgagtttcagaaatataatcaggaatcgggtggtgaggtatattttactttgcctaggatacaggttatagctcggcaatgtttagaggccttggtttacttgcaccatttaaggatcattcattgtgacttaaagccagaaaatattcttatcaagagctacagtagatgtgaaattaaagtcattgatctgggaagtagttgcttcttgacagacaacttatgcctctatgtccaatctcgttcttatcgagctcctgaggtcattcttggcctaccttacgatcagaggattgacatttggtctcttggttgcatcatttctgaactgtacactggtgaagtattatttcctaacgagcctgtgtccatgatgcttgctcaaatgattggcataatcggcccagttgacatggaaatgctagaattgggacaggagacacagaagtatttcactgatgattatgacctttttaccaaaaatgagatagtaaggctaaatgaatattctttaattgcaaaatctatattgcacgagctgcttctgattgtttccttcgccttcataaaattcattagctaccagttgcctctcggaagttatttatttcctacggtttgttataaaagctgtaggaagttaaaaaaccgtaggaagtgtatgattttggtgtagtgt

SEQ ID NO: 26832 - DNA, 3375 bp, Zea Mays
cccgccaagccgcggccgcagcgcagcagaaacgcaaaccggccaccccacccccactcgccgccccatcttcgctccgatccatccacgccgccgcgaccggccccagagcagcaccttctcgccgccgatacccaagcctctgcccgcgtggttgcgcctccgcggcggcgccggcgccgtctgggagcgcggctcgggcgttcgaaaggcgccctcgcgcgcgctgtttcgtctagatccgatccagcaatatttgttgagccgaaggcaaggacagttttgatgggcccatcaaagggttctcgaactattaacaagatcatagtaaaaggatctgaatatcaacagcagcatgatgatccatctagttcaagcaaagctaaacagaaaaggaggaaactctcagactttgatcccaaatggagcaaggatgaacttacaaatttttatgaagcctaccgtcaatatgggatggactggagaaagatcagcatagcgataggcactaagtcatcggacatggtgcagtctcttttcactttacatcggactttcttatctcttccagaacatcaagccactgccatgggatttattgcgctggtgactggtcatcacaatgcttcggagaaaaccacgactcatagaggatatgatcacgtagtcagagcatctggaaaggcaaggaaacatggtgaaaaaccgaaatcaattgatggacctgacctgcccaactgtcaagaagcgaaaatttctggattttcagatttattccagagtcgatactatggcgaattggtcaggtacatccgaaatcatgctgttcggaggcgtactcctcgtataccagctatagtttctgcagacaggagtaccattgatgaggccacaccaggaattgaaaatgtcatcagttctaccaagagaaaatatgaagcagccaataacgactctgctattgtcccaacaaataagtactctcctgacagagtttctggcttcgctgaagcacacaaggctggtcaagatcattgtttgttggagaccataggaactgggcatgtagcgacatgtcaacaacattcaaagaaaacaagaattcagcaaactatggaggaaggtcagactggtgtagttgatcatgagacaacgatggcatctaaagaagggaataagccagttgatttattaaacaacaatcagttatttatcgacaatatttctgaagatgatatgttggtcttggatgtattgtgtagcctgatgaatgcaccctctaaaatgccaaaactagagattaatattccttcaggttcggttggaaaaactgactctacgctatctcagagaagggaggaaggccaccctaccattgatttatctaaacaagggaagccagttggtaaatccagtgcttccaagactaggaagaaaaaatataagatattagacgcagaggtgcctgctgtagcacaaaacgtttgtggtaatagtttagccctgccggaaacactgagggttgttatcactgatgattcttccttgtgtactgactctggaagagtggggataccggaagcatctgaagatattcctgctgaagttcccagtgcacaaacagaaaccaagcctgaagtgagaatgtctggaaggaccagacggaaatctcaaatgcattgcaaaacaaagcatatgtcatgcaatgaaggttcagataatttacaggcaaaaaaattgctgcactgtttgtcatccgaaccacttcgtagatggtgcacatatgagtggttctacagcgcagttgattatccatggttttcaagtaatgagtttgtgcactacttagatcatgcaaaattgagtcatctttcaaggttgactataccagaatggggtacaattcgaagctcccttggtattccacgtcgattttcaaattattttctggccgtggaaaaagaaaatcttgaggattatcgggagaaagttagaaaaatctatgctcaactcagtgatggttcaagggattttctacctgcagacctagctagaccattttcaattggtcagcaagttattgttcgtcatccaaattctagggaactttgtgatggcaaagtggtgatgatgggtccggattgttacaaggttcattttgatgatcctgacattggtgttgatattgtaaaggacactgattgtatgccagtcaactggctgtataaccgtcctgacaacatgaggagctgcctttcaaatgatgcgtacagcatactggagatggatcacattcctgaccttacagcaagtgagaatgaggatcatgctgtaaacggatctactgtacttgaggggctcaaaagtctgcgcttaacatcagatagacaacctaaggcagaatctattgtaaacagtgaaagaccaccatataggagtacatctgacagccctgcaaaatctagagattgcccagacaataatagtgctggccactacgatgagctagagtcatatatagccgcatttgcagaaagatcactatcacaagccaggcagatggttgacaaagccatgcaggcgaaccctggaggtaatgaggatgaaaaggtatgcacgtcaaatcaagtggcaggttgtgcaggcccaggttttgaacctgcccgtggcgcccaacttccttctgacctgatatcgaacggcatcgccacggttctttcaatcaagagccttagcgactcgcgacatccgtttgctaacgtagcaggcgtcttggatcacgcttgctccatgctgcgtccaagctgtccgcagaacctcgctttgtacgatcaaataaagagagacatcggtatcataaagacccagatatttgcacttatgccaacagcattgggcaattgcagccctcctgtcccgcccatgtaactgggccctgagcaagatacttccgctgccttcatgcaggccctgcagtagtacacgcttcttcctttgctgtgagtacaaaacgcagcgaacttgatgttatggaggaagtcctatgtatatacctcgatggcttaatagtttataggtatacacatattcaggatagttgacatatgattttggagtgaataaagttatgtctgtagtcatttaggatgtagtgaataaagatgtatgcctgcagtaagtggcggacccagaaattggccaaggcctgggtcgaagcgaccaaaaactctaatagtagtatataaaaaaaattgtacggcgaaacaacgttgtcatggatattaaagatgacatacaagttatgatgtagctacttctaaatgtatcatatcaacatcagtgctttttgcttcagaaccttgaaggaaatcatat

SEQ ID NO: 26833 - DNA, 1652 bp, Zea Mays
gataagtccctgatccggtccgatgatcccgagtggttcttcttcgcccccaaggaccgcaagtaccccaacggtagcaggtctaacagggccaccgaggcgggatactggaaggctactggcaaggacaggataatcaagtccaagggcgacaagcgcaagcagcataccatcggtatgaagaagaccctcgtcttccaccgcggtcgtgcccccaagggcgagcgcacggggtggattatgcacgagtaccgcaccaccgagcctgagttcgagtccggcgagcagggtggttatgttctttatcgcctcttccgtaagcaagaggagaaaactgagcgctccagcccagaggaagtggatagaagtggctactcacctactccttctcgttcttcacctgacaacctagaggcgaatgaggaagctaatacaccattaaataaggaatctccagaatctgctctgcatgaaagcccgattgagctgccaaaatctgttgaaaccaatggtggttcaatgacaaggtggctggcggacagaaatgataacttgatggttactgcaccagatgtttcccatatacctttccacggacatgctgctggtgtagctaaggttgatccttctgttggtgcttcaggccacttagttaatccccacaatggaaatgatgattataacaaatttgtgtctgatttcactcccattctaccacttgaaaatgcattcttcactgatatacaacaaggagcttttggttttgatggcatcatgaatcctcttgatccccttgatgctttcttgaatcaaacacttgttgatcctgatgaacattcatcaacaacatcaaaagttcagtatgattctgacattccaacagaatttgagaaccattggaatatgaagccaaatctgttctgaggttgcggaagacttctgaggaaggcaacaaggatgtcaagcaggagagttgtctcgagccacacgtgagagcaccaatgcagaagggaggcttccaatcatacatcatctggctggttcttccggtggctctgctcctgcttctctgtgttgggacatatggatgggtatgaaatctatcctggtgcggtgcaaggcatgacattttgcgcacatgggttcctggcgtcaacctggtgtgcggtcttctgtacataacctgtggcatcctttcaacagccgtaccctgcagtaagacatcccggcattgccaaggcagctgaaaaataaataaaaaaacaagtggtagaaatgacaaggtggaaaagagcgaggtgtgttattgttggttttagtacatcgtagtcttcttttgctgttgttgtagatgtcttgctaatgttgtcgctgttgtgtagttgcaattcaagcccagggctgccagttttatttcctaatgtaatgtagcaagagcgagaccctgttagacgggtgcgctgaaattctgaacctctgtaatatctgatgttcttgtggatacctgtttcagaattttcggttcctgaacccagttactgatggcttgttgatctgttggcgtgttcgaattcgtttggacatgccacagcatggtctgaggggatacaaggactgaatgcgttggtttataattttataatgaaatactg

SEQ ID NO: 26834 - DNA, 599 bp, Zea Mays
  misc_feature (599)..(599): n is a, c, g, or t
ggccgatcggagcccacaggtgggcccgcgcgggcaggtgcggaatgacctcactgtccttccctcggcgatttgcagctttgggtccgatacagtgctcatcaaggctcactaaatggagtctcacaatggcgaggccaatgacttgcctccaccacctcctctgattgctggtgttgaaccacttaaagctgatgaaacaaagatgccattgaaacctaggagtctggtccagagaaatggatttggcagaaaggggcagccaataaagctgataacaaatcacttcaaagtttctcttgtgaatgctgaagaatttttctaccattactatgtcaatttgaagtatgaagatgatacaccggttgatcgcaaagggtcaggaaggaaagtgattgaaaaactgcagcaaacttatgctgctgaacttgcaaataaagattttgcctatgatggtgagaagagcctgttcacaattggtgctcttcctcaagttaaaaatgagtttactgtcgtggttgaagatttttcaactggaaagactcctgcaaacggcagtccaggaaatgacagtcctcccggaagtgaccggaaaaggn

SEQ ID NO: 26835 - DNA, 1193 bp, Zea Mays
aacctgggcatattcctctctctttcctcatcctcatccgagtggctctctccgtgtgctgtggcggcgcctggctctgctcggacggactccaccgaaggcgctcggctcccctcgggctccacctgcgacggccggccctctgcctgcaccgacggtgcccggccccctcggcatccaccagcggtgctcggctccaaggagcactgctgtgaggaaggccatccattttgtcaacctgtggacagctggaaggtctagtggaaacctggctatgaactccgtaccaaaacccgcccctgggtccgaaacatctgggagggaggattttgctgtgggggataaggatgctgtggtcattgttgatcatgggtcaagacgccaagaatccaatctcatgctaaatgactttgttgagatgttccgggcgaagactagctataggattgttgagcctgctcatatggagctagcggagcctactataaaggatgcttttggaaaatgtgtgcaacaaggagcatcccgagttattatcagtccatatttcctttcccctggacgacactggaagcaagacattcctgctttagcagcagtggcatcaaaggagcactcaaatataccctatattgtcactgcccctcttgggctgcatgagcttatggtggtatgtgcttgatatcatgaatgatcgcatcaagtactgcctgcgacatgttgcgggtgatgtcgatgagtgtacagtgtgtgccggaactggaaagtgccgcatgtactcctgatggagcatacctgggaattgtttctggagaatacgagatctgacgagtgtatatctaggtccgctgtgtaccgtgaaaccaaaagcttgtacagttcattctgaacagatcgtcagaattagacaagtgccaaattagttatgctgtgcatgcttgcgaacatcaataacgattcattagctaatcttgagtttatttacgtcacgaacaaactcagtcaagtgctctgatatttccattcacatgttatctatattcctgctaccttgtagttgaattagacttattgccttaacatggatcaaatgagaatataatgtacccttgtttgatttgccagttctttttgtcatatatctgttagggacttgttctcaaatgctatgaattaaaaacaagacaacacaa

SEQ ID NO: 26836 - DNA, 3364 bp, Zea Mays
tttcattctcccacccacccggatcctccgcgcgcgccgccaggtccgtcgcgatggccgcactccgcctccccgcccagccggtggcgaggtggccccaccttccttccgcctacgccgccgccgccgccgcgcgtcgggtctcggcccctcgcggccatctcgcggcgcggcgggccaagggggaggagccgccggagccgccggtgaggacgctgctgatcgacaactatgacagctacacctacaacatcttccaggagctgtcggtcgtcaacggcgtgccgcccgtggtcgtgcgcaacgacgagtggacgtggggggacatctttaaccggttgtacaaggaccgcaccttcgacaacatcgtcatctcgcctggccctggatctccggcatgccccgccgacataggggtatgtctgcgcatacttttggagtgtggagatatacccatcttgggtgtctgccttggccaccaggccctgggatttgtacatggtgctgagattgttcatgctccagaagctatacacgggcgactcagtgaaattgagcacgatggatgccacctctttaatcgtgtcccctcaggtagaaattctggcttcaaggtagtgaggtatcattcccttgtaatagaatctggttctctacctgatgatcttacatcgatagcgtggactgcttctccaaatttgctttcttaccttgaaagtgatcgaaccaatgttagtaccttcttgggaacattggataacaatttaatgagaaaccctctagagtacagtaacaatggtggggaactatccaacataggacatgcttgtgagtcagatgatagccgagttatcatgggcatcaggcactctagcaggcctcattatggagtgcagagagcattgctactcatcacggaagacagattttccgaaactttaagaagataacaggaaattttggattgcgctcatcgtggattcaggaaagaaaggtcaattctgcaagtcatcatgattctattcctaaggacttgttgcatactgaaagaatggaactttcagagtctgtacttggaaagagagggattgggaagaagtgtttacgattacaatggaagaagattgaaaattttgtctgtcccacagtaggctctgaagacatatttgcggtgctttttggccatcaaagcggtgaagacacattttggttggatagctcatcagttgaccagaacagggcacgtttttcattcatgggtggtaaaggtgggtccctgtggaagcaaatgtcattccacctatctggtcaaagagccaattgtggaggaatgcttagtatccaagatgcttatggatttactgccaaaaaatttatcaaagacggcttcttggagttccttaacaaggagattgagtccattcaatacaatgagaaggattacgaaggactgccctttgaattccatggtggcttcgttggatatcttgggtatggtcttaaagtggagtgtgatgcatcatcgaacaaggccaaatcaagtactcctgatgcatgcttcgtctttgctgataacactgtggtggttgatcacagcaatggtgatgtgtatattttgtcactgcatgatgaattttattctagtaatggagatgggatatgcaaaaattcaacgcatacttcatggttagtggagactgagaagaagcttctcaggttgggtggtatgccctcaggatcaccaattatccgaaagacacatgctagatcatccagtgtgcataagcaggcaggatcaccaattaatggaaagacatatgttagatcatccagtgcgctgaagcagagttttgttgtagagaaatcaaaggaccaatatgttagagacgttcagaattgcttggattatatcagggacggagaaagctatgagttgtgcttaactactcagatgaagagaagagcagactgtataaatgcactccaactctaccttaaactgagaaaacaaaatccagcgccttatgcggcctggcttaacttctcctcagaaaacttgagcatatgttgctcttctccagaaaggtttctacgactagaccgagctggagttctagaagcgaaaccaattaaaggtactatagcacgtggcagaacaccagaggaagatgaatgcttacgtctgcagttgagatacagcgaaaaagaccaggccgagaacctgatgattgtcgacctcttaagaaacgatctcggcaaggtctgcgagccagggagcgtgcatgtcccacgcctcatggacgttgaatcatacagaagtgttcacaccatggtgagtaccgtctgcggaacaaagaagccagatctaagccccgttgattgtgtgaaagcggcctttccaggcggttcgatgaccggggctccaaaagtcagatcaatggagatccttgattcacttgagacaagcccaagaggagtgtactcaggatcgatcgggttcttctcgtacaaccacacattcgacctgaacattgtgatccgaactgttatcctgcacgacggagaagcctcggtcggggcgggtggggcgatcgtagcgctgtcgagcccagaagcagagtacgacgaaatgctgctgaaagcgaaagccccgactgaggtggttgaggatctcgttcagacgatctacagctcagaccggtcggattccatgcagacaactatcagctagatcagataggcaaaggaccattatttgtcgcgacaccaagcgcttacgatggacctcggcaaacaccatgtgtctcagaaatttggtatcagtgaccggtgcgtgctgatgaacattggcagtgggagaggggggggggggggggggtgaggtggcgtatcttctttgcgatggtcatccctttgccagaaggaaataaaggagacgcgaagaggatgtcgaggtcagtcggatccacggttagcatatagagtcaggtgacatggcctctctcaactatagtgtgtgtgtgtgtgtggcatatacggtgagcatatacaagaacaacagtgtgtgtgtggcagaagtgaaacaaactgatacggttgtgttgcactgtcgtaccagttcaatgttcctgaagtgatattattctttgacgttataaatacttcgagggtgggtgggcgaatttcacgttttgtcgacgtttcctgggttgagctttccatccagcttctcaaatcccattttactctgaatattctgttgacagggatttctgttattaaagattcggagcagtttgttgttgttgcttttgacggtgaccttcatgaatcctgactcctgagatgcattttttttgtgttt

SEQ ID NO: 26837 - DNA, 2387 bp, Zea Mays
cctcactccaccaacccgagcccagcacggcatggaccacggaccacggacaggtgtggggtgtggcagcctggcaggcgccgcgtccttttcttcctggcgcgcgcggtcggccattcgcccattctcgggtcgagacggcaagcgtcagaccagtgacgaagcaaatctaccatgcgatgcgagcatgacaaataaataccctttacctcgtccttgccgccgcggccgccggggcgtcccggatcgtggtggtgcttgccgtcgctgccagcgcgcgcgatgcgccggcggtgggacagctgcttctcgggcagcgacgtccgcgtgggcgggcgcgtcccccccgaggagccggagccggaggtcttctccttcgccgagcccctcccgtcgtggcccacaggcgggggattcgcgcgggggaggatacgtatcggcggaggggagctggagctcgccgcggccaccgcgttccagaagatctgcaccctgtcgtcgcggcggcgtggcggcggcggcagcgccaccttttaccggccggtcggcgtcccagaggggttctcgctcctgggttactactgccagcctaactgccgcccgctccacggccacgtcctcgttgccagagcgggggagcgcccgtccggcgcctcacctcagccgccgccgccgccgctctgcaagccgctggactatacgctcatctgggaattccaagccagtggcgataccggctacggctacggtcgaagcgacgcctacttctggatccccgtgccgccggagaggtatcgggcgctcgggtgtctcgtgaccacggaaccacggagaccaccgctcgaggaggtggtatgcgtccgcgaggacctgacggacgagtgcgagccgcacggctcgctgctctgcctagagcagccgcggccgtcttcgttcttcaccgtgcggggcgttcgtccggtgcgccgagggatacgggagaaaggagtgtgcgtgggcaccttctgctgcgccgctgacgggctccccccgcgcgagcacggcatggcgtgcctgggcaacgtcgagctcgacctgtcggcgatgccaacgctggagcaggcgcacgcggtgatccggcactacggccccacgctgttcttccaccccaaggaggtctacctgccgtcgtccgtctcttggttcttcaagaacggcgccgcgttgtacaggcgagggggagacaccgcgggcgaggagatcgacggcgaggggtccaacctccctggtggcggttgcaacgacggggagttctggatcgacgttcccagcggcgagcggggccgcgccgtgtgccgcggcagcatcgacagcgcggagctctacgcgcacgtgaagccggccatgggcggcacgtgcaccgacgtggccatgtgggtgttctgcccgttcaacggcccggcgaggctcaagctgggcccgatcagcctcccgctgggcaagaccgggcggcacgtcggggactgggagcacttcacgttccgcgtcagcaacctcaccggtgagctcatgggcgtgtactactcgcagcacagcggcgggcactgggtggacgcctccgcattggagtacatcgacggcaaccggcctgtggtgtactcgtccaggaacgggcacgcgagctacgcgtaccctggcgtgtacctgcagggctcggcggcgctcggggtcggcatccgcaacgacgccgctcggagcagcctattcgtggactccagcgccaggtaccgcatcgttgcggcggggtatctgggcgagggcgccgtcgtcgagccgcagtggctgcagttcatgcgggagtggggtccgacggtggtgtacaagtggaggaagcggatggagtgggtgatcggccgcctacctccctggctcaggtgcagagcggagagcatgctgaacaagatgcccaacgagctgtccagggaagaagggccgaccgggcccaaggagaagaacaactgggagggagacgagagatggtaagactggtacgtaggaacagtgctcaacgatgtgattttataacatgtgtggcttaaattaaggggcgtgctatatttaggtgtttgaaaaacagcttcttcgcggaccatacactagtacaatttggctctataccagcggtacgctttttacatcacagacggttcggttagaaaaccgcctgtaatgtcccaggcggttcagtacgcctgtgatgtaatagtatcacaagcggtttttgtttaggaccgtctgtggtgctctatccttttcacaaacggaccctaagaaaaaaccgcctctgattgtaaaaatatttttaatttttaacagaaatatgcaaatacaatttaaatgaattaata

SEQ ID NO: 26838 - DNA, 215 bp, Zea Mays
cgccaaataagaacatcacatataatgacaaaatgtatatagataaatgtcacaaatatcattattacatagcggaagtatcttacaaaaatagatgataacaataaagcgaactaaatattattccttggcgccatcaagctgactgggagccgccacctagataagctcgtactcctcattgtagacttcctcctagaccaccagttcttctc

SEQ ID NO: 26839 - DNA, 3020 bp, Zea Mays
gtacgtgtctgcttcgcttcgtttcatcttagaggaggttcagaagcacgtaactcggaagacgacattgtagaagcaatagaagatgctggcttcgaagcagaaattcttcctgactctactgtttctcagccaaaaccgcataagactttgtcaggacaatttaggataggggggatgacttgtgctgcatgtgtgaactcggttgaggggatcttaaaaaaattgccaggtgtaaaaggtgcagttgttgcattagcgacctcattgggtgaagttgaatatgatccttctgccattagcaaagatgaaattgttcaggccatcgaggatgctggttttgacgctgcactgttgcaaagtagtgaccaagacaaggtcctattaaatgtccaggggttacatttcgaggaagatgtagatgtattgcatgatatcctgaagaaaatggaaggcttgcgtcagttcggtgtaaattttgcaaactcagaagttgacattgtatttgaccctgaagtagttggtttgagacagattgtagatactatcgagacggagagcaacaataggctgaaagctcatgtacaggatccatatatacgagctgcatcaaatgatgcacaagaggcctctaagacgcttcatcttcttcgttttagtttattcctaagtgagatctgctgaggtggattctggtgaccatggtacagtttattgttggcaaacgattctatgttgcagcgtatagggccctaagacatggctctacaaatatggatgtcttagttgttattggcactactgcttcatatgtctactctgtttgtgcactactttatggggcattcactggatttcatcctccaatatattttgagacgagcgcaatgataattacatttgtgctatttgggaagtatcttgaggtgctcgcgaaaggaaagacatcagatgctatcaagaagcttgtagagcttgctcctgctacagctattctacttctgaaggacaaagagggaaaatattcaggagagaaggagattgatgcgtcgttagtacaacctggtgatgtgttaaaagtgcttcctggttcaaaggttcctgctgatggtatcgtcatttggggtacaagtcatgtcaatgagagtatggtaactggtgaatctgtaccaatctccaaggaagtatccagtctagtcattggaggcacaatgaacttgcatggtgttcttcatatacaagcgacgaaagtaggatctggaacagttttgagccagataatttctctcgtggaaaccgcccagatgtctaaggcccctattcagaagtttgctgattatgtagccagcatttttgttcctattgtcatcaccctgtccttcttgacattccttgcatggtttctatgtggatggttgggagcatatccaaactcatggtctgctgaaagtagcaattgctttgttttctccctaatgttctccatatctgttgttgtgattgcttgtccatgtgctcttggtctggcaacaccaactgctgttatggtagcaactggagtcggggctagtcatggagtacttgtaaagggcggagatgccctggagagagctcagaatgtgaagtatgttatttttgacaagaccggaacactgacccaaggaaaggctactgtaactgcaacaaagattttttcaggaatggatctgggtgactttctcacgttggtagcgtctgcagaggcaagcagtgagcatccactggcaaaagctatcttggattatgcattccatttccatttcttcggcaatcttccctcaggaaaagacagcatcaagagaagaaaagaagagatactttctcagtggcttctggaagtcgtggactttgctgccttgcctggcaaagggattcaatgttggatcaatgggaagaaagttttggtagggaatcgtgctttgataactgaaaatggggtaaacattcctgaagaagctgaacgtttcctggtagacatggagctgaatgcaaagactggtattctcgtagcgtatgatggtgacttcattggcttagttgggataaccgatcctttgaaaagggaggctgctgtggtcatacaaggtctaaaaaagatgggtgttcatccagttatggtcactggggataactggaggactgcacgagcagttgcaaaggaggttggcatcgatgatgtcagagccgaggttatgccggctggaaaagccgatgtaatccactccctgcaaaaggatggcagtgttgtcgcgatggtcggagatggcatcaacgactcgcccgcccttgctgccgccgatgtcggcatggccatcggcgcaggcactgacatcgctatcgaggcggctgactatgtgctcgtccggaacaacctggaggatgtgatcacggctattgacctctcacggaagacgttcatccggatccggtggaactacttctttgccatggcctacaacgtgatcgccatccccgtagctgctggcgcgttgtttcccttcaccggggtccagatgccgccttggttagccggcgcgtgcatggcgttctcgtccgtcagcgtggtgtcgtcgtcgctgctgctgaggaggtataggaaacccagactcaccaccgtgcttcagataacagtggaataagttccttttttttttggcaatttgttgtatctcactttatcggagagaaatagatacaaacgtgaatgttggtgtggacgtgcggtgcagtactgagagtcaaacacagaaacacttgtacatatcgaacagtttgcaattgcaaccgagttatacatgttaactatgtgagggatcaagagacatgcgacaagacaattctagttttctcctagtgttagtttggtttggaggataatatgatggatctgcccctagagtagaatattccctgtcacatgtcattcctcgccatctcttttaggcattatcggtgaggccgtcttcttctccacgcgctgc

SEQ ID NO: 26840 - DNA, 5222 bp, Zea Mays
caagtgagtttacatcatatatgagttatcctcccacacgtaaagaaatgatgcggactgctgatgggacactacaacccatcaagggtgttggcacagtgcaatgcactcaatctattaagttgtcatcagttttgtatgtgccaacttttcatgtcaacttgatatcgctgagtgccttggttgatcaattggattgtcgcattatccttgaccgagataattgtttaattcaagagaggcaaacagggaagaaacttggaacagctaccaggcgtagtagattgtggtatatggatcatgaggggactaatgatacaatatgcactatattagcaacaagaatggaagagaaggaggttgcagtgatgcttttgcattatagattggggcatatttcttttgataagatatgcaaagcttttcctgatgcaatgtgtggggtggataaaagcaagctattgtgtcgtgcctgtgagcttgcaaaacgcacaaggacatcttatattagtcgaggtatcaggagtatatctccttttgtgctagttcattctgatgtttggacgtgtcctgtgacttctattaatgggatgaagtgctttgttacttttatcgattgcttttcttggatgacttgggtctatgtgatgaagcataaagatgaagcgtcgaaatattttcaaaatttctgtgcaatggttgagaatcaattaaacactcaagttaaagtgctaagaacagacaatggaaccgagtatgtaaacaaggaatttaatgcctttctatcaaggaatggtatcttacatcagacatgttgtcctgatacacctccacaaaatggtgtggctgaaatgaagaaccaccacattttggaagttgctttttcattaatggttacaatgaatgttccaaagtttctatggagtgaggctgtattgactgccacatgtcttattaattgcactccttcgaaattacttgcaatgaagactccatgggagatttttttcggtgagaataagtttgtggtttcacctaaaatttttggatgtacatgctttgtcagagatcatagacctcaagtggggaagttggatccacgtggtgtgaagtgcatttttgttgggtatactgcagggcaaaaaggatacaagtgctggagtcctagtgaatgacgactgtttgtaagcatggatgttacattcagagagaatgtgcctttctatggtgagagtacacatctaaattttttccttgattctgcctctactagcacatatggagctagtcgagagggggagaacagagaggttgatccaaaggctcaacagtcacataaaatggaattagtgattgatgcttctcaacaaaaaatgcattaccaagtgaattggagccaaactccagtcacgagaataataaatcttgtggtgatgacttgcgatataagggtgaagtatatacaagaagaaagtctcgcttgcaatctcaagctactgaaaccaattcagtatcagatactgagcagttttctccagatacattagagactataaatgcaccattgacctctcatggagaaattgaagattctgctgcttatgatttgcccattgcactacgaaaaagagcacgtgctaaggcctgagttcctccaaaaaggtatggatatgaacacgacattagcaattatgtctcatatgtgtctttgttaccatcatatagagcatttgttgcatcattgcattctgtagcaatcccaagggattggaaagaagctcaacatgattctaactggtgtgaggcaatgttggaggagctcaaggcacttgaaaagaatcaaacatgggagtttgtgaaactacctaaaggaaagagttagttgtaaatgggtattcaccgtgaagcaaaactcagaaggaaagatagaacgatataatgcacggttggttgcaagggggtacactcaaacatatggaattgattacaatgagacatttgcaccagtgacaaaaatgagtactgtgagaacactaatctcttgtgctgcaaattttgggtggactttgtatcaactagatgttaagaatgctttcttacatggtgatttacaagaggaggtctatatggatattccacctggattgtcgaagcctgaggtacttggaaaggtttgtcgattgaaaaaaatcattatatggtctcaagcagtccccacgagcatggtttgatagatttagccgtgcgttgtgtggtatgggatacaaacaattgaatggtgatcacactgcattttatcgacactttgggcggcgaattgcaattctagctgtgtatgtggatgatattgtcgtcacaggtgacgacgagactgagatcacacgtctaaatgagaatctgaataaggagtttgaggttaaagatcttggtcatctcaaatactttcttggtattgaagttgctcgatcccgagaaggaatagttctctctcaaaggaagtatattctagacttacttgatgaaacatgtatgcttgggtgtcgacttgtggcaacacctattgacttgaatcacaagttatgtgcggaatctggtgatcctgtgaacaaagagagttaccaaagacttgttggtaggcttatctacttgtgtcatacaagtcctgatatcacatatgctatcagtgtggtaagtcgatatatgcatgatcctagaagcggacatcttgatgcagtttatcgcatattgcgatatttaaagtcttgtcctggaaatggaatgttctttaagagtcatggactcatggtcatctaaaggtggaaggttactctgatgcagactgggctaattgccttgataatagaaggtcaacttcaggttgttgtgtgtttgttggaggaaacttggtatcatagagaagcaagaaacaaccagtggtgtcccgttccattgccgaggcagaatatagagctatgccacttgttgtatgtgaaatgctatggataaagagtctcttatcagagttgaatgtattgagaaaggggcctctgaagctatggtgtgataataagtcagctataaacatagctaataatccagttcaacatgacagaacaaaacatgtggagatcgatcggttcttcatcaaagagaagttagatgatggtactctagagttgaaccatgtaagctcaaaaggtcaaatagcagattgcttaactaaagggttaggagtaaaagagagtcatgtattgtgtaaaaagatggggatgattgatatctatcgcccatcttgagggggagtgttgggccgagtgtttttgctagtgtagggtttggcccattagcgtgcatacatatgtgtctctgtgtatctatggagaaagtattctgtgtactctagaacattctacacattttaagggcacccaggtcttcaatgcatctccaagggccaaatttaattgtcccagtgaagaagacctcatatgctgatttactagagtaaatcccatgattggataggcgccaagagtgttgatctggggtgtcaagttggagctccacgttatcaatgaaattccatagctgtaggtattccactaacacctgcacagacaatgcacccctgatatcatgaactcaactccgatcctgtaacgcttgtgccactgtcctttgcttcctggccttcttagggatcagaaggaataagttgggggccaaatcagcagtcttttccgcttggagatcaagtcggtattcttggaaatgctgctgattttcaagacaatgatcttagcagcagtacaattgcaagtaacaatgacaggcggaaaatgatgatagcctttgacatgagatgtgttggcttcatcatggcaaagatggttttgagagagctaatggatccttcgactttctttaaattcaaatcattcctgacaaagggaaatgacccatcctgtttgcgtgagttcctactaccaaccctctaccaaaattctccatctgggaatattggtttgcagatgctagataggcagtggggtgctggttggaatcttttagccttattgctggcaacaaaaccagaggaaaggataagttgtgttgatgcattgcgacacccgttcctttgtgggccaaaatggcgtataaatccgtcagcaaatctcattcggtggggcttgggatcaactgctgtccgcatggctgaagattatatatatgggcgtcatcagcgtagacgtttatcatattttgttgaattgatggaggttctaaaccctagtttaagaacacagaattggcttcacctcctacctggtcgttggcgcctcttgtactgcactggacgacacattggcctaacacttcaattatgccagaacccaattggcctcacgacaaatctggcagtgagggagttttgtctgtcaccgcatcagcaaggatagctgctggtaggatttatattaacgaacatgacagtaaagaggatatggtcacatcttctatgagatatcttcatggtaataaatggagaaaattctcgcaaataaaggagctgccatctagtctccctgcagtaaacattgctatggatgaaatccacgtatcgataagctgcacctcgactatgacagttaattctgcacaaaaggcgctgaaagagatccgtacacaaaccccgccggaaatgttcgatttgtcaaagattgtttgtgggacatacattgatgcgaggttgatgattcttcgtggtgttaacgggtcggctctgctcttcactagagcaaatccaatgattgacacctgaggagactccgtccgccgttatataaggccttgttcggttaatcccgttacctatggattggatgagattggaaaaaaatatgaagaagtttgacttacttgtgatttaaacccatccaatctcactcaatccacatggattgagagctaaccgaacaagccctaacgctgtattctttctttccctgtacattattatgtatttctagccgtacaatcaatttgtaacgagtgtagataacaaggtgtgtaggccatagttagaacgttgaaaattccttctcaagatgatctgttgcttccaagtacggagccttgacagggcttgagctgataaattattactctttccgtttcaaaatgaataaaattcacagttattgaggtcaacttcaaattta

SEQ ID NO: 26841 - DNA, 4951 bp, Zea Mays
gtaccccgcacattcgcccagcggttaaggtggccctgcccgcgcattggcggaggcaaccccgctagcaccccagcggtggaggtagccccgcgtcgacactcgatggtggaggcagcacgacggtgcctagctcggtcgcatccatgggccggcggcatggacaagatccacgacgacaccgaccaatgcaggtcatgggatcatcatgaccttatttcagttaaaccagagtataatgatagcagcagatgctcgactagtgctcgtttggcatcaattgccccatactctggccggagggagacttctgtctatgcgactgatatcatcagtggaatcacgatacactgcaaagtattcgtagacaagatctcccggatcagtattttccaccatgctgttaaaattgatctagatgaaattgctacattacgtatacatgccttcgatgatgaagaaaatgtgttctcgacattggtgggcttgcagtttttgtggcaccttaccccgaggttggttgataacagtagccatcatcttattcgtattccactgaaagaaacacatttgagtgactgtggtggcttctgcggtgatatgaatattcggtttgagctagaagacaagaatcttggttcagatttctctgtggtgaagggtattgagattggccaagaggttgttaaagctcagttgtttgagcctcagtttgaacatgtgattgacacaatcacattaactgttgctgaatccatgtcactagagccatcatcaccagttctcgtgactgttggtgttttggtgaagtttaaactcaaggtattccgacagaaagttgctcaagtggttaaattaccatcacaatatcatcgctggtatgcgacaaactcttctgtggcccaagtggattccttgggtatcttgcatgcattgagtctagggtttactaaggtggttgttgaagacacaagagtttctggtcatgaacaagtatcatctctacatgttgttattccacggacacttttcctttatctggtccctattatggatgattctgcccatcttcatgggattacaaacattccatcctcaaaagtatggtatgtttatcctggaagaaaatacatggtccttgccaaagcttttgcagagggatttgatgctagggaaatatatattacagaggaaaatgagcttaaactggagagtagtaccatggaattctggaacttatcgcaggggcaagggcatttagatgcttccttaacttacctaacgggggcatctggaccaacaaaggtgctcaagcttgtgcaagaagttaatgtttgtagtaaggtgaaggcattctgggatgaaggattggagaactccaacgttatttacctgccctgggttcctggagttcaccaggaagttgaaatgatggcaattggagggtgtggtaagacgctggatgactacaagttattttcctctgatgaggatgttgcttctgtgtctgattcccgtatcgtgcgtgcaaaaaagcctggtcaagctgtcatccgagtagtttctgctttcgatttcttgaattttgatgaggtaattgttgaagtttccattccttcagtactgtctatcttgccaatctttcctgtggaggtgcctgttggaacacgacttcattctgctgcagtgttaaaaacatctgctggacacccattctcacaatgtacccattttaatgcttttataaggtggagtctactatccgaggatgaggcctttcacattcttaacaccgctgaggcctcaagcatcgacgacataaaacataattctggttattggggacaaaatggcaatccttgtgcctgggtctctctgagtgcatttgctgctggcagatcaacaatagttgcaacatttgctgttgattcagattcagatattgagacatttggtggacccatttctctggaggcaacttcaaaaatttctgcatattatcctcttgtagttctccaaggggggaatggaaatcattttggtgggtactggtttgacttatctggaattcatagtaggattaagaacatggataacaactctcccaaggagctgtacttagttcctggatcaacaatggatgtccttatcttcggaggacctgagcgttgggaccaagttattgattttgttgaaacagttgatgttattgatccatccaaaaatcatattattagttctaccgctgtgaagaaactatctagtggactatatcgagtatcttgcctaagcaaagtgagctataaattgctgttttcacgtgggaacatggttggtaaagatcatcctgtgcctgcaatttccaaatcagagttcactgttatttgtgacttcccatcagaaataacattgatagcaaatgaaaatgaaaaccgacttgatatattggaagctgctaggaaagctgaccgtggtccagatagattgcaagcatcacccattgtaatctccaacggaagaaatatacgtctagctgctgcgagtatacatgtaaatggaagatttttcgctaattcatcttctcttcgcttgaaatgggaagccactggatgtgaagggcttgcttactttgaagaaaccaaatctgttgaaatgcttgatgagtcagcttgggagagatctcttgtcctacagaattctacaggagtgttgatgacttttctaccaaatatgctggccaaactcatgaggaagaatacacattccatagtctcacagatgctattcagttgcagattgtttcttctttaagagtcacccctgaatatgtcttattagttttccatcctgaagcacaggaaaacctgattgtaagtggtggaacatgctccctagatgcttctaccaatgacacacatgtggtgcaaatagttacacatccaggaaaagccttatgttctcaattgattcttgcggctaaaggtttaggcgaagctataatcataatccaggatgttggcctttctccaagagcaactactcattctttggttagagttgcaaatgttgactggattaagataacagcagaagagcaaatcagtcttatggaaggaagcacaaaagatttccaaatattagctggcacccaagatggacaaatatttggtgattctcagttcaaatatatggacattgagttgcatcttgacgatgagattctggagcttattggtccaagcgaatcaatggatggacccgaattttcaattaaagctgcaaaaatcggcattacatctctatatgtcagtactaaacaaagctctggacacagagttttaagtcaggttgtcaaggtggaagtgtatggaccattgcaaatacatcctgagtatatttacctcactccaggcgcctcttttgtgctttctgttaaaggtggtccaaaaactggagtttccattgaatactcaagtctgaacatgggaattgtagaagttcaaaataccactgggaaactatctgcaaaatctgtggggaactctactgtacgtgctgctgttttagcaaatggaggtatcttagtctgtgaagcttttggaagagttgaagtggatatcccagtggctatgacattgaatactcaaagtgaacgtctttgtattggctgtagcatgccagtttatccatctctgcctaagggagatctattttccttctatgaaacttgccaaagttacagttggatgatagcagatgagaaggttgtgacattccaatcagctaaatcctggcgatacagacttgaccaaggactatattcagatggaaaaaagagtccatggttttccaatggcagcagcaaattttttatcagtcatatgcttggaaggtctgctggcaaaaccaaaatttccatttcagttgtttgtgatttcttgctacctggcacctctggatctgttgtatcatacaatgcctccaagatcattcttgtggttccagatcctccccttgcacttgcgctaccgatgacttggttattcccacccttctataccactatgagccttttgcctagatcagcaaattcccttggggaaccaaactcacttgacctggagagctccgttgggtattctctgctaaggggcaatggtaggataattgatggaagtaaaattcagactggagaaagcaatacagttgattgtattcaagcaaaagatcactcagctgggagaacggaaatagcagcatgtctacgagttgctcaggttgcacaagtgcgggtagctgctgcagaatcatcaatccagattgtctatctatctgtaaacgataaagttgaattggatataaaatatgctgatgaattaggttatattttcaacgaagctcatggagtagtccctgtaaagattgagacaaattatccagatgttgtttcggttctcatgccaagagattttaatggtacatatgacacacgtgaacgttttgttcttcaggcgagaagtcatggaacagctcttgtaaggctccacacaaacaatgtccctaacaaagtggatttcataatggtatccgtaggagcacaaatatatcctagggatgtgatccttcattctggccagcacctgaacttcactgttatcggagacagtatggacatgtgtggacatggtcactggttaagtagcaatgggaagatcgtccacatcaatcgggtaactggtgaagcacaagcacgtagtgaaggtgtagcggaagtaatcttcaaaggttcaaattttaagctgcaaacaactatcactgttctcaaggtgaaccagatagttgttgatgctcctgcggagacactgactaatgcagctggcctgccggatggatacatgttttctgtgagatttaggagcagacataaatttgtggtatactaggttggaat

SEQ ID NO: 26842 - DNA, 1245 bp, Zea Mays
tcgaatccactgtctggatttcaacttggtgttgaaaactcgtacgcggaggtgagctccacggcggaagagcagaacccgcagccagccgtagagcagttcctcaccctccacgccgcgctctcgcgcgccacggtgatcaccgacaccctcgccaagtctgccacatctgcagcctcgccagattgctcggcagccagcgacgctgggacggtgtgttccgctaccgacgaggaggccgctgccatcacggccgagcgccggcgccgagctacgtcctgggtgagcgccgctctcgccacggacctgtccgccttcggcatctacaagctcaaaccgccccccgccaccgtgtcctcgccgctggccgtggtcgtcgtggacgagcccgcgaagctggcggcggccgcggctacgaaatcgtcgccgtcgccgaagtcgcggctgtcccccgcgaaggggaaggcgaggacgggcgctgctgcggctgcaggagcgctggccacgacgcccgcgccgccggagtgggagaggggaggaggggccgaggagaggggcgaactggcgacgcggctgggagaggagtcaaggggctggttcctcggcttcgtggagcggttcctggacgccgacgtggcggcgaccgcgcagtgggaccgcgagcgcgcggccaggatgctcccgcagctaaagcgtgtcaacgactggctcggcgagatcgggaagcgcagcgagaccgagacttcgtcgctgccgccggccgacgcggacggtgaggcgaccaccacgagcaccgcccccgtcccctcgaacggcggctgcggggtacctgaggaaacgatagagcggctaaggaagaagatctacgagtatctcctcaccaatgtcgattctgccgccgcgatgctcggaggcggcgggctggccgcgccgacgaatgggaagaaaggctgacgcgtgggtagaggtcctaattgggccgttagtagtgtgaaattttattgggccaaaaatgggctgggttaactaatgtaggcttcgtttctgttgtttctttgttgggctttgagcatttcagcttctcttggtttcttattttggtcacagaaaaaagaaaggcggtgagatattgacttgtatttatcactgatgtcgactgggtgactctggattatggagtattgctccattggatagttttctgcatttcgagacaggaaagtggttttctgcggaactgttcgg

SEQ ID NO: 26843 - DNA, 3814 bp, Zea Mays
gaatttaatgcctccaacgaaacccccaatcctgaggatttgtttgctcgtttggttgtgcttctgcataatccacttgctaggggtcaactggccacccagatcctgacggttctgtgctacttgggtccacttttccccagaaacctttctttattttggcaagatgaggtccctaagatgaaagcttacatcagtgatcctgaagacctaaagcaagatagcacataccaggaaaaatgggatgacatgataataaattttttggcagaatgtttggatgttgtgaatgatactgagtgggtcatttctttgggtgatgcatttgcacggcagtatgatctgtattctatatctgacggacacgctgctttgctgcacagatgcttgggaatgcttcttcagaaggttgatgataggatttatgtcagcgagaagattgattggatgtgtagacactcaagtatgtctattcctattaatcgccttggacttgctcaaggcatcgggctggttgcggcttctcatttagatacagtgttggagaaactgaagaacatactagatagtgcagagcaaagtgctttccagaggttcctctcatttttctcattcggcccaaaagtggaagatgttgatgacacatatgcagcattggcgttgatgtatggttatgccgcaagatatgctccatcaactgttattgaagccagaattaatgcacttgtggggagtaatatgcttggaaggttgcttcatgttcagcatcctactgcaaagcaagctgtgattactgcaatcgaccttttaggtcgagctgttattagtgctgctgaaatgggaatctcattcccactgaaacgaagagatcagttactggagtacgttttaactctaatgggtagggatcaaagtaatgatctcactgatttcaacactgagcttttgcacacacagagccttgctttaagtgcctgtactactcttgtctcgctagaaccaagattgccaatggaaacaagaaaccgtgtcatgaaggcaacattaggtttttttgctttgccaacagagccctcaagcattgttgagagtctcgtaacaaacctaattattctgttaggtgccatcctgcttacaagtggtgaagatggtcgaagtcgagcagagcagttgctgcatattcttaggcagcttgatccatatgtatcatcatctctggaacaccaaagaagaagaggatgtgttgctgtacaggaggtgttaataaagtttcgcaatctttgttctggtggattcggtgcattgggctcctatccaactttcacaatgaataaacaaatcgatcgagggactaggagcttgtcaagtttgccatctgcatttgtgttgcctagtcgagattctttaagcttgggagagaggacaatggcataccttcctcgttgtgctgatacagacacggaagttaggaaagttgcaattcagatcattgcacttttcttcgacatttcattgtcacttccaaagcagaaggcatatcctaatgatattgatctggaatcctcgtatagtgctttgtcctcccttgaggagttagtctctattgtcagaagggaggcatctgttgatcaaactgaactatttcagagggttgtatcctcagtgtgtattctattatcaaaggatgagctggtcgtcttgctacactcttgtacgttggcaacatgtgataagataaaacagtcagcagatgcttcaattcaagctattatcatgtttattatcagaagaggcaaggagctacgtgaagctgatgtctcgaggacaactcaatctttgctctcatctgctatttctcttactgacacacactcacgccaagaggttctgaatgctatatcatgcctagcagaaaacaccaatcacgttgtggtctttgatgaggttctatctgtggctggaaaagatatctgtacaaaagacataccaaggattcgtggaggctgggccatacaggatgttttttatgcattttcccagcacaaggagcttgcacttctattcctggagtacactttatctatacttcacaaagaacctgtcataataaacagttctgagaagggggagagtacctctgagtcattggctgatgactgtattctacaggcaactatgtttgctctcaatgcatttatgagaggtggtgggaagattgggaaacaagcagttgagaaaagttacccttctgttctttcgggccttatactgaagctcggaagtcttaatggtgttgctgaattgggccgaaatgaacttctacgatcgttgttaattgcatttcagtcattttgcgaatgtgttggtgatgtagaaatgggaaagctattagctcgagatggggaacaaactgagaaggacaaatggatcgagcttgttcaggaaatcgcatgcagttcctcagtaaaacgaccaaaagatgttctgccaacttgtgttatcttgtgtaatgctctcaaccgaaatcagagggctgaaagggaggctgctgctgctgcactatcagaatttatccaccacattgaaaaagaacctacattgcttgaacaaatggttgaggaaatgtgtcaacatgtttctgatgattcaccaactgtcaggagcctctgtttgcgtggacttgtgcaggctcctgagagccacatgcttaaatacatccagcaagtgttaggagtaatattagcacttcttgaagaccccaacgagtctgttcaattaactgctgtccaatgcttgttaaatgtccttaatttgtcagaacaagatgctgttggtccaatcttaataaatctcttagtaaggctgcgaaatcttcaggtctcaatgaatacgaaaatgaggtccaatgcgtttgcagcttatggtgctttaagtgcatatggtgttggtttgcagcgcactgcttttattgagcagatacatgctacccttccccgtctgatcctccatcttcacgatgatgacctaagtgttcgtcttgcctgtcggaacacattccagctccttgcgacattgatggaagtagagggcttgtctgtgctcctcagcaagcagtattttgcttctgatcgccgttctgactatgaggacttcattagagacttaacaagacaactttgtcggttgtctcccgccagagtcgacagctacctagaatcggctatccaggcattcgatgcaccttggccagtcataagagcaaacgcagtttgtttggtgagttgcatgctatcctttttggatgatcagcgattcattgctccttatttctcccaggtatttgctacgttggttggtagaatgagccaatcgccagacgcaattgttcgagcatcagcatcgtctgcgctgggcattctgatcaagagatctaacatgctgaggtcactggtttcacgatatgatcgagcagattcatcacgcaattcccagagcggtgattctaacaccaagacaccatcagagtttcaagaacaggcagaaggaaatccgaatgatggcgcaagtggagcggcaataaaggggactgaagccgatcactgatgtaaatttactcgtatatacgtatagtgttctagctatgcatgcttgtgtatatgctgtacttccctcgcaaataggaacaggagagcaaatttatgctgccatgtcaatagatcttcagtacacctgtaaagcaaccactcacagttagatgattatttattgaatcaaatattatttatatattgaattgaattttcttcgatgcagt

SEQ ID NO: 26844 - DNA, 3387 bp, Zea Mays
tttgtgcgagtgtgcctcgtcattcacctcggccacaggcggtctcattgatgaggtgaggagctgtgctcagggggagcctaaaagcggcggcgtctacgcttgccgcgaggtgccaatggtgcagtggtggggccgtgaggcgtcgggtggccgggggacgtcggtggtggtgaagatggagagcccggaatggaccatcccggcggaatcggaggtggcggcggggggcaaggccggccgcggcaagaacgcccgccagatcacgtgggtgctactgctcaaggcgcaccgcaccgcggggaagctcacgggcgccgcctccgccgtgctttccatcgccggcgccgcgtggaggcgggtggcggcggggcggaccgacgaagacgaagacgaagacgccggcgccgcgccgcccggggagagccccgcgctgcgcagcaggttctacggcttcctccgcgcctccctcgtcctgtccgtgctcctcctcgccgccgacgtcgccgcacacctccagggctggcacctcgccgtcgacgtccccgacctgctcgccgtcgagggcctcttcgccgccgggtacgcgtcctgggcgcgcgtccgtctcgagtacctcgcgccggcgctgcagttcctggcgaacgcgtgcgtcgtgctcttcttggtccagagcgccgaccgccttatcctctgcctgggttgcctctggatcaagcacaggggcatcaggcctgtccccaaggctggtggcaaagggtcagacgacgtcgaggccggcaccgggaacttccccatggtgctcgtgcagattccaatgcgcaacgagaaggaggtgtaccagcaatctattggtgctgtttgcggtctggactggccaaggccaaacttcttggtgcaggtgctagacgattctgatgacgctgccacttcaacacttattaaagaggaggtggagaagtggcaacgggaaggcgttcgcatattgtaccgacaccggttaattcgtgatggctacaaggctggaaatctcaagtcagccatgaactgcagctatgtaaaggattatgagtttgttgttatctttgatgctgattttcaaccccagccagacttcctgaagcgaactgtgccccatttcaagggcaatgaggacgttgggttagttcaggcaaggtggtcttttgtgaacaaggatgagaacttgctaactaggctgcaaaacataaacctttgcttccactttgaggtggagcagcaggttaatgggatcttcctcaatttctttggattcaatggaacggcaggagtgtggagaataaaggcactcgaggattcaggtggatggatggagaggacaacagtggaggacatggatattgctgtccgagcacacctcaagggttggaagtttctgttccttaacgatgttgagtgccagtgtgaattgccggagtcatatgaggcatatcgaaagcagcaacaccgatggcattctggtcccatgcaatcggattctggaagaaagttcaacctcatatttcttttctttctcctccgcaagctcattctgcccttctattccttcacccttttctgcatcatccttcccatgacgatgtttattcccgaagccgagctccctgcctgggtcgtgtgctacatcccggcgaccatgtccctgctgaacatcctcccagccccgaaatcgttcccgtttatcgtgccctatctcctgttcgagaacaccatgtcggtaaccaagttcaacgccatggtctccggcctgttccagctcgggagcgcccacgagtgggtcgtcaccaagaaatcaggccgttcttccgagggcgatctcgtcgtcgagaagcagcctagacagcaaagggcagggtccgcatccaaccttggttcccttgcaaaggagccttcctccagtctcagaaaggactcccaaaggaagaaacacaataggatatacaggaaggagctggcgctctccttccttctcttaacagcagctgctcggagcctgatatcggtgcaaggaatacacttctacttccttctgttccaaggggtatcgtttttggtcgttgggctcgatctgatcggcgagcaagttgagtgacgggaatacaagggagagtaatggcggtatttgtttttgctgcgagcggtggcaatgcgaacagggagcacttcaggtaaaggcaggcacggtatatgattcaacgcaaacacgagaagatttggttccggattaagaggggttatagatggttagggatacttgaaacggtgtactgtggattgtagatatatggcttgagactgtggactggggtctgattcttttgtaagaaaatctttcagtggggtcattttgctttcttgacagtttaccttcaaagggggatactgtttgggatccatgtaatttggccagttagtacgaatgcatactgaatgatacttgttcgtttcttgaattctaacatgtggataaaggattgcgctaaggggaacccagaaaaagggaagaagatgttctgcatgagtgcatcagtagaatgcctacgggctctgtttgtgaatgcaagagcgcaaatcacatgcggctcacgaacggtaatcttccagcccacttgtccagcagtgatggtggagagagacagggtatcaggggaactggggaaggggtttaggaacaacccatctccattcaccaacggcgcctccaactccgagcgccgcctctgcctcgaaaactcttactcgcggagctgcagccaggggggcgaccggtgtgtgaaccgctgccgctatggctgctgcttccgttccgccaacatcttcatccggcggctgggacttcacctgtaaccttgaagtcgattatgggtctgaagaaaatgcatccatagtctacagaacgttagcagttgacaaggagttgcagcctgacaaggtgaagagggagatgactctatcaggcagcaagctggccgtccacttcgcagccgtggaggcccgcttcctgcgagcatcgttcagctcatttgtggatcttatgggactcgtgacgaagctcgtcgaagaatatggtgtggccaatgcagggcattcttgaatcttgatgaacaatctcatacacggcattgcggagttgattttagttcgcctgtgagcaatttggagttttggacagtctttaccagtggaactgctcttgatctgtgtcaagctagtgtagtatttgcccttgattggtcaaatcctattcggaacggttaattcttttcggcaatgccgttgtgaaatgtatagatgatgaataggtaaaaattatctatatatcctcagttaggctttctccacgagtaa

SEQ ID NO: 26845 - DNA, 1459 bp, Zea Mays
cacacagcgaccccgcaccttccttccattcgactccacactccactcccagcctcgcctcccctcgcctttttagagagagaaaccacggctgccggcccccagcgagctagagagagaaaccaaggccaaggagcacagcaccccgtccgtccccagcaggagagcgagagacagaagggtgtgcgaaggaaagaagaggcggtgggagaggagggcgacatggagaggccggcaccggtgaggaagtctcacacgtcgacggcggacctgctgatctggccggagggggcgccgcaggagtcgcccgccggggccacgccgccatccaaccgccggccgcatcagccgtcggaggcgctcaggaaggtggtgttcggcgggcaggtgacggaggaggaggccgagagcctcaacaagaggaaaccatgctctgctcccaagtggaaggagatgacaggaagcggcatatttgctgctgggggcgaggctgaagaagatgaatctgccaatgcctctgcaactcccattcggaccgctccaaagaattatcaggcaattagcaccataagccacatctcattttccgaggaagaaagcatttctccgaagaagccgacttcgatagcagaggtggcgaagcagcgcgagctgagcggcacacttctgagcgaggacgacagcaagatgaagaagcagatatcggacctgaaatccaaggagctgagcggccacgacatctttgctcctccggaagacccacggccacgcaactcagagaacggctcgacctcgcagaccccgggcaaaaatgtaagcaacttcaagttcggcgaggccgacgaggacggcatggtgaagaccgcgaagaagatccccacaaagaaattcaccgacctcgcgggcaatatcttcaagggcgacgagaccccccctgggacggcggagaagcacctgagcacagcgaagctgaaggagatgaccggcagcgacatcttcgcggacgggaaggccccctcgcgggactacctcggcgggatccgcaagccgcctggcggggagagcagcatcgcgctggtttaacagcaacagcaacctgatggacatagcagcccctacatcattcgtttctttctcctcgccgtcaccgtcttaggagtgatcttttgttcttcttctttttcctttcctttggaggactgatcgattggaacccccggcttgctttcctgttccccgtaacttgcgccagattttcgttgtcgatcccctctgatggtggtgttgtgtgggcatgacaacaacgatggttatctctaatttaacattgatttggcttggctactgtttgttggttggtcggtcatggcgtacctgatgcagcaacaacaacccagtggtgcactatctcatttcccgtgactggatgtctcagctgctgagggaggagaaggacgac

SEQ ID NO: 26846 - DNA, 4870 bp, Zea Mays
atgtcgatacatatttgcaagaacggttatatgccaggctatgaggtgtgggtgcaccatggttgggtcacccgcagatcaaggagtactggtgttggccttctgatggccgtgcgagggtccacatacatgatcaggcaatatataaaggagccaggattcaatgtagcgaatgagatggcatccatcaaccaggagataagacagattggtagaatgatggtcatatcaggcaatatattggagccgccggaatggattctgcaagcccaagacctggcctgtgatgtgcaggatttcacggatatctacacatggctgcaaagcaaatcgcggaggcgtgcccttgcacatataggctacatagcgcagctgaaggatcggatcagcagccttcgagagtggcaacagagaggaggcagcagcagcagcagcagccagcaggagcgtgctgctgccttgtccttctcgcggcgatcatgcgggccttgcgcccctgaggatgtgctagttggcattgatcagcccagaaaagaactttcggacctcattttcgaaagggaggatgttgtgcatatcgtgcaacagaagcccagggtggtctctgtcgttgggtatagtggcattggcaagacagccctggcaagagcagtctactacgaccgtagtgtccgttctgcctttgacgacgttgcttgggttgtggcatctgagtgcagccatgggtgcgaccttgtaagtaagatctgccagcaggtcaaggacgaacaagcagggaacggtgctgtcgtcgtccctgattgttataggttaaaagagattatgcgggataaaaggtttcttatcgttattgacgaccttcacggagctggcatgtggaacgatataaaaggtgtcttcagtgaaactcacagtggcagtcgaataatcgttaccacgagtattcagtcggtcgccgctgcctgcactcctgagccgcgatacatttacaggatgccaagtcttggtaatttggactctgaaaagctactgtggatgagggtcggcaggcatgcaagccgtacgcctgctctggagcatgctttaggcaacgacaccttgaaaaaatgcggcggtctacctctggcactgatcagtgttgccaatcatttgtgtcttgggaaagcattatttgaggagatggacagggttcttgccaaatgctatgacagcttgcctgacaatgctcacaggatgtgcttgctgtccctgagcacattccctcagggtcatgtgatgaagaggaagaggctaattagaagatggatagctgaaggattggctgtcgtcggagactgtgagctcagtgctgaacaagttgccggtaacatatttgatgtgttgattgacaggaacgttactgagcctgtgctgactgctggccacggttctcgtagtaaggtcaaggcatgcttagttcttggtgtgatcaaggacttcatcaacaaaacggcagtctcaaatgagactgtagctataatccagaacgatgagcttctccttcccaacaggatgctggtcgcccatcgccctgttcgtcgactgcttgttcatggaggcacaacaaagaaaagtgaagctgttgcaaaggcgatcggactggatcagggctgctggttgctgcgggtcttggacctggaggcttgccaggggatcgacaagagcatccttggcagcatatgcaagctggtgtttctcaagtacctgagccttaggggcaccgatgtttacggaatacccaagaaagtaaaaaagctccagtgtttggagacgctggacctcagggacacacgggttgaagaactgcccatccaagtcttgatgctcccacggttggcccatctgtttggcaagtttgagctacctccacagctcaagcatggtcatcgaaccgcaaggaggaggaggagtaggctgcaggcatttttctcccagagaagcaggctgcagactctttcaggattcgtcatggtggatgatagcaacagcttcgagcacatgatgataaccataaagtcactgaggaaggttaaggtatggtgcaagaattcaatctcctcccaccaagaacgccatctcgcttcttcccttcagcaacggctagtagcaggaaacagtaatcccctagaatctctgtcaattgattttggcaatgaatccatcaatttcctcaatgatgttggagctatcagtgcacttattggctctatgaagctacagggaaggctaacctcgctccctagcttcatgacttcgtacgatactacactctcccagctgcagctgtcctcaactggtttgggcatagaagccttgtccctgctgcagatcttacgtcggctggtttctctgaagctcgctcaggatggtgatggattttggggtgactgcttcgctgttaagaaggatggatttccaagccttttacgcctgtgcattcaggccagggagcttccccagttgcacatccatgaaggaggcatgagctctctcacctccctcgaactactctgtcccatgttcgctagtcgcggtcaatctgactctgactctgactctgactctgacaatctgtccccagttgcatttcggtacgcgtacgcggaaacctattcagagaagagatccaaacaagttctttcggtagagaagcccaaagcagttgatcccgggatcagcttcaaggaaccaagttctgagacaagatcagaaggaactgaaattcaggagattgattcccctaaaacgtccaaggaggctggtcccagcataggcttcaaggaaccaagttctgagacaagatcagaaggaactgaaattcaggagattgattcccctaaaacgtccaaggaggctggtcccagcataggcttcaaggatattattcttccggagaacacattcagaagaaacttttcgaagcaagtcaaaagtagatttgatctgaaacaacacttcaagggaatggagtacctccaatgtctcaatgagctggtactacatcgttctgttagcgacgaggtattggatgcctggacaaaacgagcaagcagtcacatcaataggccaaaggtgacaaggcaatgcacaagagcagcgctgtcgattggtagaggcccgggaacagcgaagcacgagaaagaagggcagcacagaagccagctcatgaaaaatagaggttcagaaacagcaatccatgaggaggtagcagagcaacacagctcagtagaaacgagccgtgaggaagcaggattattccaagaacagacctcagatacaagtcacaaagaagaagaagaagaagaaggagaaggagaagaagaagaagaagaagaagaagaagaagaagaagaagaatgtactagtgaagtaggagcgggtaaacacagctcagtaggaacgagccgtgaggaagcaggattattccaagaacagacctcagatacaggtcacaaagaagaagaagaagaatatatgagtgaagactgggcattaagtcaaccatgcgacatgctcattggcaacaggatgaccgtacgatgtctaggatggccagattcttggcgactacgaagtggcatgatatcttcccccatgctgatctgcaggccattgggtccgtgacctcagatcattgtcccttacttatgcaaggtttatctacctttagtttctatagggggtttagatttgaagttttttggacaaaaattgatgggttcaatgaggtggttcagcaagcttggacatctagtgttcgttcttccgatgccattcttaggctgcatgtgaagatgatccgcacggctaaagctctattgatctggagacgaaagacagtaggcaattttaaagatcaattagcaatcattcagaccgtccttactcttcttgagaaagcacaggaatccaggcaactttccggggacgagctagagttcagaagaagtctaaaaatgaaaatccttgggctagtgacagtccaaaaggcaagagctagacaacattccagacttgtctggatgcgtctgagagatgcaaacacaaaaaaaattcatctgatggcaaataatagaagaaggaaaattttcatcagatcgctggttcgtgatgacaggttgctcaccagtcaggaagacaaactgcatgaggcccaccatcatttcactgaagctattggtagaaggggtgagagacagagggccgttcggtggggtaacctaggctatagtccatttgacttatcagatctggatttcttgttcaacgaggatgagattaaaaatgtggttatagggatgcactctgaaaaggcgccgggtcgagatggttttatagggatcttctataagagttgttttgagctgattaaggatgatctatcaagtgcaattcatgatttctatcaccatagatgcaaaaacctaaacctcgttaatgaggcaaatatcgcgcttttacaaaaaaagggagggtgctgacaggattgacatgtttaggccgatcagtctcatcaatagcttcataaaaatattgaccaagattttagcaaacagacttgcgccaagaatgaatgagattgtctccactgcccaaaacgcgttcattcaaaaacgttcaattcatgataattttctctatgtccaaaaagttattcagaaacttcataggaacaatcagccaaccctttttgtcaaacttgacatatcaaaagctttcgattccatcaactgggcatatctgttagaggtactgagagctctaggtttttcccagaaatggagaaattggatcgcaacaatattagggtcttcctcttcaaaaatcatca

SEQ ID NO: 26847 - DNA, 3048 bp, Zea Mays
aaaacatccgcggctagggtttaaggattttcttctccgctcccccggcccccattcgcacccagcacagctacagacggtctctatggccaagaaaggggcgaagagaaagcagcagccgccgccggcggctcccaccgcgaagaaggggagcaaggctgtgcccccaccgaaggctgcgaagagagcgcccaagaagcaggagcttctcgagtcctccgacgattctgatacggagcagcagctcctggaggaggcctcccacctcgacgtcccctctgattccgacgccgaagagctctctgggtcggacgctgaggctgacgagctctcgggctcggatgccgattccgacggaagctcgagcagcggcgacgacgtggaggatgaggaggaggaggaggaaggtgatggaagtgatgatgaccccctggcggacgacttcctcgctggtagcgacgaaggaagcgagggtggtgactctggactggagtcagacgagtctgatgacctcgaggcaaaatcacgagcaattgatgagcagaaaatcaaggcggaagaagatgcagaggaggaacttcaaaccaacataagatcagaatctgatgagttcagattacccacggcagaggagctggaggaagaggcacacagaccacctaacctaccaaatctcaaaaggaggatttcagaaattgttcgagtgctctcaaacttcagcaagctgaggcagaaagatgttccacgaaaagattatatcgaacaactgaaaactgatatcatttcatactatggatataatgattttctagttgaagcattaattgagatgttcccagctgttgagcttgttgagttactggaagcctttgagaaaaggccgcccgagtgcttgcggacgaatacactaaagacccggaggagggatcttgctgctgctcttataccaagaggatttaatttggacccgataggaaaatggtcaaaggtaggattagttgtctatgactccaccatttcagctggtgctactactgaatatatggctggtcattacatgaaacaaggtgcaagttcgtttttaccagtgatggcacttgctccacaggagaaggaacgaattgttgatatggcggctgctccaggtggtaagactacttacattggcgctcttatgaagaataccggaatcatctatgcaaatgagttcaatgagaaaaggttgcatggacttttgggaaatatccatcgcatgggtgtgacaaataccatagtttgtaactatgatggtaaagagctacccaaagttcttgggatgaattcggttgacagagtattgcttgatgctccctgcacaggaactgggaccatttggaaggatctacaaattaaaacatcaaaggacattgaagacatcaggagctgcgcctttgtccaaaagcaattgctgctagctgctattgatttggttgatgccaactccaaaactggtggttacattgtttactcaacttgttcgataatgattccagagaacgaggcagtaattgactatgcacttaaaaagagaaatgtaaagcttgtgccttgcgggttggattttgggcgtccaggattcatccggtaccgggagcatcggtttcatacttctttagaaaaaacaagaagattttatcctcatgtcaataacatggatggattttttgtagctaagctgaaaaagttaagcaatacaattccggtgacgtctgagccgtctaaagcatctgaagaagcagctaaggctgatggtgaagatgagaaagctatttctaatgaacaagagactggtgttcctgataaagatgagaaaactgttgagataaaaaatcataaaaatgtgactaataaaagaacaagtgtcaccaaagagactggaagccataaacgtgaatccaataagccaggaaagcatctcaagataaataagaataatgctacaaaagaaattgatggccctgagagcagtgaaacaaatagagatgggaaagaagagcatcgcgtacaaaccaagaaaatgagtcacaagaggaagtttgcttctgatagatccaaaaaatctggccccgagagcttctcgggtgtcaaagagaagagacaggtcagtgacaagaagcggaaaaagaaatggcaattcaagctgaggcgtgactgggaagctgaaaagaaaggtgacaagaggaggaaggtatgaaggagtattcagatgtccacaggccccaatgaaatttgatgggtgtgtaagggcaaccgagaattttgagcaagcacgagtttgcagccaccgaaaattttgatgtatgaaatagcgattgtagtttattattttttattcagtgtacgtctcaagttttatctttaatgagtgacatatctggcagggaaactgaagcatattattatcttgctgaatgctatgtgaatcctgctgtacgtgttataaaaaaaaatcatatctgagatactagctgcaagaacctgacttctagatactgtgggttctgaatagtttcatcatgtggcttgtttggagatctagatcatgaaggcgcagtggcaactgattctgaagttcacgtttggtttggagtcttggagacaaggtgagatcagacatgtcctttagctgatcgatgtttgtgtttgataggagtgatggaggtggagagaatgcatggttgtttgttttcagatcagacatgtcctttagctgatcgatgtttgtgtttgataggagtgatggaggcggagagaatgcatggttgtttgttttcagtaattattgttcacttttccaatagagggtgcgtttggtgcttgaacagccgtgtccctccaattttaagggatagctaagatagtcttattttaatcttgatcttgaatcaaataatcttatctgagagtatgttctgccttgccctgttgttattgcaacaaaacatgctccgtcgatttcagccttgatataccgaacaagggcctcaaagatctgaagtggtgtaaggg

SEQ ID NO: 26848 - DNA, 1175 bp, Zea Mays
tcatgtgtcccagttacctcttttactgtgctgctaacgactttacttgtagtaaaacccaaccggtttacatgatcgattcctcctattctctactggggtgagcattggtattctatggtcttctctgtcaaacaagaaggaatttgatacgctgaagggcacactaaaacgaatggaaaacttagttcaggatttacaagatgaactggagatgaaagagggtttaactgtgaaggaattgcctaatgaaacttctagcgaacatgatgatgataatagcaaaccacaagtagttgattcagaggcaatgagcaaaattgaagcggagcttgaagctgagcttgcaagactggaactgaatatcacttcgaaacgtttggaagaagaaacatctgacttcaatgagattacagcagtgaatgtgactatggcagggacagcagggaaagttccccagactacacatgtggagcaaactatcccgtctcacctagagatctcagcattcgtctccacaaggtgatccaacgtaggcttgaagaccgagtcaaggagcttgaatcatcaattgcccacagacagaagcaggcgcaactacagatgatggtgactgatgaaatattctctgaaccgatatgctcaaacagtgaatcaggttcttcaggacgaggaagtcccattttcatacaagaaattagctccttggcagaaccatattgtctaaacctatctggagacgcgcttgaagcttatgacgaagcttacgaagaattcatgagaattgcggactccccttgcactacaagtacaaatgggaaggcacaggcaaccgaagattacctggtagaccgtggtttaatctggggaatggaggacagctctacgaagctgaaagaagtacccacttgggagagagttctaaagagcacagatcctaacagggatcaagagagcgatagagatgagtcggacgacgaagacgacgactgtaaagtgctgattcagcagattgtagagagaactaaacaaggttcccctgtacttgttaacgctcaaaaacttctgttttctgtggatcaataggccacttcactatacaccatttatttttgagatatagcatgtagtgtcgaattattattgagaaaggaaaattattaattgttttgcgg

SEQ ID NO: 26849 - DNA, 8314 bp, Zea Mays
caaaactctgctcctcgcttaaacccgcgagcctccggacccggatgttgttccggttccgcccggccccctcgtagccatcgcctccttttagcgccgccatcccacctcgccggcggccatggcgaccccgtcttatgcggcggtgaagtgcctcaacacgtcctcgtccagccgcaagcgtttctcgtttaagagcttctcgcagcgggtggaggagatcgacatcgatgtgtaccgcagcctccacacactgaaggcggagccatccagcggatcgtccttcttcctcgacgcaattgtggagtggagggagcttaatactgcagaagacttcatctcattttatgaggagatgataccattggtacaaacacttcctcaaattgtcttgcaccgggacaagctcttttccgcacttctacaaagggtaaacatgagtgcaagattgtccctggagccaatactcatgttgattgcagctttctccagggatattctagaagattttttgccttttttaggaagacatgctagtgcacttttatctcttcttaacgacggaggtgatcgcgaccctgaaatcttggagcaggtcttcacatcctggtcgtatataatgatgtacttgcaaaagtatctagtgaaagatactgtccaaattcttaggatcacagcagcgttgagatatttcccgaaggactatgttagagaatttatggcagaatctgtttcatttttgctgaggaatgcacctaataatcagctaacgcaaggtctactgaaagttctacttgaggctgctaaacaaccatcacctgcacggatagacggggtggtctctttgctgtggcatgtcatgaaaggaacttccacaaagctacactcaaaagctgggcaggtcttgaagttcttgttgagcaagtcaattgtttccactctccgtgataaatttcctgatgataaggtgaagatgattaaacttgttgagttgctggttagtagatatgtgttccctggtagcaacataacaggatcttcttcaattgaggttcttggaagtattcttgactttatgctttctgttctggatgttccaaccattttgggcaatttgtccatcatatcacctttctatgccccagtgttcaaacttaaaaatccgagggtgattgtctttataaagaaacttttggtaaaaggtccccaagttgcacaacattttgaaagtcaaatattaagtgcaatggataatttcattgtaagttcacccgaggatgtcatatttatccttttaaatttctttaaaggatcaaagaagcaaatatttctttgtagcactgatggaaatcatctggattcagtggagaaaacttgcaagttctttgaatcaaaattttctttgtggatagagttattagatgatacagccggcactggtaatcgatctagtaaccagttggtttttctaaatggcataaattcaaaggatttacatgcagggaacatgaatggtcttccaatgactacctggagaggtctacttggtgcagcattgtcatcgtaccacaaactactgttggtcaacaccagcagaaattcagaatttagttttttcttatcgcttgccaagagtcacagtacatgcccacaagtactgtctgctgtagctgaatatttggattccctgcaaggagtatcatccatggaagtgacaaaagaatttgatccacaaaatctcttggagctgttctccatctttgctttcaatttgagcagtccaaccaaggatgttcggattttaacattgaggattctatcatattttgtgaagatggatcaacgtctaatcacagatgaggagcgaccacacaagaggcagagaacagaagtttctggagaggaagctgttgctaaatacgctaatgttgtggatattcttttgattattgagtcaatgccaatttcagtatctactagccgtaaaattgctatcttcatttctcggatacaaatgagtttatcttccaagatggttcatgatgattacatacctcctctcttacatggtattattggcatattgtacaatagatttagtgatctatggccacaaacactggattgccttgctgttctcattagaaaacacaaggagcttgtttggggtcagtttgttccgttcattgcaattcaccaatcaaaaggactgactgtgaaaaatcaggagaagctggaagctgcaacccaaccacagtctatttttgactgcttcaacttgtatcttgctatggactttgattgcacaccagctgtgaccgtggctaccttattgcttcaatcgctccaaaggattcctgatgttgctgaatcccgctctcgacaacttataccgctatttctcaactttatgggctatgatgatagcagcatctttagtgctgattcatatatgcctgaaaaatgtaaaggcaaacaatggaaagcgattctaaaagaatggttaaacttattgaggttaatgcacaatgcaagatcgttatatcagggcaattttctccaggaagtactaactaaaagggttcttgatgacagtgatcctgaaatacaagcaaaagcattggattgccttttgaactggaaggatgaattcttgatcccgtacagtcagaaccttaaaaatctgattgatgtaaagactcttcgtgaagagctgaccacatgggcagtttcacatgactccttgtcaattctgaaagaccatagaagtcgtgtggttcctctggttatccgcgtgttggcaccgaaagtaaggaaactgaagctactaggttctcgaaagcacacaggtgccagtcatcgaaaggcaattcttcgtttccttttgcagtttgattcaaatgaacttgagctttttttttctttacttctgaggtccttgatccctggcagcctccagcttaaaatgtttggttctcagccagacaaccttcttggaagtttctctgacattgttggaacttcaacagaaatttgtgtagagaattttacatggaaaaaggcaaatggtttcattcatctggttgaagaaatttttggtacttttgatatgccacatataagcccatttcttaatgttttattaatcattgtcgctcgcttgctggagagttgcatgaggaatcttagaaatgagagtgatgggaaatatccttgcaaccaaacaaatgaccatggtaatggttgttccataaattctgaagtgggcaattctgtgaacgtggatgaatgctttaaagaaatgcatctagaaggccatatggagtcattatttattatcatgaagctactttgcattttattcaacaacaacaacatgcattttatttgccaaatgtttatatcttctcttaactaattgcaacagcaacctcactctatcacgcagacaagtgtatccatcaagcagttgaaggatttgaggtcttcatgtattagagttgtctcgtcagcccttagtcactatgaaagccatgagtttggagaaaacttctggggtgtttttttttcttctgtgaaacctctgatagactgctttacacaagaggcttccagtagtgagaaaccaagttcattatttgcttgttttatggctatgagccggagcccaaaattagcaccactgttggggtcaaataatcttgtaccagctattttttctattttgactgtgaagacagcgtcaggatccatcaccacctatgcacttgagttcattgagaatctgttgaggttggatattgatttgcagcagcaagatgaacatttagtgaagaaagttcttcttcaacatatggatgttcttatccatagtctccatgattttgttaatcatcgcaaagagctcaacaggagatctggtacatggcttgggcaacgtgaacttaggctgttcaaattattgctaaattacatcacagatccctcagctgctgataacttcatagaccttattcttccatttttcagcaagaaagatttgaactccgacgattgtttggaagcactatgtgttgtgaggggaataattcaaaatctgagatgcaaagtatctgaaaaagttctaaatgcactgaacccattacttgcaattgttggattggaactgcgactatgtatctgtgatatttatgctgggttgtcattgaatgatccttcgatgttgtttctggctgggttaataggagatctgaatgcagtttcagcttcagaacttggtgaactagattatgacacaagacttaacacctatgataaggttaggccacaattgtttcttggcttgacagaagagcatgtgggcgccatattatctcattgtgtgtatgatatgtcatctgaagaattaattttgcggcaaagtgcatctagggctctgcagtcgttcctggacttttccgcctcagttatgaataatgatgtgtccaaatactctattgatgataaatttagagagaataataccagaagcatttgcacgatgggctgtattcagaagatattggaaaaaacttatctgcacaatatgggagtagcaatgactaaagatgtatcaattcaaaaggaatggattattttacttagggagatggtctccaattttaatcatttagcatccttaagctcatttaggcctctctgtaaggtggatatagaagaggattttttccacaacataactcatttacaggctggtaaaagatcaaaagcactgttgctttttagacagggaatcaaggaaaacaacttttcagaggatatcactatgaaagtctttgttccactatttttcaatatgttttctgacgtaaaagctgggaaaggcgaacaagtcagagatatatgtttggatacactatctgctgttgctgccaaagtgcagtgggaacactatagaacaatattgaagagatgcttccgagaattaaaccttagacctgataagcagaagatcatattgaggctgatttgttccatattagatgcattccatttcatgaaacctgcaaatgatgcctcaggaaattctgatgctttgagtgaagatattgattcttcccttacattctctttggtcacagtctcttctgataagcaacagtacatgcaaaaggtagtgtttccacaggttcaaaagttgttaggatcagatccagagaaagtcaacgtcaacataaacctggtagcactgaaaatacttaagttgctaccggtggattattttgagtcccaactttcaagcatcattcatcgaatctgtaacttcctcaagaatcgtcttgaaagcatacgtgatgaagctaggtctgctttagctgcttctgttaaggaactggggattgggtatttgcagtttgtggtcaagatattaagagctatacttaaaagaggttttgagttacatgttctgggctacacacttcattatttgttgtcaaaaaacattactgctgatatgtatggtaggcttgactactgtttagaagatttgttggcagtggttgacagtgatttacttggagatgttgcagaacaaaaggaagttgaaaaacttgcctccaaaatgaaagagacaaagaagagaatgtcgtttgagactcttaagctgattgctcaaagtattacattcaagaccgatttactgaagaagataatctcacctgtttctttacatcttcagaagcaacttactccaaagttgaaaaccagacttgagatgatgctacacaacatagccttagggattgagtgcaactcatctactgaaacatcaaacttgtttatcttcgtatattgtcttattgaggatactattacaggaagcagatctgaatgcaaagagaatacacaatctagtcctgatcaagacagtactgtaagaaagaccttcctgggactaggtgagagtggatcacagaattcttatatacttaccaagtttgcacttgacttacttcgtaatcgtctgaagagcatcaagcttgacaaggaagatgaacaactcgtgaagatgttggatccttttgttgaccttctgcgaaagtgtatgagttcgaaacatgcaagtgtcctctcagccacatttagatgttttgccttgttggtgaaacttccgttgccatctctgagggacaatgcaattactataaaaaatgtacttatggagattttacagagagctggaaactccaatggtcatttagtcacatcttgttttaagctacttgctgatctacttagaggattcaggatttcactttcagataatgagcttcagatgcttgttcatacccctatgtttgtagatcttcagacaaacccttcccctgttgccttatcgcttctcaaaacaatagtcaggctaaaattggtttctcacgaaatttatgatatagttgttaagataggagagttgatggtaacaacattaactgaatctatacagcagcaatgcattcaaattatgctacaattttttctgaactatccactttctgagaagcgcttacagcaacatattgactttttcctggcaaacttaagttatgaacatccttcaggaagagaagcagtgcttgaaatgctccatgacattcttaccagatttccccagaggattattgatgagcagggtcaaaccttttttcttcatcttgtagttgctctagccaatgaacagcatcagaatgtgtcttcaatgatccttagagctattcaaaagctgttaggacgcattggtggtcagggaaagagttacatttatgagtattcactttcgtggtacactggtgagaagaaaagtttgtggagtgcttcagctcaggttattggtttacttgttggcgatcacacattacaaatgggcaagcaccttaaaagtattctggctgttgttaagaaaataatggaatcatctattattgcttctggagctatacaattaggcttatctgatgaagctgccctgccattgtggaaagagacttactactctgttgccatgatggagaggttacttcttcgctttccggagttgtattttgagaaaaacatggaggacatatggataatattatgcaagttgttgatccatcctcattcgatgttgcgtagtatttcaagctctctggtagcatcatattttgctacagtggagaagaggaaacatgaacagaaattggatgccccatcatggttgcttgttcaaccgagcaggctattcataatagctgtttccttgttgaaacaattgaggagtgagctgagtgatactacggcaaataatctgattgtacagaatgttgcatactcagtctgcaacttgcatatgttgattaggcaatcgacctccacacatcagttttggtctagcattagttctgatcgtggtgctttccttgagggttttgaattgcttggttcaagaaaagcaaaaaatatatttctcctttgtacttcaacatctagtgatgtatctggatctagcctcgacaccaacgaagagcctacatctttgttagtttcgtcaatcctaaagaagatgggaagaattgcaatgcaaatgcaggatacacagataaagaacgtgttcaattgcttcaatatgatttcatcagctcttggtcctgatgaatcactaacctatgctgatcacctcttggccccattgtataaagtttctgaaggatttgctgggaaagttgttagtgatgaagtgaagcaactggcccagggggtccagaacaagttacgtgacctgattggttccgagaaatttgttgaagtctacaagagcgttcggatgggcctgaaacagaagcgggacggtagaaagcaggcacagaagattgttgcagccgtggacccagaacgcaatgccaagcgaaagcagcgaatggcagccaagcaccgggaacacaagaggcgaaagataatggcgatgaagattggcaggtggatgagatagcttggtatttaggctctgcggaattcggtgaatcatataattgtagaggataatttttcgtgctacaagtgctggcataaaattatgtttctgttttatatgctgtctcactgacttactgcccgacgtaattttattgttgagttaccgaaccataccgtaagtaaaaattaagaggcataagcaatgaagacatagaattgattgaattatatttttttggggtggatggataagtaacaatatattattaaatgtgcaattaagagttttctggctgaggtttgc

SEQ ID NO: 26850 - DNA, 1048 bp, Zea Mays
ttcaatcccagcaacagccgccctatcctcctcgtcagccgtcaccgccgccccacagcctcgcctctaccatcgcccccgccggtgctagctgcatccggccaggaggtcagtgcccggcactagccgcatctagcctggtgattagtgctccacctcgctccagcctccagcccacgcctataggggcccctgcctagcagccagccactgtcggctaggtggtcaatgcccccgcccgccgcccatgccacgccgccagccggccagctggctagccggcccgccactgctccactgtgctccagtagatgctcgattgtttgccggcgatggtgcagaccaacctctccatcgacaagattaatgccatgcttaaggcattcgaccatacgagagggttcatgtagcatgattaccaccttggctagaggcacaacatgctcattatgtggaggttgtcttaggtcactggaatcaaaatgggaaacctcctatgcagaatgttttgtaatatgtttttcataaggcataggaaaaattagcataggcaaagaaatgggtcaaacctcatgttgagactgctaagatgaaatggattcctgttaaggagaaattggttctcctcaagaaaatgtagaacataatgtacaaaaggtatcaacaaggtgttaatgaattcaacctcatattgagattgctaagatgaaatggatttccgttaaggagaaattggttgtcctcaaggaaaatgcagaaccttatgtacaaattggttgtcttcaaaatgttggtcatgtagctgcaagcctacaacaaagagaatcaacaatggtggtgatgctacacatgtagaagtagcaatgttggtcttgtaaatccaagatttggttgttgatgaatgatatctatgataatatattgctaagtatatgtgatgatcattaattgtcgtttaattataatgagttgtgccttttgtgccacattgacattggtgatagttaaaaattaaaatggtcttgattgaccaaatgttgtgatgaac

SEQ ID NO: 26851 - DNA, 3207 bp, Zea Mays
acgacatttggcgtagtctggttgcttctagaggatggcgggatccgaaatctgtgaccctccgcgtcatctgaaccctagggccacggcccgccaccagtagctcgctcggctccagatcccgcgccacaccacatagcatggcagaagatacagcgtagcaaggtccggacgttcaccagagggcagtggggatggggatggggccggcccgcgtgcgctctccgtgcgggaggcctcggcggcggtgccgctcccgcacccatcggcggcggctgcgctcgaccttaggcggcggggcggccaggctggcgctgtgacctgaaacggtggcgggatggggaggaggaaggagcacctagagagagtccgagtggaggcgtactgctgggacgtgttcaagccagtggagatggtggagatcgacagcatggagaagcttgacgacgcgttcaggatggcaagttggtgtcagaaatgcatctacctaatgcccagaatggagaagatagcaggacaatatcctgggttactcagaccttactcctgcccctctctcctgtttattctattatctggctccatttgtgcagcacaaaacttagcactttgtttcattttggaatattcttgcttttagtttctgatttaattgtagcttcttgctaagtgattgacattatctggttcttattcatttcaagttgttctttcaaaaaaattggaataaaagtcattttggaatcgtgtggttctattgctgctagcttagtaaggtaaaatagcctgacctcgtcaacaattagttctttttaggagaaaaagatgcaacaaatgaggattgatgcttcccgcaagagtacatgatgtacaatatatatctttagatggtttcattgttgtagctgatactaagaatgtagcttttttctttattcaaggtggtcgcagcgatctgtgattgtttatgcccaaagcgtagggttacccgtcttgttagcgctaccttagtgccgcttttttgaaccctagacatctcagaagaggggaagcactcggagatgaagctgaagcagagcaaacgtgagacgcaccgtgggcattctctatccaaggggaaggtgtgacctcaggcctcttctgtgcgatgcattactcttaatccgtgtttgcgttggttgctttgaattaattgtcatgtgcttatttgttagcagccaaacaaaaaatcgctcaagttatgataacccgactattccttgacctattatacctgtttccttataacttcttatgattgcacatcataattacttgagaacatatatttgtgaattgctttggtgtccccaacaaactattgtatgttccataacactatagacgtacaaatagtaattggaattgtttctgtacagagtaataatgaacatgcattggataaacagtaggaaacaaaagaagggcaacatcattactctgatcctcgacttacatttctatttgtttttccttcgtacagtacattccctgtcatttgtttgaatgatatgtcaagctttgaattctccaaatcatgcacaatcataagaaacacgtgcagcttattaggccacaattttccatgctttttgatcagtactgaaccccataaatggagactacattgtgtttgacaaaaaacatgcatctttaagtgtcgtgataattttttccacaaatcaacaaccataacccaaaataatgtatcactaatatttaaagctgctacttctagttttctctagaaacctttatgcgtattttgtggacttgctcctactaaggttttgctatttgcaaatttatatagatcagtctcaccattcaaaaagtgcttggatgaaagggaaaaagttaccattcaaaaagtgcttggatgaaagggaaaaagtttggatgaaggcattggtctataaatttttagaaagtccaatatgtgctaaatcctatgtattcgacattgtgtgtcctaatctccccttatcaaaaatagcatagagaaaaaaagaataagtgcaacacaaatgcacaaaaaacagtcaatgtttcggtaaaaatatgctttacactttgacagaaaaaagaggaatatagaataagtagcataaacaagatacatcaaaaataataatgagagtacaataaaaaatgtaggtatcaagatatggatcccaccttgtgaccaaacttacttttattttggctttacagtttgatctatggaatgctaagttcttttgcttgccaactttgctcactcaagcaacttctttctttaaagttatcctattattcatgatttttatttggatgttttggaccttttcttcaaacattagcgagatgcagtgctagtgttgttaatatacctacttgcaggttgctcttttcttatattatttccctatgtgtcgtgctacattataaatatcaagtaattttaatggtacttcttttctgtaagtatacacattaatccttgcaaaagttaaatctacatgtgcatttatttatatatctatatacgcagtgaactttatgtactcaatctaaagatcgttctatattcaatatatctagaatccaatgtggcattttattagcttttagataccaaaccttgctattgactgttcatacatatgtttctaatcactggtagacttcataacttttagacatttttgacctttgtaaattcatattacatattgtattcagtttcttatctcaaatattatagaactatattattataggttgctggaacatgatctggattcaaaatggttggctattgttgatatatcttgttctccccacaattttatgttctacatgagtggagagatcatatagctcatgagaaagatgagggtactggttagtggttgtatactgccaaataaagcttgaatcgagataggtgttgttgtttttttctttatatcctgttataatggtgcaaaattggatctacaactttgctagctcccccccccccccccccaaaaaaataaagcagatacctacagatgttggacattgtaaaagaattgtaaaatcaaaatatccatatgttgagaacaatgttgtcgtaatcgcttaccttacactgttcgtactgcaattgattattcttatgcctttaaagaagtagctgaa

SEQ ID NO: 26852 - DNA, 1465 bp, Zea Mays
gccatattgctggaggtgtttgacgaagggccataccatgcaggtttgcaccgctgatctgtggtgtgacatttgtcaggctccctctcacaacactgaacgctgtcagaagttccggggtaccaaaccagcagctctcacggctggctatgcagtggatgggctggggttcttttatataccccatacttcttctaccaagcagcctgcagactccaggttggctagtataaaaattgatggagggtgcttatcagttcctcaagtggtggctgaattggagagacttgaatcatatgattgagtggggggtggtgcagacgaagttcaaagcttcgatgacaatagaagagaagtcggggcctaaagaggttaaggctactttaccaaaagtctggatccaattcacaggcattccaaatgacatgatggaattcttgctaatttgggcggttggatctattttgggggtaacaaaaactgttgatatgaagtttaccaaccaatatggtatttgtcgtcttcaagtgatggtgttggaccctttgctgatcccgcagttcattgaggtggtgattggtgaatgtttatttgagctgcaatttcgggttgaagaaaacatggatggtgacagcccagttccagtggatatggatgactttagctgtggggaagacgaaaataagtcggatcaattagaggatgtggttcgtgggggtaattctctgccccctaataatagtgctccagatagtggcaaatctgtttcaaagggtgctggtaatgatggtaatactggtaaaaagggagcggcgcatgatgttattagctcggtagtccagtatgctgatttgggtttgggtatgcaaggtgttgatcatgctggtaatcccactcaagctgttgtgccagcaacctcgtcgtgtatggctgtttcggtgccgtgtactccggatgtggcagctatggctgctgttccagaagcaactatggggctaaccgagtcaggcaggagcaaaagaagaaacaggagcgggaatggggacagcatgcaaagagcttcaaagttgaaggctgctcgcaatttagatgcggtcctctctacaggttctttttagaggtacacactggcttagattctgggcccagctacaaaaggatgaagctgatggagttttaataaagaatgtctgtcgtcgcctggaatcggtggccatgcaattttgtgttaattttggttggaggttttctaataggattgccttgtaatcatctcactggttttattaagtttaaagaacctttagtgtgttagtgtgtggctgtgtggaggggtatgtcccttcattgagcagtgtgatataacaatttgtgttggctctaacctcttttgaggggaaagccggaactttctctccattatcaaaaaaaaaaaatcaatacccttcattccacttgctcccaa

SEQ ID NO: 26853 - DNA, 1227 bp, Zea Mays
ccagttcatagccgagccgcaggagagaagagaagcaccgcaaccctaggtcgccgcctcttttcctctccactcgtccgcgggacgcgacgcgacgacaccggagggttttctgcggggatttgtttgtcgccaactcgccggcagccaagatgaggccggtcttcgtggggaacctggactatgacacccgccactcggagctcgaccgcctcttctaccgctacggcagggtcgagcgcatcgacatcaagtcaggctatgcttttgtctactttgaggatgaacgtgatggcaatgatgctatacgggctcttgatggttatccatttggccctggcagacgcaggctttcagtagagtggtcacggggtgagcaagctggtagacgtgatggcaacaaaccagaagcaaatactaagccaactaggacactgtttgtcattaactttgatccaatgaacacaagagtcagtgacatcgaaaggcacttcacaccatttgggaacatatcaagtgttcggataaggaagaactttgcttttgttcagtttgaaactatggaagaagcaagaaaggctcttgaagctactcatgctaccacccttttggacagggtgatttctgtcgagtacgccttcagggatgatagtgaagtgagtgataggtacggcagcccaagaagaggtggtggctatggtaggcggggtgatagcccagtgtaccggtcacgtcctagtccagactatggtcgcccagcaagtcctgtatatggttcatatgacggtcctggtcctgttcgtgatcgctatcggagatctcctgcttatcgatcaaggtccccacctgcgaaacgaagagcatatgactaatcgagaaccctctgttatgccatatatggcctaggaacaccctgtagcaagaacttactgtacctgtaccggagcgtcaccttaatgtccttaaattcccgtgtttaatggtctgtacatggttatgctatgcgactgtcaggtttcactgcatgcaatattgtcatttggctgctaccctttgtttggccttgggatgctcgatctctattttcagatttttaccgtccttgtcatccgctgctatctgttaatagagtgcattggcgatttcatataccggccaagcgtgctagttccaggtttgttaatgggagaaaaatcatgcactcggctgtagggtagccctgttgcc

SEQ ID NO: 26854 - DNA, 2236 bp, Zea Mays
cagaaaagggacgggaaggtgccaataaattgcgaggatgccgctttatctcttctcctctcccgccgccgccaagctcgccaccggcccacacgcgtccctgcaccggcggcgccagttcctcttccgagttccccaccgccccagccgccgcgccccactgctaacttcggcggctgagcgtccagcagggcgcaccatggctactgcggataccggagcgtccacggtgaccgattcgaggctccgagctacaggagtgaagcaagcactgatatcattgtcagataaaacagacctggctaatcttggaaatggtcttcagcgtttggggttttctattatttccactggtggcacggcatcaagtttggaagcatctggtgttaatgttacaaaagttgaagaaattacacagtttcctgaaatgcttgatggaagagtaaaaacattgcaccccagtatacatggtggtattcttgcgcgaagagaccaggagcaccatctgaaagcactgaaagagcatggcattgggacatttgatgtggttgtagtgaatttgtatccattctatgataaggtcacctcaggtgcaatatcttttgaggatggcattgaaaatattgatattggtgggcctacattgatccgagctgctgccaagaatcataaggacgttcttgtcgttgttgatcataaagactatcctgctctactggaatatctagaagggaaacaagatgaccctgatttccgcaggacacttgcatggaaagcattccaacatgttgcttcctatgattctgctatctcggagtggttgtggaagcaatctaataaagattcatttcctcccagctttactgtgcccctcacaatgaagtctacacttcgctatggtgagaatcctcatcaaaaggctgccttttatggtgacaggagtctttctctagtaaatgctggcggtattgcaacagcaattcagcaccatggaaaggaaatgtcctacaacaactatctggacgcggacgctgcgtggaactgcgtctcggagtttgagagcccgacttgcgtcgtggttaagcacacaaatccgtgtggcgtagcgtctcggcacgacatcctggaagcgtacaggttggctgtgagggcagaccccgtgagcgcgttcggaggcatagtcgccttcaacacgacggtcgacgaggatctcgcgagggagatccgggagttcaggaggccgacggacggcgagacgaggatgttctacgagatcgtggtggcgcctgggtacacggcggagggcctggaggtgctgaaagggaagtcgaagacgctgaggatactggaggcgaagcggaggaggagcgggaagggcacgctgctgtcgctgcggcaggtcggcggcggctggctggcccaggagcccgacgacgtgaccccggaggacgtggccttcacgaacgtgtccgagagggctcccgacgcccgtgagctctcggacgccaagttcgcgtgcctctgcgtcaagcacgtgaagagcaacgccattgtgatcgccaagaacagttgcatgctgggcatgggcagtggccagccgaaccggctggagagcctgaggatcgctttcaggaaggcaggggaggaggccaagggagctgctttggccagcgacgccttcttcccgttcgcttggaacgacgcggtggaggaggcgtgccagcgcggcgtggcggtgatcgcagagcccggcggcagcatccgggaccaggacgccgtggagtgctgcaacaagtacggggtggccctcgtcttcaccggcgtccggcacttcaggcactgatcgacggcgacggtggcagcggagaccgtgacgacggacgatgggagggacctctatatagctgcgtcgatctggccggtggctggaaggaaggatctggcgtttcatcccagcgctgatgccggctggcgtttcttggctactagggagactctgatggtgctgatacaaccaaatgtcgcctctcgagaggatgggtcggtgggtcccggtttgtatatatgacgtcgtcagcctggcaagaggttgattgagcttaatactaactcttgcggtggatggaaatcggaaacggtcgctgaccggtgggatcgcacagtctgctgctagaagcatgcaaaggctacatgccgtgttattattgttattaatatttattgctgtcacgttaca

SEQ ID NO: 26855 - DNA, 2028 bp, Zea Mays
atcgattcggatcgccgttatatccccggagagtggagacttgatcgctgccctgcaacctaagtcaggatgtgaacctcatgaataaaaatgatgttgtattgatgagatggtgaaattagaccagatgcaaatagagtctattaatatttaatctgacgttaaaatattgaaagtaaggactcactttagtaagctatttctgcaaaagtatctaagttgatttttgctaaagcctctccttgattcccaaatccagcatatccttgagagtcttttctttagtcgggtaagtcttgctgagtaattccatactcagggttttattccctattgtttttcaggtcatagttttgtgctgctgatgatggtgttaagtgtcggtgggctcgaccttcttataagtctaagtaacccttctatacttcttaatgaggatggtcccttgagctagcatatatttcaaacttatacttttgtaatcactccgataaactaatgtaaaatttttgtaacctgtaaaatttggtagtaagatttacgctgcaacaatattggtgtgtgtgatttgtgttacttaatcccgcggttctggttgtaagtggtttatccgatgtccttgggacactcggacggatcctgttaagttatttggtgcacatgcatagtcgtctgaggtctttgagacaaggacaggtgcatgtgggcccaataacttgggaggttctgccacactggggctaggcatgccgcttttaaaaatttgctttgcttttaaagatttgctgacaagctgaagaattcgatacaggtagaatgctaatacatgagagcacaacacaactaattaatgtctgtttacatctaattttatacagatataagaggacaaataattgatgaactaatgctagaaaattgcagttaagaacactgtaggcacacaacaataatcaaaagtctgcaaatgtggactacaagaagattgaacgatttcagttaaatctgctataaccgataagagaataagtcaaattaatagtttgaagtgaagcaatgctatggcttataattgaatgctatttgagagactatccataggatatgtcatttggaaacaacatattcaatactgattgcttcaagtagaagataggctatctgtaatttctgaatcttcaaaagtttgcatccaatggcaaatagataccggaatgagctcaagtgatacatttagagcaatgattaattccatctacttctttgcaatatttaagcaaatgcatttctaacgttacaaatttgatcacttttgaggtatgaacatttagaagccgaagaccatggcggcataggtacacagtgccaacgttgcctccgtcgatgcggcgcagcagcctagtgtcacgcggtctcaacggcgccgcggccggcgccgacgccacgtggatggtcacccacgccatcgacgaggtcagagcagcagtagccgccatgggtagcgcgcagatgtggagcagtcgaatgagaaagacgggctggagcaccacagcaggttggtgttgctgctggccagcagccgctcctctccccaccggcgccgagaggggacctgtgacccaaggatctgtttttcggggggatatggtgttcgcggtcgtcaaggatctcaggctcaaccactccaaggacccatcggccatgtggttacgcaatccaaaggcctccctcaccgatttcatctagggtccagttcttgaaagggtgggaatgtgtccaagaagacaaaggcatcgacccgccaattcttcgctacaaattcaaacagcactaggttaagctgaatgcaaaccatcgagatggtccaggtcgaggacctccatggcacctacgttggtgtgggttatgccacctcatcgtgactgtcatcgattgggcctccgagtccaggagaatacctacgatgaagaaagagacatgctgcacatgcacgagatatcaaatgcagaatttacatttgcaccgtgg

SEQ ID NO: 26856 - DNA, 3349 bp, Zea Mays
aacactaaacagagctagggccagccgttggcgtttgaaaagccccgaagcggcagtcgcactggccgcccgtatggctcagattcacatcgattccgacatcccaaccgtccttgcccctccgctccgtgcttcttcagttcttcctctctgtcacccagtcaccctaccccgttcgttggcctccgctgcgaaatttaaaacctcccaagcagagcgacgcccagagaagccaagaccctatttccccatattattaataaaattggctttggtggaaaaaagccttcccttttggcctgcgcaattcgagattccggaggaccacggcggcggccggatcggggtggcggcgcggttcggtcgccgctgagcggagctgatgcgccgcgcctcctgtgagacaatggccacttctccccaagcgaaaaaaatctgctagaagaccttagagggttttaacattgggatggatatttgggcccttaccttgctttaagtggagattcagttttctgttttcacttaatatgacaactgaagagcgaaagactttgaagggcacagagtcttcagctccttctgttcctcctgatggaggagtcagcaaggaacctcaaaaaggggggagattatccaatgggaggacaactggtccagcacgccgctcatccaagggcaactggactctagaagaggatgacatacttcgcaaagctgttgaaacctacaagggaaaaaattggaaaaagatagctgaatgttttccaggtaggactgatgttcaatgtttgcatagatggcagaaggttttgaaccctgagcttgttaaagggccttggtcgaaagaagaagatgagatcattactcagatggtaaataaacttgggccaaagaaatggtcgaccattgcccaagctcttcctggacgtattggaaagcaatgtcgggaaagatggcacaaccatcttaatcctgggatcaataaggacgcatggacacaagacgaggaaatcaggctcatccatgctcatcaaacttatggaaacaaatgggctgaattgacaaagtttttaccaggaaggacagacaatgcaattaaaaatcattggcacagctcggtgaagaagaaagttgattcatacagatcatctggtttactggctcaatcccagggcttcacacctgttgaatacactgctggtggtttaaatgttgattcttcatctgcaataaccaatcaaattagcgaaggcagtggttttaatgtttttcgggaggctgaagattcgatggagttaagtcagtcttcgtttgccaagggttcttgctctcaggaggagcaaaatgatgtgactttgggatctcatttgcatgtgcatgaatctttgtgtccagatggttccactaatgatggcaatggtgcttctggtttacctgacattcatcaccgcttatgcacttctgacatggatcaagataaacacttgcaggaaggaatggatttggataaacacttgcagcatgaattctctcaaggaacggatttgcatcttgatgtagatgaagtgccaaacaactttgtgataaaaggtagccagtcatctaatgagcttgcagttcaatttcatgacacagagattatgaatagttcaaaaaatgatggagtgtctttggtaccacatgctataacaccatgtgttcccatcttacctagtgtttctggatgtgtgcataacataaatgtgatatacgaaatgggcataaaaaatgataattgtttccaatctgaaaagtgccaggatatttccattcaatcaggtgcatactcgtctgaagctgcaggcagctttttagcaccactttacccattgcagacatctgaaccagcaataatgatgggtggccctgtgtactatcagagttctgtaatgtcattaccaccaggctttatttcttctgatggtgcttctaatgcatctggtgtcaaatctgagacaagttactatcctgtttctcgccaaaatttggagattaaaacttgccacaatgcttctggtgatcctgaacaaaattcatatattagcagcgaagatgacagaaacaagacttctgaacctatgggcagaatatcagaatctgaaaagaaacagcaagttgatgttgaacaatcatgtttggagcctgcagcctgcattggaaaggaagcattatctagtcatggtgacaccatattaagtaaaaaggaggatgctggagctctatgctatgaacctccttgctttcggagttttgaatttccctttgtcagctgtgagcttgtaaactccagcgatctcccagaatatagtcctcttggcattcgagagttgatgaggacatccttgaacttccctaccccagtaagattgtggggctcccctactagggatggtagccctgatgctgtgctaaagaatgctgccaaaagattcatgtgcaccccgtccataatgaaaaaaaggcacagagatcttttatctccagtttctgatataagaactgacaagaaaccaaatactgaaagggattttatgagctcaggcatatcctctacaagagttgggaaatcttgcatggatagcgctgatgattcagctgatttagtttcaccgaaagagagtgcatttcaaaagaagctgaagctttgtcacgaaaacaaagaaaatttgaatgaaattgctgatcaaggagaaaatgaagccaatgcaaagcattcttcagggattcttactccgagcagtgttgacaaccataatacacataagcatggtccaaattttcgaattcaggagctaaataccactgtacaggctttgtctaactctaaagacataatattttctagatcaaagccatcagaacatgttgaaaaatctgcagcctgcattgatgcagattacgagtatttgaacatattggctgatactccaggtattaaaagaggcttagaatctccttctgcctggaagtctcctgtgttcacaccattccaggatgcatacttcatgagcccagcaagcagagcttttgatgccttaggattggtgaagcagattaatgagcagagtgcttctgctgtggaggaagcacatgaagttctggcaaatggaagcccatggaaacaacataacaaggaaaactctgacaaagaaaatatagaaaatacagctttgaagcatgagcatgtcacaagcaaacctccatcgatactcatgatggttgcatccaaatctgagtcggaggtatggagcaaacgaggcatttcattctgcagtcattgactttttgtaaaaagcgaatttttatt

SEQ ID NO: 26857 - DNA, 1962 bp, Zea Mays
cctcctaatactactaatcctttttcctctggagcttctgagtgaaccaaggatcagaaagaaggctctgcaaaatctgtcaatgcaacttaggaagtgttgcaatcatccctacctattcgtagagcattataacatgtaccagcgggaggaaatagttagagcatccggaaagtttgaattgcttgatcgtctacttccgaaattgcagagagctggtcacagggttttacttttctctcagatgacaaaattgcttgacgttttagaaatatatttgcagatgtacaatttcaagtacatgaggcttgatggatccacaaagactgaagaacgtgggaggttactggcagattttaataagaagaattcagaatatttcatgtttcttctcagcacacgagccggaggtcttggattgaacttgcagactgcagacaccgtcattatctttgatagtgactggaaccctcagatggaccaacaagctgaggaccgtgcccatcgtatagggcaaaagaacgaagtacgtgtgtttgttcttgttagcgttggttcaattgaagaagagatattggatcgtgcgaaacagaagatgggtattgatgcaaaagtaatccaggctgggttgtttaacacgacctccacagcacaggacaggcgagcattgctgcaggagatactcaggagaggaacaagctcactgggaacggatatccccagtgaacgtgagataaaccgcttggctgctcgaaacgatgaagaattccggttgtttgagaagatggatgaagaaaggaggctaaaggagaactacaaatctagacttatggatggaaatgaggtcccagattgggtgtttgccaatgataatgaaaccttacgcaagaaaaccgtggcagatgaattccggaatataattgttggttcaaagagacgtagaaaggaggttgtctattcggactcttttggtgatcagtggatgaaatccgacgagggatttgaagagattgcaaagatgactccaagggtgaagcgaactgcttattcgcctgacattcaagttgagtacaatgaaaggaggaaaaggcccaagtctgtggaaaacagcgcagatggcgcaagcaacccaacacggacacccgacaaaggaagggctggagtttcatcatacagcaaggatgagaccgaagatgatggtgaagacgaagtcatcaccagtggcttacagaagggtaacagtttcacatggaagacccttggaagaaaaaggtcaagccacttaagttcgtcgtcggactcaaaagggcgaccatcattctaatgtcagttgccttgatgcttttgctcgatgaagcccttctaataatggagtacccctggaggctagcagcgctaccatttcgaaagtaccttgaacctataaacttcaggatggaggctgtagctagcaggactaccattttgaaagtacattgaagctataaacttcagaattagtagtatactctggacttgttgccatgaattcgtaactcaaacgaacttaaattgcgttacagttcaagcctattttgggggtaaaggttattggtaaatagctggtgatggcttgccctgaatttgggctgtcttgtctgcacattccgttgagcagtcttcggctaatgcctgtccagattttactggtttatatggcaagcaaaactgtactaggtgctatctgatgtgcttccaccgaggcaagtcctcaaacaagtgtcatcttttattgtgtatagctagtagagttggctctgtgaatctatatgcacttacatagcctgatagacacacgataactacgtaaaaatagctttgtgcaaagataatttctttttgagttttcccctttaattaatcgcgttgaaactacgcgttcaaatttgtgcttccaagtgccaaacggaattcgctgcgact

SEQ ID NO: 26858 - DNA, 1570 bp, Zea Mays
gtgcctccctccccacgaaacccccttccccaaactaccttcgccgctctccttgatccgcaattttctcccacatctctcttctgcccacttgcctccatcttggcctccccctccactccccacccccgaacatccggcgccgtccacacccttgcaccccgactcccctcgtccttcgtggccacgatgggggcgtccatggcatcgccttaggggcgatcgatctgggagaaagtgctggagcacgtggcgtcgtaccaccagcagcaacggaggcagaagctacgcaagagcctcacctacaccggcagtgagttctcgttcgctgtccggggtcgtggggacgaccccgcctccacgtccgttggggcacagaacgaggacatgcctcttgagcacgtctttaaaatcattaggtaacttccagatctgcctagccccttgacgtttaacttgatgcccaatcggtagtttgttcattcagaccagcaaacacaactcatttgtttcttgtgaggctaggccaaagtttgtgcgaccgttgatgtgaatttcctctgggcccaactttggtatacataaattccattattgcctttaatttttttgtattctggtagatttgggcatgctaagagctaaggttgtttcatcttgcaacatattgacgtgctctatagctataaatgatatcaagttatttcatcttgcaacagatccgatggcaaaagtgtgtgtttatggttcctgagtcagatgatctttcttcagttttagatgtgatagatattagtatgaaagataaaactagaatgctatgtctgtcaaaggagctttcttcagtttcagaacacacctctccatctttcggtgctaggtggatcaccgtctaaacaatccaccaccagaaccgccctaccccaagatagctccatctcagtcgttgtacccattcaatggcgagctggtggcagcgatgtaggagatgatccatgacgaggtgcacaagtacatgttagtggacgacacctgccaaagatacacaatttctactgtttttcagttggagaaaacatttaagacaatattttctcgtttgttctccatatggggcttgttccacgccacttgaaggaagaagggaatggtggtgttaagttcggacaatacatctacacatcttggagcatcggcatcaatgttttcaatcttctcaaatttcaaattattctggtctcttcgtgcaaccataaaagtttattaagtcacttatctgagtggtctaaaagtctagcatatttttgttcctctgcctgtcgagacggatcaactgacatgaataatatccagtgaatactgcaagagctattcatgatctgccgtgaactagctagtatgatataactcagtttgtggagtgctaatgcacaaacaggaaataggatgatacttcatgtatatttttttatttcatgaaaatgaactataggatactgttcacaatccataccaagcttctgcagttatcaacatgttttctatgttcaaccttgttaacatattaaaa

SEQ ID NO: 26859 - DNA, 3754 bp, Zea Mays
atgagctcagatagagtcaatgcatatggtggttcaagacgagacgtatatggtttcattccaatgcagaagctgaggcgcaataacagtacctggagatttggtaacatacttatagtcttagctatgaatatggattccacagctcttcaatatgaaaaccaaaaattggtgcaacaactggaggtacagaagtccgaaatgcatgcattggagcgcaagttcaaggagcttagtgatgatcaatgttcttatgacaagactctgatttctttgaataaactgtggaatcagctgattgatgatttggttctgcttggagtacgggctggtggggatttggataatttgcaagcacttgaccatgaagagttatcagaagaatctttggagtcgtgtccttccgaggagatatttctcttaaggctcttgaagacaaacaacatcagagataatagtgacactagcttgttgaaatttgttgaagaagctcttgcttttcggtcttcagcaactgttactttgatgaagtccctgcaagagactatttcttcgcagcaagctagaagtgagtctttgtctttagctttgaatggacaaaagtcaaatgaagatgttattgttgcccttcgaaatcataatgattgcttgaaagaggtggcagagaatgcgagtcaagccatctctattatcaacgagaagcacaaaaggtatcttgatgagattgaggcttttaaaagcaaccattcaagggagctacaggaaatcaagcgtatttcaggtgagctagaggaaagcattgcagagcttgaggaaagtcaaaggaagttggttgtgctccagttgcagaggcatggttctgtaatggatgcatctggggcaaatgctgtgaatggtggtatttctactcataaatcttcagataaaagtatgagctggcaagacctcaaagatgctgttgacgcagctaagaccctcgcaggaaaccgtctattagaactccatcagactcaagaggataatctgatactatccaaggagctgggagatcttgaggggcaattgaaagatgagaagtatgtcttggtatccaaaccgtacatgattcttaatgataaactacaacatttgaatgctgagatagagcgttatagagggttggttgaagttttacagaatgacaaggaccagctcatgcaaagggagaaagaaatttctgcaaaagcagaatcgctcgacagtgttaaacaaaccattatcacatatgagaaaaaaattgaagaactggaaactcaaattcagatactcttttctgaaaagaatgatctcgaaaccaaggttgaggagactttgcaagattcaggtaagaaagacttcaagaatgagattcatgttatggctgcagcactctccaatgaactgggtatgatggagaatcagttgagtcgatcaaaggatgcagcttctgaagcacttgcattgcgtgagcaagctgaatcattaagatcattggtagctaaaaagattgaggaacacaagaagatttcggataaatacaactcacaagtaattgagatcaagtccctcaaggcattgttccactctgcccaaaaggttccagagttgcagataccttggcgtcgcggcactatccagatcacggcgtcgtgaccgccgtatcctctgctcgtatggcgtcgccacagcagggaaggcgtcgccatggcgttggaggttggcaaggcgggcgctgcgtctctacgcgcgcggaagacgagtgggggagcagcgcgcgggaagcgggaaatatgtcattgactgcgcgggaaatgagttagcgagcgcgcgacgagcagcatcgcgcagcagcaccttggaattcggcgttggccgcgccgctgcctccatccagctgctcctccgcctccatccggtggtccggcctgcatctctgagatccacccgccgacctgcatctccgagctccggcctgcgcttcttcctcccccgtgcgtcttcctctgcccgcccgcctgtaattcttcctccccttgcgtttgcgcttcttcctcccctgcgcttcttcctttgctcgcctgcctgtgcttcttcctccccctgcagttgcgcttccacctccctccacgccagctatgcgcctctgcctttgttgcatgtggtagtcgcaactcgccagtgctctttacaactacaagtcaggttgaggagttggagcaggaaaagcaggagctggagtttattgcagatatgtacgtgaaagaaagttctgagtctaggacaattgctgatattgaagaatcagaaacccgagctcgcaatcaggctgaatatttgaggagcaatctagaggagcatagtcttgagcttcgggttaaagcagcaaatgaagctgaagctgcatgccagcaaaggctttcctttgctgaagtggaactagaagagttaaggaccaaagtagatgcatctgaaagagatgttgtggaacttaaggaggcaataagaattaaagaggctgaaggagacgcctatatttctgatatcgagacagttggtcaagcatatgaagacatgcaaacgcaaaatcagcatcttcttcaacagcttactgatagagatgactttaacataaagctagtatcagatagtgtgaagatgaaacaagcttgtagttcccttctctctgacaagcttatgctagagaagcaactccagcaagttaacacttcactggagtcatctaaactgaaaattgcccgtggcgaagagcagatgaagacttgtgtagcgcaagctataaaaacttcagctgaaaacagacatcttactattagcctggaaaggattgcgctggagttatccaacacagataaggaactcaagtggcttcggtcctccgttggatcctctgagaaagaatacgagcaaactcagcaaaagatatctgagctgagagcgttactggagcacgagaggagtgagaggcggcggcttgaagaacaatatgaagaggtgaaaaatgaagttatggagctgacctctgagactgaagagactactgtccggaaacttgaggatgaaataaaagaatgcaagggtattctcaagtgtggtgtatgctttgaccggcctaaagaggttgtgatcaccaaatgtttccacctattctgctcgctatgcatccagagaaacctcgagattcgccaccgaaaatgtcctggctgtggaaccccattcggacaaaacgacgttagggaggtgaagatatgaacctcaccaaagtgacagtgacaaaaccgacttgcgtgtgaacagcagcaacaaactcccttgtgaatatcgtctgttatgttggcgaacatctagatctaacttgctttattactgggattaaaattaggataagaactggaagaagtgaagttcctaatttatttgctatcgtgtgtgctatgtatgattacccttggcagcgagtggtgtatctgctgggtgtcaatatgctcgaattctagctcctccctgctagcgggtgcatgccagttttattaaggctattccatgtacatggtgtcacactctttaatacataccacataggatgaaaatctgatgtgacatgtgattgaaacatagggagacaccactcatgcaccagattatagacattgaaatctgaaccatctaaatgaactgtaactcatactcttatatatatctaacattttgtcttgtg

SEQ ID NO: 26860 - DNA, 5854 bp, Zea Mays
ccgcacacaagtcctcacgatatttagattcttatgcagctagttatacacgaattcaaattctatatttaaaaggagtaccaaacaggtccaatgtgtgtaataaaaagaaaaaaaaagattccagtagcagcagtaaagcccattcgtatgtggccctgctccggaccgaaagataaagcccatttgaaatccagctcggcctgctgtcagttcaggagcaggacgagtcggggtcggcgcggcggcaggccgcaggccggcagcaggctctcgcttcgctctctcgttgtctgtcgagaggaagaagacgaggcgagggacggcagcagtagcagctccagcatcttctagcttcttcattcatgggattcggtctctactaggattaggggtgcttcatttcatccgatccccaacgacttgacctgattctgatctcgacgacgatgcggaagcgggatctgggcatcctgctgctcgccgccttcgccatcttcttctccctccaccacgaaggcgacttctccttccgggagtcctggtaccacctcaccgacgaggacttccccatcaagtacgaggccgaccgcctgcccccgccgctcgtcgccgatctcaacggcgacggcaagcccgaggtcctcctccccacccacgacgccaagatccaggttctccagccgccccacgcccgccacctcaacgatgactccgccttccaggaggcccgtgtcatggccgacatctctctcctccccgacaacgtccgcctcgcctcggggaggcgccccatcgccatggccgtcggcaacgtcgaccgctcctacagacctggcgaggtcaggaagcaggtgctcgtcgtcgtcacctccggatggtcagtcatgtgcttcgaccataacctcaagaagctgtgggagcacaacctccaggacgatttccctcatgccgcccaccaccgcgaggtcgcaatctccataaccaattatactctcaagcatggagatgcaggcctcgtcatcgttggaggaaggatggagatgcagcatcattcagcagatctcttcgatgaatttatgataccagaacacaacatggatgatcgccgtcgaagcgccagtgagaaacagggctctgaggctggcaatgcagacctgcgccattttgccctttatgccttcgctggacgtagtggcgaccgtagatggagccggaagaatgagttcgaatgtcgtgaattcagagaatcaatccttggcatcatgcctcatcattgggataggagagaggatactaccctacaacttgcacattttaggaagcataaaaggaaacaagttaagagaacgcctggaaaggctgttattaatagcgtgaacaagcccattgaacacaatccacctgggaaggatgcttccaatagaatagctagagctcttgggaaggctgcagatatggctaactcaaataaagccaggaaggcacagaggatgcagtatgttccgacaatcactaatcatactcaagtttggtgggttcctaatgttgttgttgtacatgaaaaggaagggatagaggttgtccatctagcttctggacgtacaatatgcaagcttcatttaaatgaaggaggccttcatgcagatattaatggagatggagttctggatcatgtccaggttgttggtggaaatggtattaaagagcagactgtcgtgagtggatcaatggaagtgctgaaaccctgttgggcagtcgctacatccggtgtgccagtgcgggagcaactttttaacgtctctatctgccattacaaccattttaatctgttccatcatggtgacttctcgagaagttttgggaggacattgatacagctggtttagaggtcgcgactcctatcctggtccagacagacgatgggcataaacacaggagaggaagccatggtgatatcatctttttgacaagccggggagaggtgacatcgtactctcctgggctgctcggccatgatgcggtgtggagatggcaagtatcatcaggggcgacatggtccaaccttccatctccatcgggaatgatggagaacatagtggtgcctaccttgaaggccttctccctacgtgcctatgacccgaaagaggtgatcatcgccggtggtgaccaggaagcggtggtgctctctccttctggtggcatactggccatgatcgagctcccagcgccccccactcacgctcacctcctggaggatttctccggggacggtctcaccgacatgattgtggtaacttccggtggaatatatggattcgtgcagacaaggcagcctggggctcttttcttcagcacgctggtggggtgcctgatagttgtgatcggcgtggtattcgtgtctctgcacctcagttcgtccaatgccgccaaacccagggcttcctcgtctgaatacagatgatgttttgatatgcaaggtcaagagacttttggtactcctatgttctagtagtctatatatttaaccaaatgagaattcgtgttattgtatgataagaattgttcctactagtatatctcatgatatactgatagtgcaatctcgttttttgttgtctaccttggtgttcctagcccccacaaccatttgtacgttggttttttttttaagtttgtttggtcagcaggtcaggcaacaatccagtccatctaatttgagtacatgatggtcaagattgtttcctggtcgacaagttgcctgcccggctataaacaaaatatgatgtcctagcatgcaaagctcgtcttgtctacagtagaatgtgtaaaatagaagatgcagacaagtttgaaatagaaaatgagatataaaatagaagacgtagacaagtttgaaatatagaatgagataggagatctgttgaagatagtttgaagttgaagatagtttgaagatagtcttattgtgttgtcacaattctaccaaagagagggaaagaaaaaaaaatgacaccacacgtcaggctcagctcacagaggccaccgccgccgtgttcctctgtcccgcgggcccccaccccacccgcgtcttcaacttcctgcctgccgctcttctccttgtttgttcccttccgtctaatttggctgcgggtgcaggtggaggccgaggccgaggccaacgccgcctgcgcctggcctgccgtgaggtggaggcggaggcggaggccgaagccaacgccgcccgcgcctggcctgccgttccgcgtcatcttcttccttcgcgtaacgacgccggccaggccaataaataaacaatttccaattccgttcctggaggacgtctgcacggggaccttcccagcgggcgacggccggctgcatccatggcggtggccttcctgctgctgggattgggtttcctccttggcctcctctccctggcgatcgcggaggggctgacgctcctttgggccatccgaagcctcacgcgccgcacatcggcctcacgcagcacgccgccgccatcactccccatccacccgacgccggcgcggtctgtgtctcgccacagcctcaaccgacagggcttcttatggatgctggagcaacccaaggatagcagcatcaatggcgctagcccagggatcagagacaggaagctcctcgtcgaggttttccctgtaaaaatgtctgctacgcttcaaggacattccctcaccttgtctggacccgatgatgcctcgcagctaaccattgacctgctcggttgcacagttgctgctgtttctgcatccaatctgccctcacgtaaatgggccaagaggtatccgataaaactggaaagcaaggaatctggtatttgcagggggagcaaggtatgctatgtttatgcagacacctcttgggagaaggaatcatggtgtaaagcactccgtcttgcttctactacggacaaggacaaactcaaatcccatgaaatgctgacccaagagttccgcagttacatgtcctctctgaaagctggatacccttcctttctgggaccctcgacactctccagtcaggaacatgtgcttgtggacaacactgtgaagaatgatggaccttcaaaactccgaggttttctcaaacgattggtgggaaagaaggcatctgccaaggcttctcaggagagcaaaacaggtccggcgccatctaaacaagatacaagccaacccagtactcctagctccactatgagtttcaacagccagctaccagcttcccccagtgcaaaggtggatgaaaagcttgccgatgacggtacactttgttggaacctcctaatctcccggttgttttttgatgctaaaatgaatgatgagatgaacaaagccatcagagcacgtattcagcgaacattgtcgaacaccagaactccagcctacattggtgagatcacgcttactgacctcaaccttggcaagctcccaccatctctgcacagaatgagagtcctcccactggatttggacgaatcgtgggctttcgaagttgacttcgagtgttctagtggaatactgctgcatatcgaaacaagacttgaggttcaggcgccagagctggaaaaggacattatgaagactgatattagaggcaatcctaatggggacgcgagttcagatttccttgatagtattgagcaatatggtaaccaattcgggccttcagaagtttcggattttgcagcagaggtcaacgatgaagcagataccttaaggaaatcaaagagcgctgggtgggcatcaacatatatgtcaaggtggagaagtatcttgaattcaatagcggaccaggtttcacaggtgccgctatcattggcgattaaaatttcttcagttcgtggaacgatgcggatacatctaaagcctcctccgggtgatcgagtttggtatgggtttacgtccatgccggagatagagtgggagttggaatcatcggttggggataggaagataagcagcagttacatcgcctcgcttatcggcaacaggatcaaggcttcggttcgtcagatcttggtgatgcccaactgtgaaagctttcctatttcctggatgatagcagatacggatgactgggtgccccgcagaattgcaccttttatatggctgaaccgtgagcccgctgataggcgtgctgcagacacaactagagagatgatgccaggggaagcttccacatccaaggccattgcaaagaacaagtcgagtccgctgccgtctacaaaaagaatcaccaacggttcctggaacaagacaaagatacgtgttgatgggcaagagcaagagcaggcagaagcatcaacgagctcgcagtcttggctggtttcagcaaatggtgatgcaacaagggaacagctgaggatgccactgctgagcagcagcggagacgagagagcaggccctgtggaggagcagcaagcatcaccttctgctgctgaggaggagggagatgcgaagaagaggaagaggcgtgcacgggtgatggatctaggaaggaggatgggcgacaagctggaagagaagggcaagcgtttcgtcgggaagatgcgggagaacgcgaggaacaaccgcttgctattgccggacttggagcaggccaccacccctcctgctcctgctcctagttaggcattttaaggatgttactcgacaaaatgaaaattaatcagttgcagcgcctagcaacagctcctaattaggagcacttgtattatgtaaaagaaagaaagaaaaagcttatgagatatgattgtaccacacagatggatgtatgcatctctcatctcacccactgaattaacacaaca

SEQ ID NO: 26861 - DNA, 4463 bp, Zea Mays
cgacagcactcgtgggtcaccacggatccggaacccgagcgcacttccaaattcctatcccaaaccaaccaacagtcgccacgttttccacggctaaaaggttccaacaactggctccaatagtgtctcctgtgtcccagacgtccaggtccagatcatcacgagttcgatcatcacatggattggagctcctccgtcctcctcgcctcagcttgcagacacgtcaccatcgtcctcccctcccctctcccttctcgagttaaaatgccggcgctcgtcaaccaccagtccaccacctctcttgctccttcccacccctcatcggctcctccgtttcccaccacaacaccccatgtccgtcgcctcccttcccccacacggcgccaggccctgagcagccagcagcggacccaccaccctctccgcctccgatccgccgctcgccggggaggcctctggtctcgggtccgtctccagaccatggccaccactgccaccatctccctcctacagcacgtccgacctccggcttcgggcggtagtcttctcccccttcccctccagcgcctccgccctattcactgccgacgctcggcgccagcctcccatcactccctccatcgcagtctccacctccgtctccccacccgcggcgcacccgcggaccggccccgcgccacggctgacccgtcgtccgcgctcgacgcggcggccggggagggggccgccggtgccaccaccgcgctgctcgacgtgagcggcatgatgtgcggcggctgcgcggcgcgggtgcggtccatcctggcggcggacccgcgggtggagatggcggcggtcaacctcctcgctgagtccgccgcggtgcgcttgcgggcgccggcgccgccgggcgcgggggaggagctcgcggccaggctcacggagtgcgggttccccgccacggcgcgccgagggggagcggccgcgggggctggggagagcgcgcgcaagtggagggagatggcggccaggaaggaggaactcctggtgcggagccggggccgagtcgcgttcgcgtggacgctcgtcgcgctctgctgcggctcgcacgcgtcccacatcctgcactcgctcggtatccatgtcggccacggaacgtttttggatctgttgcataatccttatgtgaaatgtggcattgctacaactgctttgtttgggcctggaagagatatactctttgatggttttagagcattcaagcaaggttccccgaacatgaactctctagtaggatttggatctgcagctgcatttactatcagtgctgtgtccttgctgaaccctgactgggagtggaattcaaccttttttgatgaaccggtcatgcttcttggatttgtacttcttggacgatctcttgaagaaagtgcaaggcttaaggcatccagcgatatgaatgagctcatttcactgttatcacctcagtcgaggttaattgttacttcctcaagtgacaacccttctgcggacagtagtttgaattctgatgcgatcacagtcgaggttcctgttgatgatgtccgtgttggagactcaatattggtcctgccgggagagactatacctgtagatggtaatgtcattgaaggatcaagttttgttgacgaatcaatgcttactggagagtccttgcctgtagccaaggagactgggcttcctgtattttcaggaactgtgaactgggatggcccgctaaagattagagcaacatgtactggaccatcatcaacaatagctaagatagtccgcatggttgaggatgcccaagcacgtgaagctcctgttcaaaggctcgcagattccatcgcaggaccatttgtgtatactgttatgacgttggctgcaacaaccttttccttctggtattacattggcacacacttatttcctgaggttcttctgaatgatattgctggtccggatggggattcattacttttgagtataaagcttgctgtggatgtattagttgtttcctgtccttgtgcacttggattagctacacctacagctatcttaataggaacttccctaggtgctaaaagagggttactggttagaggaggtgatgttttagagcgtttggctggaatagatactcttgtgcttgataaaacagggacgcttacagaaggaaaaccagtagtgacttctattgcttctctggcatatgaggagacagaggtccttcgtcttgctgctgcagtggagaaaacagcattgcacccaattgcaaatgctataatgaacaaggctgaactactcaagttggatattccgatcacaagtggtcagcttacatcgcctggatttggttgtttggctgaagtagatgggagtttagttgcagtgggcactttggattgggtgcatgatcgttttgaaactaaagcatcgccaactgaactgagagaccttagaaaccggctggagtttatgttgtcaagtgaagcatcatcatcaaaccagtcgaagtcaattgcttatgttggccgtgagggagaaggaattataggtgctattgctatatcagatattttacgagaagatgcaaacttaactgtggagaggttgcagcaggaaagcattacaacgttcctgctgtcaggggataggggagaagcagtgacaagcattgggaggaccattggaatcaggaatgaaaacataaagtcttccctgactccgcaagacaaagcaagcattatatcaactttgcaagcgaagggacacagagttgcaatggttggtgatggaataaacgatgccccgtctttagcagccgcagatgttggaatagccatgcgaactcattcaaaagagaacgctgcctctgatgcagcttcagttgttctactaggcaacagactttctcaggtggtagatgcgctatccctgtcgaaggcaacgatggcaaaagttcaccaaaatttggcctgggcagtggcatataacatagtagccattccaattgccgctggagtgctgctgccacaatatgatttcgccatgacaccatctctctcaggggggttgatggcccttagctcaatctttgttgtcagcaattctttgcttctgcagctgcatgggtcgtttcagaacacagaaaaacggcagggtgatctgagctcaagattaaactgaattgttgggtttagtttgacccagccgaaggacagtggtattgaattatagagggttctgatactggttttccagctccggctaattgaactgagtcagaactataagtagcaagctattcgtgtcagtagtagcatgttcctgtactgtttgtcaacccaactatagtagcaagtatgacccagaaggacaataatctaccacggccttcaaaaacattgtaaattagtaatggtactgctgtaagcctgtaaacaaagttaaggcgtatgactatcgttcatggtctagcaatgtgcaacaagctataagcttcatttcacacaggtatgggaagttcagtcaacagaactagtcgaatagcaagcagtacacatagcaactatggccacactataatggcaatcatacccctgaacaatagcatagctaggagattactggcgattcttctacttctacttctacttccatgtgttggttgttctaggcttctagcactcttcgtatccatcgttgttggcccagtgcaccttcttgccgctgctgctccgcatcaccttctcgtcgacggccttcaccccggcctccgcagctgccgccgactcggcctgcacacgcgccatcttcctccctcgctttctcgccgcggccgccttctccgtctcggcctcctggtactccctcgcccaacgccggctcagcacgcatgttgcagctagcgcgacggcctgcgccatgaacatggccagcagcagtagctcctcgaggaacgccagcacgaactgctcccggcgatccctggcggagccgaggaggcggaggctgtggtcgtggcggaggaagaaggccagggaggccagtgcgtggccggacagcgcggcgagcgcgagcgccgtgctcgcggcgaggcagaggtgggtgagctgcgcgtggagcgctgcgagtgcggagagcagggtggtggcgtgcacggagacgagcgcccagccgaagggcgtcggccgcgggcggaggaggaagaccgggccgagcgcggcggcggcgaggacgaggagggagaggttgaggagccagaccagtaggttgggaagagaggagcatctccgtaggctcgagttctcggtggcggacgccattgctttactgggtgcttgtgttctcagtgcgacagtgatcgtgtgagtctgatctgttgctgaatgctgagttcagaggagcggggaagtgcgtggcgcgtggggtaaggtttatacagagtgggaagactgacc

SEQ ID NO: 26862 - DNA, 1541 bp, Zea Mays
tggaagttgtgacaacaacaaaaacaacaatgaagccttttagtctcaagcaagttaggataggttagagttgaaacccaacataaaccataagtcaagattcaggcacatggatagctatttttcatacactcttagtcaagactaaatctttgggtatattctgatgtgcacccgatctttcgatgagagggtgtggaacaactcgattggtggaggagacgacgttcacggtccgactacagccttccaaagacgctgcgccttagcaaccgatacaccatctcctatggctgtcatgatcttgtggagcgcgacaccctggccactagggttctcgttctgccaagcaatcgaagaactaacaagaacaagtagaacaagtactgaattaccagaatataaatgttaggtttccaaactcaatctccaataaagtggggttccgaagacaagaagacggacatctaaaccagcacgcacgcttataagcaagtagcgagagctaaacttgatctaaacaaaacccgttgttcttggtggcggctaggggatttataaacatgagaggacgaccacaagggtgttggggtcgtgctgcaacccgaggatgcgtctctaatgaatccaacttgatacacaacccattaggccaaaatagggtgacacagcaccatggacagaaaaggcaggaaaggtctcagtaaggaaacaatgattgcggcgtccttagagaagatatgactataattccagatccatatgaaagtgacttgataagctttccatgtagtacttgatcacccaaatcggagcctacatgcgactgtggtgaccgtcacaagttggtgttcttctacagtccgaatccagtttgctcaaatccttttccctttcggtcttctccctggttcctaagcaaaacaagagtgcacgggtctccatggtctaaatatgatggacatgaactcaagagtgtactcacctgatggttgagttgatgaacacgagcgcaagtaatgggaccagaaattggtacttgtattggcatggatgtatcagtggtgtggatgtcctcaaaattgtatgctggaagttgcgacaacaacaacaacaacgaagccttttagtctcaagcaaaaagttgaaacccaacataaaccataagtcaagattcaggcacatggataactgttttcatagttcatacactattagtcaagactaaatctttgggatcccactatgcaccggtgcctctagaggtctccgttgaacatgtccaaaccatctcaaccggtgttggacgagctttttttcaattggtgctatccctaacctatcacgccaacattctgcatcatgcaacatatcaggtctaattgtcatcatataaaacttgcctttttagctttcgtggcatcctcttgtcacatagaacgccagatgcttgacgttactttatccaccttgctttgattctatggctaatatcttcatcaatatctctgtctctgtaggattgatcttaaataccaaaa

SEQ ID NO: 26863 - DNA, 1914 bp, Zea Mays
cccgtttaacggcggcacgacaagcaagcggtcacgtgagagctgatttttctcgcagcgggtagcggtagccctgtccctgacctgatcctgacccgtgcgggcgtgcggctcctcgcggacagctccagactccagagccgcctcttcgccctctcgccatcggcaggctacggtggctgcttccccgagcctgcaggtagaccaccttgtgttgattcctcgagtcttcacctggtgcttccgtttgcagcttcatttttaactaagatgtcacaagccaaggaagtgaggtacactgcacggtctattacacctcctgctgatagaaatggcacttcaaggtcgcctcctccaaagagacgcagcccttcaaggtcacctccaccaaagagtgcttcacggtccccacgtccaaggagtccaaagagacgcagcacttcaaggtctcctcctaggagacgtggtagatcaaggtcaagggataggagtcggtccagaaatccagggaataacctttatgtaactggattgtctactcgtgtaacggaagatgatcttgagaagttctttagtaaagaaggaaaggttaagaactgtcatgttgttcttgatcctaggacaaaagaatcccgtggctttgccttcgtgactatggatactcttgaaggtgcaagacgctccatcaagtatctgcaccgcactgtacttgaaggtcgcctggtcactgtagagaaggctgtgcagtctccaaccatggttgtctccaaaggatgtgcagctgacgtgatggtgcttatcaccacaccctcagagctcatcaccacttgccgtcttcacctcgctcaccgacaatgcatacatgctacatcaacacgacggctgtcgccatagagcgatcttggagtcttgttgtgcatcgcgtcaccaccatcgccaccgcaacttctaccacaaccgccatcgtcaacatcacgctcgtgatccaacaggctctacgatttgtctgcttcgactaagcttacatggtgcatgctgctgccatgtcacgacaccaaccaccaagtctgatgcgaacttcatcgaccagtatcttgatttgatggacatcacgagaggcataatctggcgcttccttggaccatggctacaccgaccacggaacaagtgcacaaaagtcatctttggtttagttggcatgcaacgctaaaagaactcgtgaaaggacccctactcctggaaaatactgtggtcgaagaggaggatctcaaaggagcccatcaccttaccgccctcgcagaagggagcgttcgcgctcaagggaacgcagaagggagcgttcgcgttcaagggatcgaagggagcggtctcgctcaagggatcgaagggagcggtctcgctcaagggaacgccgaagggagcggtctcgttcaagggaccgcagggagaggtctcgctcaagggaccgccggagggagcgctcacgctcaagggaccgcagaagggagcgctcacgctcaagggaccggaggggcagttcaccccatggcagaaggcatagagatcggtccaggtcacccaccagcaatgggaaccataaggcagactaggaagcgcttttatggacttgtcgttgattgcgtgaacaaaggaacttgtaacactacctataaactggtcagactgagacggttagcatggatttttagtagtgttgctgtattttgttgtttcatacaagtactctattctgttagctttcggatcgaaatgtcggatgatgatggttgttattgttctggaaatcgtagacatgtcctccagaatacctatgaaactatggcatactcgtgtgtttgcttaaggttgctgtggtatgttctgatcttaagattgacacgttgcacggtagat

SEQ ID NO: 26864 - DNA, 1076 bp, Zea Mays
ctgaaattcatgaactgacacctgtgcatgtccgaagtcaactaacaccaacagtgacaaggaccattatcatagaagatctcaggtgtctacctaagtggtggtcctgcctgtagatggtacttcaatccaacaattccagaggcagaaccttatcttaccagccagtctacaaaaagaattgtgttacagcttccccaaaatttacaacatcctccagcgatggaaacgaagccaattgtcgaacataaatccctctatgaacttcttacagttaacccatatgatttcccggaaacaggatttgaatgtactatcacaatagcagaaataccagctgaacacaaatggtggtttccatcttgcacaaaatgcaataaagcaacaatccctcacactacaggttatcactgtgaatcatgcaattgggatggatacaaatttaaatacaagctcaaattcctggcatctgatgaaacagatattgcagaaatgttttgttttgacactgtagcaaggcacatcgttgttgcccaaacgtgttccgcattaattctattgttgctgcacatgggagacaacgttctttaccaatgcaaataggaatttctgatcaacaaggaccatcaacacctcaaaacaaatcaaaaccgatgttattggaagactctccatctacaactttggaaaaattatctactacaactcctacaactgtagtaaggaagcttctatattccgaaactgacaacacgccgaaaacgcactcaatttcttttactcaattatcttttattcattttaagatttagtgagtattgacagttaaaaatacttatatttgttccatgttgacagtgcaaacaagagtaatatcaatagcccagaaaaagatgatggcgataaggaaaccgcacagcttgatacaatacccactaacaaaggaaaaggaccagcagatacaattgaatcgccacctaaaaggttcaaacaagggacgatacgcatcggaaaagaaatggacatcaaatcctccgagaactaaagtttcactcagatcttcgtcgaccttttga

SEQ ID NO: 26865 - DNA, 1349 bp, Zea Mays
tcaaattatcttatgattctagtagctactcctggaaggcttagggatcacatggagaacactccagggtttgctacaaggttgttgggtgtcaaagttctaattcttgatgaagctgaccgcttgttagatatgggattccgatcagatattgaaaaaattgtggctgcactaccaaaacagcgtcaaacacttctattttctgcgacagttccagatgaggttcgtcaagtatgtcatattgccatgaaaagagatcttgaattcgtcaacactgttcaagaaggaagtgaggaaacacactctcaggtgaagcaaatgcatttaattgcaccactggacaaacaattctccaacctatatggtcttctaactgatcatatttctgaaaatgttgactacaaggtgattgtattctgtacaacagcaaaagtaacaagccttgttgctgagcttctgtctgagttgaagttgaatgtacgtgagatccactccagaaaacctcaaagctacagaactaggatatcgaaagaatttaaggagtcaaagggtctcattcttgttagctctgatgtatctgccaggggtgttgattatcccaatgtcacactagttgtgcagttgggggtgccaactgacagagagcaatatattcatcgacttggtagaactggtcgcagaggcaatgaggggacaggaatcttactattggcaccatgggaagaatatttccttaggagcatcaatgacttgcctattacagaggcaacacaaccattaattgatctggatactaagaaaaagaggtttctattcttttgataaacccatctgggttttatcttcatcagcagacatgaaggtcgataaggctcttgcacatgtggaggttaaagacaaggaatccgcttatcaggcgtggcttggttactacaattcaaataaggtcattgggcgcgacaaataccagcttgtatcacttgccaatgagttcagcagaagcatgggtctcaacaaccctcctgcagtgtctaagcttgccctcaggaagatggggctgaacaacattccaggtctgagatcaaagtaaccaattgccatgtatactgtatacatgtcttgaagtcttttttgcacatgatctgacatctgagcacgctattccatactgatcgagttgagttagtttctggtaataaatttattgtacgttttatgcttgcagaagtgcacgaatattcataatatgttctcattcgtttgttctgttactgagataacaaatgataaagatgaacgtgttttgctattaaagaaaataaagggatacaaataaatgaagataataa

SEQ ID NO: 26866 - DNA, 979 bp, Zea Mays
cattgttcttgatacctatttggagatccagtccatccattggtgtatctcaatcttgcaagaatagagaagagtgctgaaaaacaagcaaaatcaggtgcagaaaatgctgggtggtatgagaaatggtgggagaaatatgatgccaaaggctggacagaaaaaggtgctcacaaatatggaaggttgaatgagcagtcgtggtgggagagatggggtgaacattatgatggccgtggatttgttttgaaatggacagataagtgggcagagacagacttaggcaccaaatggggggacaagtgggaggagaaattctttgcaggaattggttctcgacaaggggagacatggcatgtatctcctggcagagaacgttggtcaagaacttggggagaagaacactttggtaacggtaaagtccacaagtatggaaagagcacaactggcgagagctgggatttggtagtcgacgaggagacatactatgaggcggagccccactacggatgggccgatgtcgtgggggactcgacacagctgctgtccatacaacccgtggagaggccaccgggagtgttcccggccatcgacttcagctcggcgcccccgccaaaggacgctccgccgggcatgcctccttcccctctggatggagggaactagagctgccagcacaagcgaattttttctttctagaggctccaaattttgcctgtaagggaacagcattctttgtaggaagttaatggacccaatttcctgcgttcattggttggttcactctctgctacgctttcctttcctcccaaacatgccgttgcgttcctctggttggcgaccgggtgaatgcaataatcaaacggcccacccgtggtttgtattgctcgctgaggataaagcctttgttctgccttcaaggcagtgttggaaactcggccattttcctcgcgtaagggacagagattttcactccgaa

SEQ ID NO: 26867 - DNA, 913 bp, Zea Mays
  misc_feature (912)..(913): n is a, c, g, or t
agacgtcccctctagggcttgttcggttattttcaatccatatggattggaggggattgatacggattggaggggattttgacttattgtggattgaaaccccttcaatccccctcaatccatatggattggggtaaaaccgaacaagcccctagcgggaatcgcaatctcaggatccagccgagcactcgacagtcctaaactcctaatccggggtagaaataaaaggatgtggacatcagatgaagatgacgagcttgtcaaagctttgtgtgagatatctgctgatcctagatataaggttgaaggaggggcctttaagaactgttactctcaaggcatagagaacattctttcacaaaagctacctggtcgtggtattaaagccagccctcatgttgattctcggctgaaagtgatgaagcggaagtattattcgatcaaggatatgatagcatcgacaggcttctcttgggatgacacaagaaagatgatccagtgtgaaaaacaacgatatgatgaatattgcagagaccatcctagagccaagggtctgtatggtgtcccatttgtatatttcgatacatttgatgcaatatatggcaaggacagctctgctggggaagggttggaagggtctgaagctgcaattgctaacatggagaatgaaaatataaatgaagttggagatgacgaagtggaagaggacaggatgtccacaggaatatctggtcgctccccggccgcaacgttaagctctaagagtcagaagaaagacaattatgacgggaaaaggaataggaccgaatcaaattgcccatctctggacaagttcaaggatgtacatgttcagtttcagaatgccattcagcatgccagcacaatggctgctgcaatggagctgttcaaggnn

SEQ ID NO: 26868 - DNA, 235 bp, Zea Mays
acttcgagcttcagacaactgaaggcttattggcagaagccgaagctaaaatagcagaattgaattcgaagcttctctgccaatctgaacagtttgaacaagaaaagcaagaacttaatgcgaaacttaaagccgaagtccaacaaaattcagatttgaaaaaattattggcaagccttcaagacaaatgtttggaatttagcaacaaatgtattcaacgactgagaaaaatctt

SEQ ID NO: 26869 - DNA, 582 bp, Zea Mays
gtgccctccgccgtctgcccatctgttcttcgctgtctgctcaatacacggtgagcagtctgttcttcgctgtctgttcgtcttccccgacggcgccctcgccctgtattgctgtccggcctccgacgcccacttgcctccatggaagcccaagaaccggatgcacacgaaggtcattcacgtccgccaataccacgaatttccggatcaatgattaagcgcacgagcacgaggaagaagcttatgccagcagctaagaagatttcagcggctgctagcactgcaccttcatcatccacatcttgttgtggtgctgtctctgtatctatagaaaagcaacttgatgttgtgatggaggaggggcaaggggaggaattggaggttatgttgtcggaatcagatgacagtgaatttgatcttgatgatgagtttccaccttccactgatggagatgagttgtcaaaaactgaaaagacaaagagaggaggaaagaggtcaagagctggtattcagttgtccccatccaagtgcaaggcgaatagagtaaagagggctggttgctggaagtattttaaggtggtc

SEQ ID NO: 26870 - DNA, 2377 bp, Zea Mays
agagctaaacataggggaaagcagatctgtcgcaaactcgcaacccaatacgccatctattcccgtcgctgtcgtccacctgtttttttcgttgatccgcagccgccccttccttctcccatttcggcgtctcgaagccagtagattattcatttctcgatccacaaatccctccacactctccatcccgaaccctgaaatcgaggagcgcgggaggacgccgcaaagcgcgttggctcttagggtttgccggtagggttgggaggctccgatccgggcgcgcaggcatgaggattcgggagctccgagatgggctggaggtggaggacgacgagcgggaggagcagggatcggaggttggcagtggttacggggaggttgtcgcggttgtgcgactgcgggcgaagcgcgctatcgttggtgccggcgcgagggtcctgttctatccgacgcttctctacaacgtgctccgcaaccggttcgatggcgagttccgctggtgggatcgcatcgacaaggtgctgatcttttgcttgtctccatgtttatgtcctggtttcgttatttctgatccggggtgcgatttggagatatgcttttggggacgtccagtgttgtgtgggtcggtaattcagttgattcccgattaagtttcatcgaatatacgcacaatcttattgttatggagatgggtatgtatcatttagtctagccactagagctgatcagttaaattggtgattagttgagctgatcagttgatttggtgattagtcactagagctgatccgttaaattggtgatggaataacgatagtcactccttcttaggacttgtttggatattgttggttcacctcaatccacccaacacatgtggattgatgtgaatcggacaacatccaaacaaggttgttgcttgatattcttaccacctctatcttcagtatgttttgctaggtgctgttccgttctctagcgatgttctgcgcctgaagcaacttggtgtaagaggagttgttacactcaatgaaccctatgaaactctggttccgacatccttataccaggctcatggaatcaatcatctcaaaattcctacaagagactacctgtttgccccatccctggagcatatttgtcgtgcagtggattttatccattgtaatgaagtgcaaggtggtagcacctatgtccactgtaaggctggaaggggacgaagcaccactatagttttgtgttttttgatcaagtacagaaatatgactcctgaagtagctttggatcatgcgaggtctgtgaggcctagagtgcttttagcgcccgcacagtggcaggccgttaaaatgttcagcaagctcaacgctagatgcctttccatacagagctcgaacccaacttgctcagcactatcttatgaggaatccagtgaactgtcaagcacgctgagcagcagatgccttcggattcagagctcaaatgaggtctcgataacttgtgaagaatccaatgaagcatcctttggagaccctgaagttgatggctacaccaccactgagtttgacaccgagcattttgttttacctcgttgtcgaagtatgctgtccagaccaacgagccccactgggtgtagtgatgcagtcttcataaccgaagaagatctagagggctatgagacctacgccgatgacgggaaggacgttgtcgaagtgcaagtagtggttcgccacaagcccatcatgaggaaactctcctgcttccttgggtccttgaagcttaccggcaattgcgagccaccacctggccgtttgaccgaggttcgagcctgctaggtggatcagctatggtttccgcatctgtttttcgctctttgtacatcggcagagtgtaattaccggcataagtttgcacagcctgcggaattccctcgggacagaactgtatgttgtggcatgtgggtggcgagataaatttggctatcgggagccgggagacctgtgggttgttgcagggagtgcgagagatctgtgtgcatatctggtatgaatgttttccttgtaataaaaagatgtttccttcttgtaataaaaaagatgtactccctccattaataaagctgcacttcccccccccccccccaaaaactaaacaacttgtaatttaaacaatactgccatttatagtacaacataagtgttactgtattaaagtaaccataatatgctctctttagaactcttacctaaatcataaaccgttgtggctttttaagatacactccttccgtcatctcaaaatataattcgtttatactaatatacattcattacttaatggtgtatttgtttctctcctaaattatataagttggattata

SEQ ID NO: 26871 - DNA, 3032 bp, Zea Mays
ggccgtccgcccatcttgctatcctcccgagcggccgagtctgctccaactccaactccgcgcatggacaaccacgtgtcccggaggcctggagtccccgtccgtcccttccgcgcgcgctccccaagcgtccgatcacactcctcggtcccacgcttggatggattccgtcggtacaaatcggcccccgctgcgccccgttgccgccgcagctactcgacgcagcgcgctcctgcgcccccctagccacctcgggctcggcaatcgttttgcggagactaagcttgggatcgcgtcagggtgtggaggaggaggagggtattttggaaaggtacagggatttgatgccttgcggagtaccacgacgaaagttcagagcgggaaggcggggaggagtgtgaccaaggaaatgggacacacttcatctggcaatgaagtgcccttgaaatattcttcaggcaaagccttccccctaggagtgtcacaagttgacgatgggttaaattttgcaatattctcacaacatgcttcttctgtcaccctttgcttgaattttcctgagagaggcaaccaagatgatgtggacattgtagagtttgctttagaccgccagaagaacaaaactggagatatatggcatgtgtcagtggagggtttgcctgcttctggtgttctttatgggtatcgcattaatggtcctcaagggtggcaacaaggtcatagatttgatgacagcgttattcttctggacccctatgcaaaattagtttatggtcgaaagcactttgctgttgaaaaagagaagccaagccagcttttcggaacatatgatttcgatagctcaccttttgactggggtgacaattataagcttcctaatttgcctgagacagatcttgttatatatgaaatgaatgtccgtgccttcactgccgacgagtcaagcaggcttgctccagctattcgtggaagttaccttggtgtcattgataaaattcctcatttgctggaacttggcgttaatgcagtggaactacttcctgtttttgagttcgatgagctggagttgaagaggttccctaacccaagggaccacatggtaaatacatggggatattctacaatcaacttttttgcgcccatgagtcgttatgctagtgctggtggtggacctgtggctgcttccaaagagctcaaacagatggtcaaggcatttcataattctggaattgaggttattttggatgtagtttacaaccatacaaatgaagctgatgatgttaacccttacatgacttcctttcgtggtattgataacaaggtctattacatgttagatctcaacaacagtgcacagctgctgaacttctcgggttgcgggaatacactaaactgcaaccatcctgttgtcaaggagcttgtacttgacagtttaagacattgggttaaggagtatcacatagatggatttcggtttgaccttgcgagtgttctttgtcgtggaccagatggcagtcctcttgatgcacctccacttattaaggaaattgccaaagactctgtattgtctagatgtaagatcattgctgaaccttgggactgtggtggcctttatctagtagggaggttccctaattgggacaggtgggctgaatggaacgggaagtacagagatgatattcgaagatttattaagggagatcctggtatgaagggggtgtttgcaactcgcgtttctggttctgcagatctctaccaggtgaacaatcggaagccttaccatagtgtgaactttgtaattgctcatgatggatttactttatgtgaccttgtttcatataactccaagcacaatgatgcaaatggagaaggtggtcgtgatgggtgcaatgacaactacagctggaactgtggcattgaaggagaaacaaatgatttgaatgtgctaagtcttcgttcaaggcaaatgaagaacttccatgtggcattaatgatttcccagggtactccaatgatgctgatgggagatgaatatggtcacacacgttatggaaacaacaatagctatggacatgatactcacataaataattttcagtggggccagttggaagaaaggaaggatggccatttcaggtttttctcagagatgatcaagtttcggcataaccatcctatattgagacgagacaggtttctcaacaaaaatgatgtcacttggcatgaaaatcgttgggagaaccaggacagcaaatttttggcatttacgatacatgatcacagttctggtggagacatctatttggcattcaatgctcatgagtattttgtggatgctgtaattcccccaccaccacaccataaatcttggagtcgtgtggtggataccaacctggaatcaccaaaggatattgtcccagaaggggtgccattcacaggttcagggtacaggattgctccctactcttccatcttgcttaaggcaaagccttagaatggcggaggcaagtcattctcaagtaagcacgaataatggtgttgtgatccctaactttccaagctcttagccaactgtactgcaagtatagcaaactttggtatgtgaagtcggaccaacccttgcggaaatcaacggaagccatggtttgctaaaggtatactcatggagaattggagatatggcaaacacatacgcaagtaacctccacacatctaagcaagaagagcctttcattaggggatgcatggctcgaggaaactatatttgcatttggttgattcatttttatttgttgcacatgtcagtatgtcacctgtgtgtgtcaagctcttatttgcttaaaaattggacattcctttgttacatatttgtgttgtactgtgttggagctagcgttcctggtatattgcacgggggtgggaggacgggggacgctttgtcgccgtggtcttaggctaccagcaatggttttctctatatttctgctcctgtatcacttttttgcgtcacattatcaatatttcatcctcta

SEQ ID NO: 26872 - DNA, 285 bp, Zea Mays
ttgtcttccctcttggccttcttggatggtttagttgcagatgttgctgcagggtcattctcatggacagcactagatgttgcaatacacccttccttttgcacatcttcaccatcatcaacagcaagagggtcatttgatgtctttgcaaatcgtcctgatgcaacactattgccaaaaattgtagcaaggttgccatagtagggaagaggcttgtttataaattcatcatcacccttgtttctttcatcctgcatggacacgaagaccattttctcgttctaa

SEQ ID NO: 26873 - DNA, 2247 bp, Zea Mays
ccgcatgaccgcatcagctcatcgcatcggccgctttgctttgcttgctgctctcttctctccgctttccgccgcggtgcaaggccagcgaattccatttccttccgcgtctgtccccaaaagcgggaggcccgccgccggaacgagccagcaaagccaagcaagcatattgacggaggaggcggaacggcggaagcgtgaatccggaggctctgcagctgttctccagaagcagccgactgggtgtccgtccgcggaccggtcggtgtataaatggttggcgaggagagcggctgcggcgtcgagggagggacaggaggaggagaagtgccggcggcctctgctcccaacggggaccgctcagggaatagccgcctcgccgtgccgtcatcctccgcagatgatagaggcttccatagatcaagcaccatgccaggggtgattaagaatgatgaaattaccaatgaatctactggaccatcaaatttggaaaggtccagaactgagcgtcgtcggcaaaataatccaactattgatcctgctaaacagttacttgatgaaaggattccaataaaaaagaagctcaaaatgctaaatcggattgctacagtaaaagatgatggaactgtggttgttgatgtgccaagtggtctggaaccaactatagttggtggaactgaggatatttatactgaagctgttgaagaagcattagatggaacggagatactatacaggcctcctatgcaaatagttatacttattgtgggtacacgaggagatgtgcagccatttgttgctatcgggaaatgtttacaggactatgggcatcgtgtgagattggccactcatgccaactttaaggagtttgtactaacagctggcctggagttttttccgcttggtggagatcccaaaattcttgctgaatatatggtgaagaataaaggattcctaccttcgggaccatcagaaattcctattcaaaggaaacagatgaaagaaattattttttctttgctgcctgcatgcaaggaacctgatcctgacactggcattccttttaatgttgatgcaattattgcgaacccacccgcgtatggacatacacatgtggcagaagcactaaaagtaccaattcatatattctttaccatgccatggacgcctactaatgaatttcctcaccctctttctcgcgtgaagcagcctgctggatatcgactttcttatcaaattgtggactccatgatttggcttggaataagggatatgataaatgagttcagaaagaaaaagctgaagctgcgtccagtaacatatctaagtggttctcagggttctggcaatgacattccgcatggatacatttggagtcctcatcttgttccgaaaccaaaagattggggcccaaagatcgatgttgttggattttgcttccttgatcttgcttccaattacgtacctcctgaaccacttgtggaatggcttgaagccggtgacaagcccatatatgttggttttggtagtcttccagttcaagatccacaaaagatgactgaaattattgtcaaagcactggaaattactggacagagaggtatcattaacaaaggctggggtggccttggaaccttgtcagaaccaaaagattttgtgtatctactagacaactgccctcatgactggctttttctgcactgcaaagcagtggtgcatcatggtggtgctggaacgacagccgcaggtcttaaagcagcggtgaaagataaggctgtggagctggcgaaagccatggaatctgaagacggggtgacaggtgctgttagggcattccttagacacctgccatcaaaagctgaggaacagagtctgccgcagtcatcgggcttcctggaattcttaggcccactaagtaaatgtttgggatgttcttagtgcacaaggcatcgttactattcacggattggcggtgtaccatttcctcgaagcagccacgagttatcgtaatattccatgcaaagaagcttcaggccagtagtgtttctcctcttcttttctgcgggtatttataatgtgtaaagagtgcttgtggtgtggatggtctgcacggatggcctgcatcctgtggtgcgtgtaattttgatgtgcatgtttgccgtgcagcacagacgacgatttcacgtctgcatggccaacccgttctgtatatgaaaagaaacaggtgcctacgttttcttcgttttc

SEQ ID NO: 26874 - DNA, 178 bp, Zea Mays
ggaagcagcaaacttttgttgcttctgctctaaggtggtgccgaaagaagaagctcaagagtgaagcctcgggaggatgtcgtcctccctttaaaaacactgtactattaagcgggaggggtttttacctcccgggtttgtaataatattactcttgcactcctatattactggtctg

SEQ ID NO: 26875 - DNA, 2455 bp, Zea Mays
cactcacatgccatgctgccaatgccgcctcctgcctaccctggtcttccaataaatcaacctgctccccgacgcggcgaggctcggccatgcccgtgagctgtaggcgcacccggaggccgcagcacagcagccacggatgaggaggcctccaatcgtggcgcgcgtgcgccgctcgctcttcctcctcctctgctgctgttgctgcctcgccgcctggtcgtcgccgccggccgggcgccggtgccgctgaacaggacgctgggcttctgctccgcttacggcgggggcggcagcagtagcagctgctgcgacgccgcagcggacgccgcgctgcggaagaggttcaacgccatgaacatctctgacgcggcctgcgctggcgtcatcaagtctgtcctctgcgcggaatgcagtccattttcggctgagttgttcaactcaagctcaaagattcagatggttcctctcctgtgcaactatacttcttcatcaagttctgctcaatcaaaagattctacacgagattactgtaaactagtttgggagacttgcaaaaatgtgacaatagtgaactctcctttccaacctcccttgcaaggaagtgcaagactgcctagttcatcgtcaaagctcacagatgtctggcagtcagaacatgacttctgcacatcatttggtggctcatctggtgagcagtctttatgtttcaatggaaatggaattttcttcaacagcacagaaccatcacccacacctaaagggatatgccttgagagaatcagcaatggatcttatctgaacatggcttcacatcctgatggatccaacagagttttcttgtctagccaagctggaaagatatggttggccagcatcccagaacaaggctctgggggcactctacaatatgatgaggcaaacccatttcttgacataactgatgaagtttatcatgattctcagtttggcctcatgggtatagcatttcacccaaagttcgctactaatgggcgcttctttgtttcttataattgtgatagaactcaatctcctaaatgtgctggtaggtgttcatgtaattctgatgctaactgtgatccgtcaaagctcggcactgataatggtgctcagccatgtcaataccaagttgttgtttcggagtattctacaaaaatctcctcacctaacgtttctatggcaacatctgccaatccatctgaggttagaaggatttttacaatgggactgccgtatatagctcaccatggagggcaaatactatttggaccaacagatggatacctttaccttatgatgggggatggtggaagtgaaggcgacccttttaatttctctcaaaataagaaatcacttttggggaaaataatgaggcttgatgttgacagcacacaaggccaaagtcaaaccacaaatcagagtttgtggggtaactattctattccaaaggacaatccgtttgctgatgatagtgactttcaaccagagatatgggccttgggatttagcaacccgtggagatgcagctttgactccgagaggccttcgtacttctactgtggagacgttgggaaggacgcatacgaagaggtagatttagtcaccaagggtggaaactacggatggcgtgtatacgaggggccatacatctttcacccgcaaaagtcgcctggagggaatacttcgcctgagtccataaacgcaatcttccccgtcatgggctacgaccattctgctgtgaacaaggaaatcgggtcagcatcgatcacaggcggatatgtgtaccgaggttccgctgacccctgcttgtacggaaggtacctctacaccgacctgtactcatcgctgatgtggacgggcacggaggccccagaggggagcgggaactacacgtcggccgtgaagccggtgagctgctccaaggcctccccgatcggctgcgagtccgtcgccgggagcacggacccgctgctcgggtacgtcttctcgttcggggaggacagccgcaaggacgtcttcgtcctggcgagcaagggcgtgtaccgcgtcgtcaggcccagcctctgcggctacacctgccccgcggagagaccggcgaccgacaacggcaccgcgccaggtccaggcgggccgtcgtcgggcgctcccgccgcgacacggctagggaggtcggtggcggcggtagcggtagctctggcgttgatcccgtgtgtgctgttactgtgaccttcagatgtgtgtctcgtgcgatgtagtaggatcagtcgtagctgaagctactgggagctggaagagtacatacgtatagcgtgagtaacgaacactcaaaaacagttgtgctatgtggatgcctctggacaagacaaagagcaatgggtagttttggcgcggcgctggaacgttcggttcaggaaagggttgttggaaggcgcgg

SEQ ID NO: 26876 - DNA, 4259 bp, Zea Mays
catgtgaaggcacacctgctggcaggggcagagttctcagcatggcaagcaaaataaggatgaaaattgcaaggattttgttgagatagaaggtgccaaacatgaggaaactgcacaggaaaagagccagaacagtttgatgagcagttttgctgagaaagccatgtctgtggcaggacctgtagttcccacaaagggtgatggtgaggttgatcatgaaaggtctgttaatattgctattgttgtgttcctttgtctttacttctttttctttttttttccttttttgtgtgaaaatgtttatcatgttctgactttctgcaagcaggcttgttgcagttctagctgaactcggacaaaagggtgggtttttgaggttcattggaaaaattgctctactctggggcggaattcgtggtgctatgagcttaactgataggcttatctcattcttacgtatcagtgagcggcccttatttcagaggattatgggattttctttaatggttctcatcctatggtcccctgttgtgattcctctactgccaacgcttgttcaaagttggacaataagtgcttcaacggggattatcggatatgcttgcattgttggattgtacatttctataatgatacttgtcatgctgtggggcaaaaggatacgtggctatgaggatccagttgagcaatatgggatgaatatttggtcggcgtctaggctgcgagagttttttcaaggtttggttggaggcgtaacggtcgtagggttggtgcactcgataagcattctactcggttttgcagcgtttcggacagggttctcttcatctttagctagaccccttgatcttctcaagtcttctagtaatgtgtttctgctagctcttcgagggcttgccacagcaactagcattgctgttgtggaagaaatggttttcagatcatggcttccagaggaaattgcagttgatcttggttactacaatgccattctgatatctggacttgtgttttctctaattcatcggtcactaccctcagtaccaggtttcttgctactttctctggtactttttgggcttaggcagaggacacaaggaaagcttgctgcacccattggcctacgttctggaatcatgactgccagttatttaatacaaagcagtggtgttttaacatccaaacctgaaacaccgttttggatgattagcacttaccatctgcatccttttgatggtgttatcggcttaagtatctgctccttgcttgctatctttttcttccctcaaaagcctgttcagaaggatacatctgtgtgatgaggctcagaagagtaaaacataatgctggagtgagcttccaacaaggactaatcaccatgcgtatgctgcgagcaatgaagggtttttcctaccatacatgttaaaatgcaatgccctgcaacttgctggcagcaaagagtatgtgctcggttagcttcttgctcatctgactgagggtactgctgattggaatggcttttggatctataactagagtatccaggtcatttgtacttaggcaagtgtgtatactactctatactggattatcgaaatgggggatggtttcttccctacgttgtaaggtggcggaggaacagatgatatgcctaggaagaggaactagtagatgataagagtttgcccctgatattaggcttcctctgaaatgcaggaattctagaggaatatacaggaatttcacaggaatcagtccattctcacagaaaaaatgcaggaaactgaaaaaaaatccccgcattccaaagggggcatcatctaggatttcttcataccgaattatcgattgacttcgaccacataccgtgcttttgttcatgtctttgaacacaggcacacccaaatttcgaggtagcaaattttgcccacatacactgtatataaagtagttacagtgcaagaacaatgctaactgatcaggtgatgtctcgtcctccccccggttctattattgttactgtatagctgtaattagtccaagtgtacagctgaatctactaaggtttacaaggaaaatcgccaggcagtaaaccttcaatgcttttggctaggttttcattctgaaagtcatgtcttccgcgtcagcataatcctgtattcctgtataacctctgttcggacttcgtagtgctcatctgagttctgattcggccgggcaactgtaaattctgtagtgttcgagaaaaaactgtaaattctgtaatattgccaagaattatgaatttacatgaactttacaggtataagttgcccgcctcacttcaccggctcaccgtgcttcacctgctatcttccatggcggcggctcacctcttctgctccgcaccggccgcctatcgcgccgcgaacccacggccccttgctacccgtggccgcgccaaccccgccacgggaacgtatctggtgctcaaaggggtatggtgctcatgtgcacatttcccccgggccacaccatcgagaagattcttcccctgccgcgcgtcgctcagccccgatggatcgctggccatgctcggggctcccagtcccaggatggcgccaccgatgaggaagccgtacatgcgggagcactcttgcctcatcttcccgcccccgcgcggtcgacgcccgctggcggtcatcaagttcctcggcggcgccttcatcggcgccgtccccgaggtcacctacggctacctgctggagctcctggcgctggagggctttgtggtcgtgtgcgtaccatacaacgtcaccttcgaccacgaggccgccgcgcgggaggtattccagagtttccatgcctgctacgacgcgctgctcgcgtcggggctcccggaggccggcctcagcgccctggacatcgcggagctcccgctctactctgttggccacagcaacggggcactgcttcagctgctagtgggaagctacttctcagaaaggataccagaggctaatgccattgtctcattcaacaataggccggcatcggaggctgtgccttactttgaacagatagggcccctttttaggcaactgatgcctatgatggaggcctcgcctgtttactcgatggccagaaatgcatcaggatatgcatggaaagctctatttgatttagctggaggtcttttacgtgagtatgatcaagaagctacggtatctctgagcaaatttattgatcagttaccatcagtaatgaaccaggtttcagaaggtgtgtctgaatttaaaccaacaccacctgaaaaccgtgaattctgcaagaattcctacagtgtacccaatacattattggtcaaattcactgtagatgctattgatgatacagacatagttgaagatgtcctgagaccccgcgttgattcaatcggtggacaaataaagaaggtcatactgtcaggaacacatctaactccatgtatacaggatgtcaaatggcaagttggttcagaatacactccagcagatgccattgcacaaggattgaaatcattggctcttagtgaaacaagagtcctctcaagaacaattgctgattggtttacatccctttaaattttgagttattcaatacatctgttgaagtttggagttcttcttacaaaggaatgccttcatcaggtctcaacttcccattttgttgaagcagtccactattgtaatgagatgccctagccgtactacaaatatctgatcaagattggtggtttggggccttacttggatcgtagttgcaagctataaaaagcatcgaacccaaaagtccaagcagctcgatcctgtttgaggtacggtgccagcaaggttaagttggccaaatctgttgcacgcagacagcccaatgggggtttctgcaggctggcgaaagtaaaggcgtgcgataggaaatctgggaatgttttatattgccacattgtaattccacgttataggcgtatagctcaaatacatttggacggtttggaggtatttcgttggtgtgctggcagttgtttctgtatcgtgcatgtctgttgcaagaaggcctggatgctgctgacctgagaactgattgatttcgctgacgcttacagttcttgcaagggcgtgcaagtagaacaacccgtatgcttcaggaattagtattacacgaggttaacaaatgtaataggcttgggactttctttcaacagcatcactgcagtacgtaacctctgcaacaaatgggaccac

SEQ ID NO: 26877 - DNA, 1406 bp, Zea Mays
ctttgcttaggtttcacatctgtacgctgcgggagggagtacggtactcgcgtaccctgcacggtggacctgctgagcaggatggactcgccgtacctggtggggctgctgggctactgcgccgaccagagccaccggctgctggtgttcgagtacatggccaacggcagcctcaagagccgcctccaccacccggcgcccgccgcagccgcagccgcgggcccgccgccgccgccgccgctggactggcagacgcggctgggcatcgcgctggactgcgcgcgcgcgctcgagttcctgcacgagcacagcagccccgccgtgatccaccgcgacttcaactgcagcaacgtcctgctggaccataactaccgcgcccgcgtgtccgacttcggcatggccaaggtcggctccaacaggacagacggccaggtcgtcacccgcgtgctcggcaccacaggctacctcgcgccagagtacgcgtcgactgggaagctgacgaccaagtcggacgtgtacagctacggggtcgtgctactggagctgctcaccggccgggtaccggtggacacgcagcggccgcccggagagcatgtcctggtttcctgggcccttccgcgacttacgaaccgccagaaactcgtgcagatggttgaccctgccctgaaaggccagtttgccctcaaggatctgatccaggtggccgccatcgcggcgatgtgcgtgcagacgaaggcggagtacaggccgctgatgacggacgtggtgcagtcgctgatccccatcgccaagaccaccccggcgatgtcctgctcctccacgccgctcagaccggccctgcagcacgtcatcttcatgggcccgcagtgcggcgacgacaaggcatcctcctagccctagtcctgccatggaggtaccctacccaccactgcctggatcggagcgtggtggagtcggtggccatcgactatagcgcgcgctaagaattctcgttccttgatgtatagagctcctcccctcttctccaggatctgcagacgcaacgcatcgttgcagtagtgcatcgtgattgtattcgggcacaagcgtacggcgtgtcatttattggtacggactgttttaaagataacatggaaatacaaataaatattctttgttcatcatcttcttttttacaaataagtagagtgagaggacacttcttattgtagaaaggatttaattgaactggcatcttgagctctctctctgaccttcactggttgcaactcaatgtcttacaatagtttttgcaatgtctgatcttaaaaacatggtctcttagtactcacacaagcagtaggtttatactgaagtagcagaattacagttactggtgcattttcctcgtcgaaacaaaactgacg

SEQ ID NO: 26878 - DNA, 1235 bp, Zea Mays
cagggaagtgcacccagaaaagttacccagcctgagaaatggaaaggacagacagagaagcttggaatattcgttctcgtatctgtcatcttagctggagcctggtttggttattggggtgtccgtaaatttgtcctggcagaagatggatctgttgacgagggtgtggcttattttgttgagtgggctatcttgattgtttcagccgttatgatcctccagagttctctggactatctctttgcatttacaactctagtattatgtggaatcatcaaagtgattgcaagaattgagggaaagtcaaaagttttacgctatatattcgggggactttctgatggtacctctcgtaattcatcccgttatggagattttgatgaagactattctagcatgaatgaagatcgccaagatggatttggcaatcttcatggtggataccagagacatgcaccgagaagaaactcacctcttgcaggctcagcaaagacattatcgcaaggtgttgctatggatagcttctattctacatttcacactaccccagagaggatggaattcacaaaagaggaatatgaagcattcaccagaaaggagacgaagaaagctatgaagcaactgttgtcatcaccggatttcaacaggtgggcattggctaatgcagacaggatatctgtggctccaccaggaggaagctacagcagtaacaacagccagcagcggcatcgtttcttgggactgttttgagctgtgcctgcgtgtgtgtggtgtgctttcttagcagcaataggagtgctcattgctcagtgatgattccatgtgagttgattagcaaggtttaggataacatctgagtgttccactttgaggtggcagcaaatatgtagaatattgtagtttaggcgcatcttaggtccaaagtccaaatggcatctgtatcttgtaacattaagtggtactgtacagtgcccgaggtgagtgtatctcaacttgttgagctgaatttcacgttcgatcatcattatgacagtttgaatttattcaaatcatcattatgataggatgaaaagtattcaagtgttctatgcctgcatagaaagtaagttgtgttgaattgtcgtgtgcggtaagcagtggtttgggtttgtagttgattttgtaagggactctattctcatcaccgcctgtaaactaatgatctgctctggtttgttcaatatgcatgagtgatg

SEQ ID NO: 26879 - DNA, 1267 bp, Zea Mays
cgcgtcgcgtccagccgccgctcgcccgctccgctcaccgtctctgcctcctctcgcgcagatccgcccctggccaagaccatcgcgtccctcttcctggactccggggagtcgtccttcgccaactcctcggcgcggacgacgcgccacgtggactgcgcgtccgacagccagtccaccgagtccgggggctccgctccgacgaccgcctcctcttcgagccccacgggccctccagctccatcctcgagaggaagcctccggcggcgcctgccctgcggccgcgagcggcggcgtcctcctctcgtccttcgttgacggcgtcgcggtggcgttcgactccgccgacccgtcagatggtgatggtgtcaggcggcgggggtaacgcgtgggcgaaggagatgaccctccgccgcaggatagccagcatattcaacaagacgcaggaacacttccctactctgaaggactacaacgattatctggaagaagttgaggatatgactttcaacctgatcgaagggatagatgtcgaggagattgaagcaaaaattgcaagataccaacaggaaaatgcggagcagatatacttgtccagagctaaaagggcagaagatcttgcggcagcacttaaagcaagcaggatgaaccccgtaaaggccgaggccaatgatacggctgctgggagttctcagggtattagtggcggggcaggagttcagggccagtatgcacctgccgctgttcttgggggagtggctcagccccgccccacaggtatggcgccccaactaatcggcagtgggtcggatcccctgcaaggagacgacgaggagaccaggagactacgcgcagagcgagcagcacgggctggcggatggactgctgaattgagcaagagaagagcgcttgaggaggcgtttagcgccatattcatctaggattagatcaaaaggcaacacatggtctgcattggcattggtaaaacctgcactagttctgcagggcaaagaataagaactactcaatcagatgccgccatgcaaaagttaaaatgtgtctctatccatggcagggctactctaaaactaactaaatatattactagtggtctttcacatttgcatggttggtcttattgtgaccggcaagtcagtaagtgggcagccgagccttttgttctggtactagcaaaaatggaagtgtagcgacatctgagtaatcacctcgttttcattagctagatccagcttcttcatgatgtacc

SEQ ID NO: 26880 - DNA, 3079 bp, Zea Mays
cacaaggacggcgcacgtacgcgccacgtccttgggccccggcgcagttgtaccctccatctctgtcctctttacttgccccatccatcccacgccgatcgccaggcgccagcagcaggctagctctgctccgccgctcactgctcgctagctactggaccgcgcttccctctctccatcgcgccggcgcgcacggctagctctagctcccggagccgccctttcatggtccccgccgtggtcgggacgagatgcctccgctcgcattcctccgccgctacctccccgcgaggaaccgagtgtctgttatcgatcctgagttgcgtctgtctgtttgtttccctgagcaaaggcttctcgcgcgagcgtgcgatggtggagtccgggggagcccgggcgtggcgcgggacgaggaggccggaggcagcggcggactgagcggccggtcggcgggggcgccgtccggggagtgctacgcgtgcacgcagcccggggtgccggcgttccactccacggcctgcgaccaggtgcactcgccggactgggacgccgacgcggggtcctcgctggtgccggtccaggcgcagcagcaggcccagccggcggcggcggcggcgcagcacgcggcgcggtggctgttcgggcccgtgctggacccgcgcagcaagcgcgtgcagcgctggaaccgctggatcctgctcggccgcgccgccgcgctggcgctggacccgctcttcttctacgcgctctccatcggccgcgccggccggccctgcctctacttggacgccggcctcgccgccgcggtcaccgcgctccggacctgcgccgacgtcgcgcacctcgcgcacgtgctcctgcagttccgcctcgcctacgtctcccgcgagtccctcgtcgtcgggtgcggcaagctcgtctgggacgcccgcgccatcgccgcgcactacgcccgctccgtcaagggcctctgcttcgacctcttcgtcatcctccccatcccgcaggtcatcttctggttggttataccaaagttaattagggaagaacgtgttaggcttatcatgacgatactgctactcatgttcatatttcaatttctccccaaggtctaccatagtatacacatcatgaggaaaatgcagaaggtgacgggttacatctttggatcgatatggtggggatttggtttaaatctatttgcctatttcattgcttctcatattgcaggtgggtgctggtatgttcttgcaatccagcgcattgcttcctgcctccaggaagaatgcaagaaaaacaatagttgtgatctaatatcactagcttgttcgaaggagatatgctttcaccctccttggtcttcgaatgttaatgggttcgcatgtgatacgaacatgacctcctttagtcaacgaaatgtgtctacttgtttaagtggtaaagggtcgtttgcttatggaatctatttgggggctcttcctgttatatcgagcaattcgcttgctgtcaaaattctctatcctatattttggggactcatgacactcaggtaatcacttcttaataatctgctatattctctccaacacagggtctgctctctaggaaactattgtcttaataatctgctatattctcaaaagtcaaaatattctctctttcttatactgtttatctgaataaacatggcatcaaactgataccccagttccacttcaaaaaaaaattagtcttgttccatgctgcatacacatgtatttttttatgctgcatattcataaacttgtacaattccttgaattgcttggcagtacttttggtaacgatcttgccccaacaagcaatggtattgaggtgatattcagcataatcaatgtcctcagtggcctgatgctcttcacattgctgatcggaaacatacaggtatttctgcacgcggtcctggcaaggaagcggaagatgcagctgcggttccgagacatggaatggtggatgagacggaggcagctgccgtctcggctgaggcagagggtgcgcaaatatgagcgcgaacgctgggccgccgtcacgggagacgaggagatggagatgatcaaggatctgcctgaaggactgaggcgggacatcaagcgctacctctgcctcgagctggttaagcaggttccgctgttccatggcatggacgatctgatcctggataacatctgcgaccggctgcggccactggtgttctccagcggggagaaggtgatccgagagggcgaccccgtgcagcgcatggtgttcatcctgcagggcaagctccggagcacgcagccgctgaccaagggcgtggtggcaacgtgcatgctaggggcgggcaacttcctaggcgacgagctgctgtcgtggtgcctgcgccgccccttcgtggaccggctccccgcgtcgtcggccacgttcgagtgcgtggaggcggcgcaggcgttctgcctcgacgcgccggacctgcggttcatcaccgagcacttccgctacaagttcgccaacgagaagctcaggcgcacggcgcggtactactcgtccaactggcggacgtgggccgccgtcaacatccagctcgcgtggcgcaggtatagggcccgggcatcgacggacctggcggcgatggccgcgccgccgttggcgggcggacccgacgacggggaccggcggctcagacactacgcggccatgttcatgtcgctccggccgcatgaccacctagagtgatcaggaggggggacgggaccatcctagctgtgccggccgggtcatggtgtctgtacagtgtacactagtggtatgttgttgtcatcttctgcgtgagtgaactggtggttcgggatttgtcatttaaagaaggtcaataatggagaaatagtttcttagcccgattcaattgtcttcctttcaccaagaataaaaattacttctgccggactgcctctccgcgttggtctggattgcttttaccaagaataaaaattgcagccccggctgcagcggctgatggcaggacagattcagacgcgcagagaatacgtacaagtcgccgaag

SEQ ID NO: 26881 - DNA, 4016 bp, Zea Mays
tgcacggcccctcccctgccccttccgctcccgcaacgggtgtgcctccgttccggccccgcccgaccttctctcacctctccagcgctcgcctcccgatcctcctgcagtcccacctccttcgccgccttctcatcgcttccaaaatcgcaaagccggatcgcggggacatggacccggacgacgagtccgcggcgcagcggaaagccgccgacttgcacctgccgcgcgtcacggagcctgcctccgcgcccgcacgcaccttctgcgccgcgcagcgcgtgctcagctacggtgacggccctgtcgcctccgcctcggcgcagcgctgcgcgtcgttcccgcagcgccacgggcacgggcacggccacggcgaggcggcgctcgcccctgctgcgtccttcgccgcctgggtcgacggcggcccgacgccgccttcggcggtggcagcggcactggagcgggccatgtcgcagtacgacggcgcgggcgacgcgctgccggagttcgtcggcgccggcgggggcgagggcatcttccgcgtgccgctccgcgcggcggtgcacccggcccgcccgccgccgctcgaggtgcgtccccacccgctgcgggagacgcaggtgggcgccttcctgcggacgctggtgtgcgacccgcggcggcggaagctgtgggccggcgccgagtccggggtccgggtgtggtgcctcgacgaggtgttccgcgggtggtggccaggcgccgggccgcggcgccgcggcgacgaggaggccgcgcccttcagggactccgtgccggtcccgcccgcgctctgcgccgcggtcgacagcgccaacgggctggtgtggacgggacacagggagggcaggatcagggcgtggcgcgtggaccacgccgcgcccgccggaggagaccccaccggcagcgcggccatgttcaaggaggccttcgcgtggcaggcgttcagccgcacgccggtgctcgccatcgtcgtcacgccgtacggatcggaaggaggtgcgataaaggcatggccttgggaagcccttgctaagtgcctctcatctacaccagaagaaattcatgaggctgcctcgttggttgaaaaatcctatatcgaccttaggaaccatgctacagttggtaacatgtgctctttgcctactgctgatgtgaaacacatgctcgcagaccactgccgattgaaagtttggagtgtaactagcatgacatttgctctttgggatgctaagactagggagcttttaaaagtatttggcatcgatggccaagtcgacttagctcgtcctgaggccccagtaatgccggaacaattcatagaggaagagattaaagcaaaacccacaaaaaaggagaaactgcaaggttctttaagtttctttcggaaatctaggaatgccttgatgggcgcagctgatgctgtacgcagagttgcaacaaaagggacatttgtggaagataatcggcgaaccgaagcggtggctcaagcaatgaatgggactatttggtctggttgtacagatggttcaattattgtgtgggatggaaatgggaatagactgcaagaatttcattaccatagctcttctgttcaatgcatagaggcactcggagagaggatctgggtgggctatgcaagtggtactattcaagttatggatgttgaaggtaaccttcaggcaggatggattggtcatagctgcccagtcataagcatggcagtcggcgattcttacattttttctttggcacatcatggtggcattcgaggatggtctctaagttcccctagccctcttgatgatattctacgctatgaattggctagcagggagctgtcatacacaaggctagagaaccttaaaatactggttgggacttggaatgttgcacaagagaaagcttgtcctgaagcgctaaagtcatggttgggtggtgcatttttcgatgttgggttggtggtggttggtttgcaagaggtcgagatgggtgctggagttcttgccatggcagcagccaaagaaagtgtaggacttgagggcagtaccaatgggcaatggtggatagacagtattggcaaaacacttgatgaggggatatccttccacagggttggttcaaggcagttggcaggattacttattgctgcatgggcaaggaatgaccttaagccacatgttggtgatgttgatgctgctgcagtgccatgtggctttggacgtgctattggcaacaagggtggtgtaggattaagaataagagtctttgatcgcaggatatgttttgtaaacaatcattttgctgcacaccaagaaaatgttagccgccgtaatgctgattttgaccatatttatcggacaatgactttcaacaaaccccatggatctacaggctaatgaaaaccaagccgatgaagataggcctgagctggcagaagctgacatggttgtctttcttggtgatttcaactaccgacttgatggcatcacctatgatgaagcaagggatatggtctctcagaggagctttgactggcttagagaaagggaccaacttcgagcggaaatggaggcaggaaatgtgtttcaaggaatgcgtgaaggtcgaatcaaatttcctccgacctacaaattccaacgacaccagatgggtctctcagggtacgattcaggcgagaagaagagaatacctgcttggtgcgatagaatactatatcgtgatagccgttctgtatcaatgcctgaatgctcattagagtgtcctgttgtcgctgcaattacagcgtacgaagcttgcatggatgtcacagatagtgatcataaaccagtgagatgtacatttagcgttgatattgcgagagtagacgagctgataagaaggcaagagtatggaaaaatagtcgagtctaacaaaagggtacactctttgcttcgggagttgcattttgttccggacactatcgtcagcacaaacaacattatattggaaaaccaagaagatgtcatcctccgaataactaataactgcgaaactagtaaggctgcatttgaaatcctgtgtgaaggccaatcaatcagaaagcaagatggaactaaatctgagccagtcataagggcatcctttggctttccactttggcttgaggtccagccatcatccggcctcatcggaccaggagacacaacggaagtcgccgtgcaccacgaagacttcttcacgcaagaagagttcgtcgacggggtgcagcagagctggtggtgcgagaccaccagagacatagaggtcgtcctgtcggtgaacgtcacgggcgtcgcctcgaccgaggccgccacgcacaggatcaccgtccggcactgctgcccggcgcctccagccccgccgtccgctaacccacgcggccccattaccgactcacctagcgacgctgtgccaggtcccaagagtagccagtcgaatcacttgctgcgttctgacttcgcaaacttcggcagctccgaggtgcgcgacctgtgcggcgtgcggaagcggaacctgtagagacgagcagctcagttttgttttgcctggtgctgtggtttttttgctttctgtccgagtgtttagccggtggagtcttggatttcttgcctaagcttgggggtgggggtggggagagaagaagtggttctgctcttcatcttgttctgtacatatgcgtccctgacctctcacgtctcaccgtcctttgcatatcagatcaaaaagggaaaagaaaaaagtgtgtgtgtgcagttgttgcaaacatttttctttttacattcttacgttctagatgtggcattgaaattatgtggttagaaggtggagtacataattgtgtgtgtacttataatagaggtttacttcattgaatcaagctagtgtgaattatacacagaggcagtacatttaacttacagggcaattctcttggattaatgaggcagtgatcttttgtgcagaagaacctataccca

SEQ ID NO: 26882 - DNA, 2593 bp, Zea Mays
gcaaaattgagctcccctgccatttgttctccatcccagttcccccggcaaacacactcggttctcccgtgcctctcgccgtctcgcgtcgcaacgactggccggccgccgccgccaccgccgacctacgtgccaaggtccgcatattcggaaccttcgccggcgagcacccaccaggattttttttgtacatctaagatgtacagggcctcgaatttcatacctgatcctaatcaggtgctcctagatgccaaaccattaagatcgttagctccaatgttccctgcccccatgggagtcaatgttaatcagtcaagtacaccaccattggtctgtgtcactccggttggtcaattttcagcagggtttggtgcaggcaccagtgctaatggtgccattgatgccacccctatctctgcatacaaaacaaggtcaaacatatcacttgatggtgatgatgatccttactcgggtaaccaaactgaacggaagcctaggagaggccgacctcccggttctggtcgtgatggctcaaatggtaagttaaagcgccctaagcccacttacaagaattttgttgctggcaaagagcttgcctttctggcagcttcatccgatcccagggatatcgtggaagcagttcacatgacctttgaggcactccggcgaagacatctgcagatggatgaaacacaggacgctagcaggcgtgcagacctgaaggctggtgccatcatgatggcaagtaacatcagggcaaattcgggcaagagggtaggaactgtccctggagttgaaataggagatattttctatttcaggatggagctgtgtgtcattggattgcatgcacctagtatgggaggcattgattacatgactagtaaatttggaaacgatgaggattctgtagccatatgtatcgtttccgcaggaggttatgagaatgatgatgatgacacagatgtgctggtatacagtggtcaagggggaaatagtaggaatactgaggagaggcaagaccagaagcttgagaggggtaacctagctcttgagaggagtttgcataggaagaatgagataagggttgtacgtggcttcaaggatccattttgcctaactgggaaaatttacatatatgatggcctgtacaaaattcatgagtcctggaaggagaaaacaaggtctggtatcaattgcttcaagtacaagctgctgcgtgaacctggacagcgtgatggagctgcattatggaagatgactcagaaatggatagatgatcctgctaccagaggcagggttctactagctgatctgtcatctaaggctgaaactattccagtttctcttgtcaatgaggttgaccatgagaaaggacctgcacatttcacctatactaaccaggtcaaatacgtgaggcctctcagttctatgaaaaagctgcagggctgtggatgccagagtgtttgcctgcccggtgatgccagttgtgcttgtggacaacataatggaggtgatttaccctacagttcattaggattattgtcatgccgcaaaccgatgatctatgaatgtggtgaatcttgcaactgttctacaaattgccggaacagagtgacccaaaaagggcccaggctacattttgaggtcttcaggaccaccaatcgaggctggggtcttcgttgctgggaacctgttcgtgctggttcatttatatgtgagtatgctggtgaggtcattgatgaactcaaagttaatttgaatgacaccgaagatgattacatttttcaaactgtatgccctggtgagaagactttaaaatggaattgtggacctgaactattaggtgaagctagcacatatgtatcggctgatgaatttgagccactgcctatcaagataagtgcaaaaaacatgggaaatgtctcccgtttcatgaaccacagttgctcacccaatgtcttctggcaacctgttcaatatgatcatggagatgatggacacccacatataatgttctttgcactgaaacatattccacccatgacagaactgacttatgactatggtgttgctggagctgaatctagtggttcaggctctcgtagaacgaagaactgcatgtgtggatcacaaaactgccgtggactattttgatgggttaagatccttgctctttgtggttaatcatacaaaccactttcagctagatcctttcttagtctccggatgatatgagtatgactgatgattccaattgctgccatgtgtactgtgaagacagcaagttgttgtcaaactgtagaatttctgttgccctgcacggcatggtggccgttctcccaccatttgttcaaatatttatgggggtgtggattgatgtatttcttctgctaatcttgtccaccagctgcaccggtctgtgtaaacttgttatgatccctgtttgctctggacgcctggttgtttaaccgtgactccttggatctggtcatgtaaattatcctggtttaggattatgttgcttttgactcgaattttctgcctcccttgctcgtttcatgtgatgcatcgtggccgatattttcagcaa

SEQ ID NO: 26883 - DNA, 12906 bp, Zea Mays
gctcacgcggcacgccgagcaaggggaccgacaggcggagcgcttctcagcccctccgcaccttcgggtctcgcgttggtggcgccggcgggcgctgccgatcgccggcggcggccgagatgttggaggaccaggtcgccttcctgctgcagaagtacctcggcaactacgtccggggcctcagcaaggaggcgctaaagatcagcgtctggagaggtgatgtagagctcacaaacatgcaactgaagccagaagctctcaattcattgaaattacctgttagagtcaaagctggctttcttggttctgtgaagctcaaggttccatggagcaggttgggacaagagccagttttggtttatcttgatcgaatttttatactagctgaaccagcaacacaagttgaaggttgcagcgaggatgctgtccaggaagcaaaaagaagtcgagttagggaaatggagatcaaattgttggagcgccaacagcaactgaaatctgaactaagttcatcatggctagggtctttcattggcactgtaattggaaatatcaagttatccattggcaatattcatatcagatacgaagacgtagagagcaatcctggccacccttttgcagcaggtctggtactttcaaagctttcagcagttacagtggatgaccttggcaaggagacttttgccacaggtggtgatttggaccgagtgaaaaagtctgttgaacttgagagtctggcggtgtattttgactctgatagcagttcttggattgtggataaaccctgggaggatttacttccatcagagtggagtcaggtttttgagtttcaggagcaggatggttccagatctgcttcgaaaaagcatgcctacattttacagcctgtatctggcaaagcaaaatatacaaagatacaacttactgaggcaaagaaaacaggacaagcattgcaaaatactgcagtggatttggatgatgttactctgtcgttgtcgaaggatggctacagggacatgttaaagttggctgataatttctctacattcaatcaacggctgagatatgctcatctccgaccatcttcaccattaaaatcggatccacgagcttggtggaagtatgcatacaaggtggtgactcaggaaatgaagaaagcaagcgggaggctatcttgggagcaattattgagaaatgcaagacttcggaagacatatgtatctttatatgcatccctcttaaaatctgacatgagtcgactggttgttgatgaccatgaggagattaagaggctggaccgtgaacttgatatggaggttattctacagtggaggatgttagctcacaagtttgtagaacagtcggtggaaacataccagtatgctcaacaaaataagaagtcctggtggactggctcttcaaaggatgaggaagattcaaagagttttactgatgaagattgggaaagactaaatcggattattgggtacaaagaaaccaacgagtatgtcactgatcaacaggatatgaaactgatgcaatttgattttgaaatacgtatgaaacataatgcatcaaagcttaccattgatgattcggagtgccttgctgatctctcatgccaagatttctgctgcaacttgaaaatgtatccggaggcaaaaatatttgatctgaagctgggttcctacaggcttttatctccatatggcctgcttgctgagagtgcaagtgtcatcgattcttttgttggcctcttctcctacaaaccttttgatgagcaactggactggagtttgacagctaaagcttcgccttgttatataacttatttaaaggattcagttgatcaaattgttggcttcttcaagagtagccctaccattagccagaacctggcactagagactgctgctgctgtacagatgacactagatgaagtgaaacggactgctcaacagcaaatgactcgggtgctaaaagatcagtccaggttttcactgaacatggatattgctgctccaaaaattaccgttcctaccaagttccgaccagatgatgtacatgagactaagcttttgcttgaccttggaaatttagttcttcggacagaggaaatatgggatgcctatacttcagaagagcaggatatatatctaaactttaatttggtgcttagtgatgtctctgcatttctggtggatggtgattaccattggaatgaaacatctgatgaaaagaacttgttgccagtaattgacaaatgtgggattgctttgaaacttcagcagggtgttggaaaccgggaagctgtttggcaacacagatatttgcgtctagtgggtccatttctctatgtatttgaaaatttaatgtctacaacgtacaagcaatggttcagtttacgcgggaaacaagttcaccagattctggaagacactggtgctttaattttgttgtttgataatgatgagggacgaaagatatggcagaaccgtttacagggtgctatataccgtgcatcgggttctgcaatttctagctttcctggagttgctctcccatcagaggcccactcattcaaaggcaactttcttgatgttgctgacacagagaaattatttgttgcgggcattcttgatgaattaaagatatgtttttcatgtggctatgaggttgaactctcaatgaaaggtggcaatttactgataggaactattttggggtcactagaaattgaagaccagtattactatccagggagtcctgtgccaaggttcttggcaaggtcttttattaatagcatgcaaactcaagaactcccgtctcttagccgaaagaacagtgcaggacctagaaacaccccattgatgaaaaatgacagtgaggaaaactttttcgaagcatcagatgattttgatgaatttgaaacacctatgcatcaaaagaggactatatcagactattttagcacccagaaatttttgcctactagcgttccttccctacagccgccaacatttaagcgcattcctgatttgataccagatactgaacttcaaactggcaaattcacattggaaggtagtggcactttcaatagttttgtgaaagctcagatagtgatttatgatcaacattctccccagtacaacagcttggataacagggtagttgtaactgttgccactttatccttcttttgccatcggccaactgttattgcaatcatggaatttatgaatgccatcaaccttgcaaacgggtctgatactgataaagataaaagcacttatcctgctactgtagaagatagtgcaattgaggaatctaagtctgatctggaatcagagccatcaataaaacccttactggctaaaggtaaaagcagaatagtttttcatcttacatccagcatggcagaggcacagatattactgatgaatgaaaatggtgaccggcttgctactttatcacaaaataatctctcgactgatataaaggtgttcacatcatcattcagcataaaggctgcactcggaaaccttaaaataagtgatgatagccttcttagcagccacccttacttttgggtttgtgatatgcgaaatcctggaggtcgttcatttgtggagatcgactttagttcatacaatgttggtgatgaagactattgtggttatgactatagccttgtagggcagctttcagaagttagaattgtttacctcaaccgttttgttcaagagattatcagttattttatgggacttgtgccaaaaagttctgatgccgttgtaaagctgaaagacaataagactaactcagagaagtgggttagcaaaaccgatatggaaggatcacctgctctcaaattggatgtttcattcagcaggcctataattgttatgccccgtgaaactaatagtaatgactttttggagcttgatgttctatacataacagtccaaaatgaattccaatggataggtggtgataagaatgagatgagcactgttcacttagacattttaacagttacagtacgggacataaatttagttattggtatgaatatggtgcgtggtgaaaccataattcaagatgtagaaggtctctcctttgaacttcgtagatcattgcgtgatttgagacatcagttgccagtggtggaggcagcaattaaggtggatgttttgaaagcaacactatccaatcgagaatatgaaattatttctgaatgtgcattgtctaacttctctgagacaccacatcctgtgcctactctggatgatcctcgatatggcacttccactactccatcccatgtatcagcttcttcttcagaaagtattcatgtcttgtccgaaggtgcagaaacatggatagctaataaattttctgtctcaataaatctggttgagctttctctgcattcaggatcgacaagagattctcctctggcgagcgttcaggcgagtggagcatggcttttctataaatcaaacacacggggagaaaattttatgtatgctactctcaaaggattttctgtttttgatgatcgtgaaggaaccaaagatgagttaaggcttgccattgggaaatcagcatctgttcgggacacatcatctgttgatggctatgataatcctaatgaacttgattcaggtgaacgaagaatacaaaaggatctaggccttgagccaatcccctcgatgcttattcttgatgccatcttccgaaaatcttcgtcatccgtctctgtctgtgttcagcggcccaagtttcttgtggcacttgacttcttactagcagtaatcgaattctttgtgccatctgctcagagtcttctatccaatgatgaagacaaggaccttttacatatgatcactccagtagtattgaatgatcaaatttatttccaggagcattcaacatttagtctttcacctcagaagcccttgattgttgataatgaaagatttgatcacttcgtatatgatgggaagggtggaaagttatatttgctggatagtgaggggaaaattctctcaagcccttgtactgagagtttcattcatgtgcttgggtgtaagagattgcaatttcggaatgtcactatagtgaatggtgaatatttggattcctgtatctctctcggtgatgatagctgttattcagcatcaaggaatgaccatgtctacttagtaagagaagatgatgggtccttgtcaacccccagcaaggaaattagaggagacagtgttaaaaatgggagtgctgatatatcaaccgaatttattatggaactacaggctattggaccagagcttactttctatagtacatcaaggaatgctggtgaaaacttagcactgtcaacaaaggttattcatgcccacacagatgcattttgcaggcttataatgaaaggcgacagtatggagatgaatggaaacatacttggtttaaagatggagagtaatggcatcagagttatagaaccatttgacatggtcgtgaaatattccaatgcgtctggaaagacaaatttgcatctactagtttctgaaatatatatgaatttttccttcagtattctcagactgtttttagcagttgaggaagaaatttcagcatttcttaggatgtcgtcaaagaaaatttcactggtgtgttaccagtttgacaaagttgcaactatgcaaggtaatgctaatgatcaagtgttatctttctggcgaccgcgtgctccatctggatatgccatttttggcgattatctcacaccaatgaacgagcctcctactaaaggagttcttgctctgaacacaaacattgttagggtcaaaaggcctttatcgtacaaactagtgtggcaatctggttctccaagaacaaacatttttcatcagaaggacttggaggataagatctctaatattgaccagctctgctctgtttggttacctgtggcacctgcgggttatgttgcaatgggttgtgttgcttcatctggaactgctgaaccacctttgtcttcagctttctgtttaactgcttctttggtttcatcatgtaatctaagggattgcattgcactgagggataacactaacatgatattctggcgagttgataatgcttttggttcctttttacctggagatcctgcaagcatgagtgtggatgggaatgcttatgatcttcgacatatgctgttcgacagtgcagactcatcttccaagactgtctctagaaggcaagatagtagaaatgatttctctcaactagagagatcagaattgacctcaggtcggctatttgatgctgtggcaagctttaaactaatttggtcaaatagtgggacctcttcaccaaaaaagctctcaatatggcgtccaatgttgtctgaaggaatgttttactttggtgacatagctgttaacgggtatgaaccaccaaattcaactgttgttcttcgtgatactggtgaagacacttttctcagagctcctgaaggttttgaccttgttggtcgaattaagaagcaccggggcactgagggtgtatcattttggtttcctaaagctccttcaggttttgtggcattaggatgtgttgcatctaaaagttctccaaccaaagaggacttcagtttgttaagatgtattagaaatgacatggtggctggaggtcaattttctgaggaaagtttatgggattcatctaatgctagaacatctgaaccttttagcttatggactgttgataatgatgctggtacgtttcttgtgagaagtggatatagaaaacctccaaagaggcttgcactgaagcttgcaggtccacctacatcaagcagttcagatagcatcattgttgatgccaaaattaaaacattttctgctgtttcctttgatgattatggcggaatgtattctatgcagatggtgccattatttggggtgtcctttgacagtgttggactaagttatcatggaggtcctcatcatcttaatgcaactgtgagcttgtcttttgtggccagatcctataatgacaagtatagctcgtgggagccctttattgaaccaacagatgcatttcttaggtaccaattcgacatgaatacaccaggttctcctagacaactccgtattacctcaactcaagaccttaatttgaacatatctgtttccaatacaaacatgttatcgcaagcttatgctagctggaataatattagctgtggtgatgaattgtataagaaggaaaccttttcttctactgagcgaccagttcttgatgttcatcaaagaagaagttattatgttgtcccacaaaataaacttggacaagatatttatgtaagaactactgaaaatagaggttcacttgttactctgttgccctctggggatgataggtccataaaagttccggctttaagggatctatcagattctcatttaaatggaagatctgttaaaccatatcggttgatgataactgccattcttgcggatgcagaggtcaaggatgatgaaggattagaaactggtgaatatatgactgctgtgcggctcttttcagaaaaccattccatatctgttcaacaacagagtgcccgtacttgtgctgctattggagaacacttgtcacagaacaccagaaaggtgaactggaacgaaatgttctttttcaaagtcgaacgtgtggacagctatactctagagcttcttgtgcttgatgctggtaaaggtcaaccagttggtatatactctgctccattggagcaagttgtgcaaaagctccctcctacctctaatccggactctgtcaaatttgatttggctttaggagaccttatgtcaactaagacagtggaacaggaaactgttaaacctagtggaaaaataagatttgcggtacttgtttctggtagagctagtgtacaacaagggaacagagccagtcctgaaagcaagactggatatattcagattagcccttcaaaagaagggccatggacaagcatgaagttgaactatgctgtacctgcagcatgttggaggtttggtaattgtgtgattgctagtgaagcaacagtcaaggaaggcaacagatacgttagcatacgttcccttgtgtcagttactaatacaaccaatttcattgttgatttacgtctaaaaggaagaatttctcaaagtgcacgggcagatgaacagggagacagttttggtaaagaggatcaaatcctgattggaacgctggagcccaattctactattccagtcccactatcaggcctctcacatcctcttatgccctatatgttgcagttaaggccggcaaaacatcatgatcatgaaaattactcctggagtgatgtccaggagaggcgcagtcaaaccgagtttagaaaggaggagatcctagatttatgtatatcagatctgtatgaatcggaaaacttgctattctgctcacaggtagatggcacctcgaattcttgtcatggactgtggttttgcttgagcatagaaggcaaggaaataggcaaagatgtacagatggaaccaatatatgattggtgcatcattattaagtccccgttgtgtttgacatactatcttcccattgctgcacattatactgtcagttctagccacctcgataatgaagattcaagttgctcccttggcaccttaagtccgggtgaggctgtaaaggttcacaatgttgatccaagaaaccctttgtacttatccctggttccacatggaggatgggaactgatgcatgagcctgttgttatatcacatccaacccaagcaccttccaaatttatcaatctaagaagctctttatcaggaagggttgtacagattctgcttgaacaaagcagtgatagtgactatttgatggcaaggcttatcagaatatatgttccctattggatatctttttctagattgcctacacttactctgcgtctcattgatatttctggaaggaaagagaagaggcgccttctttcacgttcacatctggaaaggggtgagaagcaactctatgatataaaacacgatgaattggttgagggatacactatagcgtctggattaaattttaagggattaggacttctatcatctgttggacatggtggacggtttggatctgtgaaagaattgtcgcctcttggcgatatggatggagcagttgatctttctgcctatgatgatgatggaaaatgcatgcatattcttctttgttcaaagccatcctcgtatcaagctgttccaacaaaggttatccatgtacgcccgtatataacattcacaaacagggccggacaagatttgtacttaaaacttagtattgaggatgagccaaaggtcttacatgcatatgactggagggtttcctttatgtactccaaggggactactgacaaactgcaggtccgactagtggatacagaatggtgccaacctctggagatagtaaaagaagacactattgttatagcaatgagaaagcagggtggtactcagaaatttgtaaaagctgagatacgtggttatgaggaaggttcaagattcttgattgtattccgtctgggcccagcatatggaccaatcaggattgagaaccggacgagtcataccacaatcagtacttgccagtctggtttaggggaggagagttggatccaagtgaagccacatgcaaccagaaaatattcttgggatgacccatatggacagaaagttattgatgttagcattgataaaggcgatgatacttgtgtcctatgtgttgacctggaaaatcctattggaagttccaccagttttagggaacatggcctcatgtttactgttgataccagtgacattaagatattgaagtttgctgattacataaggaaagaggaagtatatggattgcctggatctgaactgactgatcaccaaggatcgtcattgaaggaaaatgagacagagccaggtgctggacccttggagctcattgttgaacttggagttgttggaatatctttgattgatcataagccaagagagcttttatacttgcatctgcagaaggttttcgtttcatacttgactggttatgattttgggaccactagcaggtttaaattaatccttggcgagttgcaactagataatcagttgccactgtctacaatgcctgttgttttgtctaccgagagcaggcctgattcaaatcgttctgttttcaaagcaaacgttgctgttagcaatgtaacttctaatggcattcaagtttacccacatgtctatatccgggtaactgatcaaacatggagactaaacattcatgaacctattatttgggcactgtttgacttctacagcaatcttcgttttgtcaccaccatcaacagcacaactgtcacggaagtggatcctgagatacgaatagagctcattgatatttcagagataaggctaaaaatatctctggaaactgcgcctagtcaaagacctcgtggtgtcctaggcatatggagccccatcctatctgctgtgggtaatgcactcaagattcaggtgcatctgaggaaggtcatgcacagaagccggtttatgcggaagagctccatcatccctgctatcacgaaccgaatcaagagagatctgattcacaatccgctacatctaatcttttctgtggattttcttggagtaacaaaatcaactttatcatcacttagtaaaggatttgcagagctctctactgatgggcaatttcttcagctgagatcaaagcaggtttggtcaaggagaatcactggtgttggtgatgggctagttcaagggactgaagcatttgctcagggtttggctttcggggtttctggtgttttaagaaagccagttgagagtgccagacagtatggtgttataggtattgcacctggcattggccgtgcttttgtgggtttcattgtccaacctttaagtggggctctggattttttttcactgacggttgatggaatcagtgctagttttatgagatgtgttaacattttaagtaacaaatctgttccgcagaggataagagatcctcgtgctatacatcgtgatggtatagtaagagactatgacaaatttgaagctgctggccagatggccctttatctggcagaagctagcagatattttgcatgcacggatttatttcgagaaccttctaagtacgcatggtctgattactatgaagaccattttattttaccaagccagaggattgctttagtaactaataagcgggtgatgctgcttcagtgcttggatctagataaaatggacaagaaaccttctaaaatactttgggatgttccttgggaagaagtactttcattggagctagcaaaagctgggtatcagaggccttcacatgtaatcatacatctgaagaattttaggaggtcagagaactttgtaaggcttattaagtgcaacattgacaacgaacgggaacctcaggctctttcactttgctgttcaattcggaaaatgtggagatctcaccaagcagcaatgaaagttataccattgaaggttccatcaggccagcgtcatgtgtattttgtgtcagatgatgataaaaaggaatcccacagtttatctaggcctttgctaagctcgggaggaacctctactgatgttgagcaacagttcataaacaatacagttcactttcagaaaatgtggagcagtgaaccagaaattcagagccgatgcaaactagttgccaagcagattgcggatgacggaagggtgttcagcatatggaggcctctctgccctaatgggtatgtctcaattggtgatattgcgcatgttggcatccatccaccgcattttgctgctgtatacaagaatatcaatgggaactttgcactgcctcttggctatgacctggtttggagaaattgtgctgaggattacaagagccctgtatcaatatggcttccaaggccaccggggggatacgtagctcttgggtgtgttgctgtcccttcattcaaggagcccactcttgactgtgctttctgtgtggatgagagactcgcggaggatgccgcgtatgaggagcaaatcatatgggcctcatcggatgcttacccatggggatgctatatctaccaagttcagagcgcctcaatgcagttcatggcacttcgtgtcccaaaagaacaatctgagctaaggcccaagaagatattggagtcatttctgcagcaagcatcagagactcaaacgtcccgtgcatgaagaagctgcacatgatgcttgtgcgtgcaagagaactcggctgggacaaagggcaagtctcgtgcaagaaagctcgaagaatgccacttctttcggatcactccatttctccgttgtcaaagcatacacagaggacagagccttgcatgccaacactcgggttgacggaagtgttgtatactagaatagtaggttaaaggttgtaaatgtaaagttttgtaacgtttgatatagtttttgtccagctacatttgttaaggcccatgtggacgtgggccatattagttgtggctacatattctactaagaagttctcaggactaatcatactttctctaatttaaggttgttaaggcccatgtggacgtgggccatactagttgtggctatatattctactaagggcccgtttggtaaaacttcagctcctgcttctttagcttcagattctgatcctcgtgaggagctgatcctcctgattttcctagaaaatcagaatcatttttaaaaccgtttggcaagtaaactgattcttgtcttctgagggttggtggcc

SEQ ID NO: 26884 - DNA, 1233 bp, Zea Mays
agacagcctcaatcttcctatcctattttctctcactccatctcaagtcaggcacggtgacttgacgaggcccatctaagcacactacagcaccgggcgaggcggctaggccccctcaccgtccaccggcgactgggccggccgtcgctgccgccctgcctctccaccgtcgccggcgacgagcaccactaggtgtttttgagtctgttgcgagtgttgtggccatgtccatgttcaataggatcttcgggaagcccaaggagcaggccaactccaatgctttggccactctggacaagttaaatgagacacttgatatgctggagaagaaagaaaaggtgctggagaaaaaagcaaacgctgagcttgagagagccaaggagttctcgaaagcaaagaataaaagagcggctatccaatccttgaagaggaaaaaactttatgagcaacaaattgagcagcttggaaattttcagttgagaatccatgatcagatgatcatgttagaagcagctaaagctacaacagagactgttgatgcattgagaactggagctgcagctatgaaagcaatgcaaaaagcaacaaacattgatgatgtcgacaagaccatggatgaaattaacgaacagactgaaaacatgaaacaaattcaggatgctttgtcagctcctcttggagcttttgctgatttcgacgaggatgaactggaagctgaacttgaagaactggagggagcagagttggaatctcagcttcttgagcctgttgcagctcctccggtgcatccagtgcatgtcccagccaacaagcaaccagctcgccctgccccacagaaagttacagctgaagatgatgaacttgctgcactgcaagcggaaatggcattgtgatcagttgtcaaaaatagagcagagctggtgccggaggatcccacatgagtgtggtctagactgtagagaagggataaaccgaggcaggcctccccctcaaatgtggagaggctgcatcgatttcccgacctggtgactcggtgagacagctctcaccactacaccaagcctgccctttgtgtagttgtcagcattacttatttgttaactatccgatgcagaggtgtacatatattagctagcttttaaattattctatactgttttattccttcatttcttttggatcttcaactgtttaggctctgttttagctcccaggatatcatgatgcgttagg

SEQ ID NO: 26885 - DNA, 219 bp, Zea Mays
gcgccaaagaagaacatcaaatataatgataaagtgtatagagataaatggcacaagtatcattattacatagcggaagtcttacaaaaacaaatgataacaataaagcaaactatatattattccttggcaccatcaagctgactgcgagacgtcacctagatgagctcgtactcctcattatatggcacctcttggaccacatattcttctcctgtg

SEQ ID NO: 26886 - DNA, 3092 bp, Zea Mays
taaatatataaattttaaaactgattcaataaagttcaaaatgagagatttaacgacttttcgccatcagttattagagcgcacgtgcagatccacccgggcgtggcttacccagcaatggcgaccatcggccttgtcccctcgacagtcgtcgcatccaccgccattcgcgccccggcccccgcagcgctgacccgtgccagcaaccgccagcccccgcacgcccgccgcctgctggacctcggccgccgcgcgccggcgatggacgccctccgcgtgtcgggtgccgccgagcccctcctccgccccgccgccgccggggggcaccccaggctccgcgtgcggacccgtgcgcagcagggcgatggcggcgccgcggcggagggggacgccgcgttctcgtgggcgcccgtcgtcctcccgtttttattccctgcattgggtggtctccttttcggctatgatattggcgcaacctctggagcaaccatctctgtgcaatctcctgatctcagtggcactgattggttcagcttgtcatctttgcaactagggcttgtggccagtggttcactttatggtgctcttggcggctctcttcttgcataccgcattgcagattttctaggaaggaggatagaattggtcacagcagctgcattatatatccttggtgctttagtcactggatttgcccctaattttgtagcactaatcataggtcgtgtcctgtatgggattggtattggtttggtgagtatctgcaggtacagatgtttttttatttccttttttctaaaatgatcccaggtaattgttatcaaacgaatctaattgagaactgcatatagaaaacgattttctggggacatttagctatacattcactcaagctaaggaacataacattcactgatataaacttataatgccatgatgtccgattgcagttttctgatatttatatgttagtcatttgctgaagtgtgtaacatcaaaagctagttggctgatgtagtttgatgggcatgttctgttataactaattatagtataagtagatataaaacatgcttgcacttgatatttcttatattttgatgatgcgttgaataaacatattgctgttggtttgaaatatattgtttcctaagttatttaatataactttctgctttaatttctgaggtagttggcacaaggttgttttgtatgttgcactttacggtggcatgcttttgctaacttaatatccactggcatccaaaatgtccaatggtctatgcttcgttaaaaagggaatgatatgtctcgatgaaacgtggacctcacatgtgtcactgacagtgtcaaataaggaattgcgcaaaactgcaatggcaatgcatggtgcccctctttatattgcggagacttctccttcacaaatacgtggaacattgatatctttgaaggagctgtttattgtgttagggatactgttaggataccttgtaggaagtcttgaaattgacaatgtaggaggatggcggtacatgtttggttttagtgctccgcttgcagctattatggctattggtatgtggactttaccatcttcaccaagatggctacttctcagggcagttcaaggaaaggcttctttggaggataataaaaagaaggcaattcaagcccttagaacattgaggggccgcacagcaagtgaaaaggttttggcagatgatgttgacgatacaattgtctctattaaggctgcctacgcaggacaggaagctgaaggaaacgtttgggatgtatttgaaggagctagcttgaaggccttcactattggcggaggtctggttctgtttcagcagataacaggtcaaccgagtgttctatattatgctgcttcaatacttcagactgctggattctcagctgcatcagatgctgccaaagtagcaatcttgattgggttgttcaagttgctaatgacaggtgttgcggtatttaaagttgacgatgttggaaggcgcccattattgataggaggtgttggtggaattgctttgtcactcttcctactggcagcttactacaagatcctgaacaacttcccctttgttgctgtcggcgcgttacttctatatgtcggtgcttaccaggtctcatttggtccaattagttggctaatggtatctgagatctttccactccggacaagagggcgtgggatcagcctcgcagtactaacaaatttcggctcgaacgctctggtgacatttgcgttttcacccttgaaggagctcctcgggccagccaatatatttttcctgttcggcgtcatagcagtgctctccctcgtgtttgtgatcctcgtcgttccagaaaccaaaggactgagcctggaggagatcgagtcgaagatcctgaagtaattaaaaaccgttcgtgcgatcataagccccatttggagatattgtaagtagcgatgccattttcaaaacgggcgctcgctcactcgtaggatcggagccaaagctttcagacatgggagtacatatgcaaagggcacgtctcggtgtaaagcttggacatctttctcttttattagcgtagtgaatatttccgaacatacttggtaaattacatttcagttgagtcataatcacgcttctgtagactgtagtccactgtgacctactgtagtagtatgcatgtcactagtaaaagctggtaagctgtgtgatggactgatggtgtagacttgtgcagttgtgctcgcataaggctggccatcagatcgtgtatatagcgacataaaacactattttgcactatagataatactgttataatttacagaatggagttggaaacatgagataaagataagaggtgggacatgagagcttcggtagactatttttaatattatgcagtatgagataaaggtctttgagtgagtggttgtccatccatggatcttctcaaaatcttgtttgtgatctatcattaaaagcttgatctgttatttttaccgaacccctccagaaataagagccattgcttttgacatggacttgtgagatagattttgagcttag

SEQ ID NO: 26887 - DNA, 2088 bp, Zea Mays
ttaaaaatcatccagagatgggggagcagctgaacttactggttcgcctactgaaaaggccattctttcttggggccttaagatagggatggatttcgacgatgtgaggacaaaatcttcagttattcatgtttttccatttaactcggagaagaaacgtggcgctgttgcagtacagttagatgatggtgttcacatccactggaaaggtgcagctgaaatagtgttatcatcttgcaaaagctggctttccgtcgatggctctgttcagtcaatgagtgctgagaagcacgatgaattcaagagatcaatcgaagacatgggagcgaattcattacgctgtgttgcttttgcatactgttcctttgacattgaaaagatcccaatggaagacataacaagctgggagttgcctgaggatgacctgactctgcttggcatcataggaataaaggacccctgtcgcccaggtgtaagggatgctgtacgcctgtgcactactgctggtgttaaggtgcgcatggttacaggagataatattgaaacagctaaagctatagctctggagtgtggaatactagatgcaaatagtgttatttcagagccagttgtaatcgagggaaaagtgttccgtgagatgtctgaaagtgcaagaggagaggccgccgacaagataattgtgatggggagatcctcgccaaatgataaacttttgcttgtccaagctttaaaacgaaaaggccatgttgtagctgttactggtgatggcacaaatgatgcccctgcattgcacgaggccgatataggtctttcaatgggcatttccgggacagaagttgctaaagaaagctctgacattataatcttggatgatgacttcacgtcagttgtcaaggttgttcgttggggacgatctgtctacgctaatatccagaaattcattcagttccagctcaccgtcaatgttgctgcacttgtcattaatgtggttgctgctgtgtcctctggtgatgtgcccctaaatgctgttgagcttctgtgggtgaacctcataatggacacacttggagctcttgcattagcaaccgagcctccaacagacaaccttatgaagagaaatcctgttggtcgaagggaacctcttgttacaaatatcatgtggagaaacttgtttgttcaggccctttaccaagtagcaattcttctgattttcgattttgatggagtaaggattctgcgtctgcagaatgaaagccgatctgatgctgagaagataacaaatactttcatcttcaacacatttgtattttgccagatcttcaatgagttcaatgcacgaaaacccgaggaaaagaatgtcttcaaaggggtcacgaagaatcacctgttcatgggaataatcggtataacgacagtatttcagatactgataattcagttcctggggaagttcttcaaaatagtgaggcttggttggagactatggttggtttcagttgctatcggccttgtgagttggcccctggcttatgtgggtaaatttattcctgtgcccgtaagacctcttccggactatttcaaaccccgctgttgttggaaaccgccgcgccgagacgaggaggaaggtgggcagagctaaagcgcaacgagtgggcagtgtaaataggcacgtgataaaaaaatggagataaattgcactggttgattccatggtagcagcatcctggggatgtacgcataagatggcaggtagtcggcctcgtcgttttcttctaggagaagcagtcggaagaaaagaagtactatacagaagccaaacttgtctacccctatccagctggtgtgtctgctatgcggcagcgaaacttgagtcattagattgtagcctgaatgaaagcagcgctagcttgcgatgtagcagtacctttttttccctggcgatatcatctgactgtaaatttgtaaatgctttcggactacgagttgttcttatttttcatccacctcttctctacggaacgtttttttctatataagaaaataaagtcaacagagcagttctaaaacgactgttttttttttcctgaa

SEQ ID NO: 26888 - DNA, 3204 bp, Zea Mays
cagtcacacataacacagcctagggttggtcaaattcttcctttgcttacatgagtgtatgggcatgaacccatgaggccatgaccgtgcgatgtggctgtgccaaaatagagtttttgggccttcgacaaccactgaggctgtctatgatgttgcagcccggcctgttgtaaaaggtgctatggagggcataaatggtacagtttttgcctatggtgtaacaagtagtgggaagacccacacaatgcacggcgagcacaattgtcctggaataatcccactagccatcaaggatgtcttcagcatgatccaagatagtcctggaagagaatttttgctccgtgtgtcgtaccttgaaatctataatgaggtgataaatgatctacttgatcctactggccaaaatttgcgtgtgcgggaggatgcacagggaacctatgtagaaggaataaaagaagaagtagttctgtctccaggacatgctctttcttttattgcagcgggtgaagaacatcggcatgttggctctaacaacttcaacttatttagcagccgaagtcatactattttcacattgatgattgaaagtagcgcccgtggtgatgagtatgatggcgtcatgtattcacagctcaatttgattgatctagctggctctgagagctccaagacagagactacagggctaagaagaagggaagggtcatacattaacaagagccttttaacgcttggaacagtcattggcaagctcagtgaagggagggcaacacatataccctatcgtgattctaagttgacccgtctgctacagtcatcattaagtggccatggtcatgtctcactaatttgcacaattaccccagcatcaagtaacatggaagaaacccataatacattgaaatttgcaagcagagcaaaacgtgttgaaatttacgcctctcgtaaccggataattgatgagaaatcattgatcaagaagtatcagaaagaaatatcctctctaaagcaagaactcgatcagctaaggagaggaattgttggtggtgccagccaggaagaaattatgagtttacgtcagcagttggaggagggtcaggtcaagatgcagtctcgtctagaggaggaagaggaagcgaaagctgctctaatgagcaggatacaacgcttgaccaagttgatacttgtttccaccaaaaacaatattcctgccttgacagatggtcatcagcggcataattctgtcagcgagcaagataagttaagcacttcacaagatagctctacacttgtccaaaatgagggcacaacaaaagaccacctaccagactccttagatgagatcaaccaattaagatctggcagtggtgaacattcttcagctacttgttctgctacagattcaatgcaggcaggattcacggcatcagatcatatggacctactgattgagcaaattaagatgctcgctggggaggttgcatttggtaccagttcgctgaaaaggctaatcgaacagtccatagatgatcctgaagggtcaaaggaccaaatagagaatttagagcgtgaaatccagcaaaagagaagacatatgcgagccttggaaaaacaaatcatggaaagtggcgaggcatcagttgctaatgcatccatggtggatatgcagcagactattacaaaactaactgctcagtgcagtgagaaggcttttgagttagagttaaagtcagctgataatcgtgttctccaggagcagctacaacagaagaatgcggaagtcaacgatttacaagaaaaagtttttcaccttgagcaacaactctccgcaaaagtgggtatatcccctgagcaggaaactgattgcgcacagcaggaggctattgatttgaaatctaaacttcagtccaaggaagctgaattcgaaaagctaaaattcgagcatctgaaaattactgaggaacagtgcgacttgatcaatcaaaaccataaattaagtgaggaagctgcatatgcaaaagaattggcatcttcggctgctgttgaactcaagaatttggctgaagaagttacaaagctatctgtactaaatgtgaagcaagcaaaggagttactagttgctcaggagatggcacattcaagggttcatggtagaaagggtcgtacaaccagtaggggtagggacgaggttgggacatggagccttgatttagaggacatgaaaatagagctacaggccagaagacagagggaggctgctttggaagctgctttggcagagaaggagcttctcgaagaggagtacaagaaaaagtttgacgaggcaaagaaaaaggaactgtctttggaaaacgatctagcaggcatgtgggttcttgttgctaagttaaaaagaggggctttaggcatatccgattttaatgttgatgatcgaactgttaacctagctgatataactaatggcacaaaggaaaacaaaggtgaaaagaattttgctctagttgagaagcaagtttcagaagattctgtgaagtcgctgagcacagaagaacatagaagtccagagtttgaaccacttcttgttcgtctgaaggctaaaattcaggagatgaaggaaaaggacactgatcccctgagcgataaagatgggaactcacatgtctgcaaagtttgcttcgaatctgcaaccgctgcagtattgcttccttgccggcatttttgcttgtgcaagccttgctcgcttgcctgttcagagtgccctctgtgccgcacaagaatagcagacaggataatcacgttcacatgaacggcgtgctagcttcaggccattctgaagcatggcgcactcttgtaaaatggtcggtggtatatgtttctctttttttccttagcaaagaaggtgccttttatgttccttctgtgttgtatcgccattctttgggttcccctatatggctatatagcttcaccttacgttctttatcaaggagctgcaaacgatgagaccccattggaatgcaggaattgtacaggaatttcacaaaagttcattttcatagaaaaaacacaacaaaaaggcaaaattactgtgttctagtggagccctgacttctcgctctgcaaatctctatctctgcaaatttttcaaaaaaactcctacatttttttataatcaatctgtacttatagtctcttatctactat

SEQ ID NO: 26889 - DNA, 1486 bp, Zea Mays
ggagggcgtccacactcaccacggctccgccctccccccacccccgctaatctcgccgcgcgagcgccgcgcgcgccccgtcttcgcgctctccccagaatcccgtctgtgcccacgctctccaaggcgagtcctccgcccagatcgctgcagtccctgctctctcctcgccccatccacggcgatgcagcgggagagagaggagcgtggcggagacgaccggagcaacgacgagaaagcatccatggctgcctgtgtgggttccctgtgtgcgcgtccgccggcgccgccatggcggcgtccgccttctccttcgtgggcatggactccattctccatccccatgattcccttcctcgcctgctgttgaagatcattcctgccacaacgccagaggagaacaggaggaggaatccacagcccaggtatgctagaaatcccccagactagctgccgctggatccggtcgatggcccctcgccctccacctccaggctgcatgcgcgtgttcatcgcctgttgtctcaagtgtaaaagtgtgcccttccttcattgtcgcgatccccttccccacacgatccacttccccaatccctgcgccaccatcccgcctccaactgcgcccgagcccccgccacactcccgttgaataatggaagagctaatatagcttgtctctgtaatttttccctagctctttgttgtacgtgcctttgtagccctgtgtactgcaatgaaatgtggggcttgttgtcattgtagacagcgcgcgtaattttctgtgtgtttggattcatctctggtgtcctgcttgatccatgccccatggctgctttatcttctttacagcctgacgaatgatggttgggagtgttggtcatcattttcctgcctggttgggtttcctctgcttgtcattcttgcagtcagcgtgaacgaggttgaggcattgtacaggttgttcaagaagattggcagcaccttcattggcgatgggctgattaacaagataaggctagatgaggtggctatatctcacatggatatcgtgtctccgccagtcgtggttgaacggtcgtgcctggccccctcccccacgagattgccaacctcccgcctcgctcgtcgcagtgctgcccccggcgaggctgccgaaattgtcaccatcctccaccccgctcgctatggcgagtctcacaaggcactgaaatgtgtagatgttttcaaggagttctatcaaacaagaacgaagcacatgaagctgacatggatgggaacctgcaacatcagtgtcaagtttgatgctaagcctattgagctcattgttatgacatatcaggccacattactactactgttcaatggatccgacaggcttagatattctgaaattgcaacacaactaaacctgtcagatgatgtattgatgagaagaaaaaaggtgttgaaaatgttgacaaagacaggaggtcgatctggagcataa

SEQ ID NO: 26890 - DNA, 3130 bp, Zea Mays
aaacacgcatccgactccgtctccagcaaccccattcggctcctccctccgtctccagcagttctccatccaaacaaaccgcgtgatccgtctgaccgctcgctcgctctcgccgggggtccggagctccccacctccagcgacccagtccatccgcgcgtgcagcgccgcggcgccgatggagtacgacttccgcggcggccgctcgagctcgggcccgggcccctacggcgcgcctccggggggcgcgcccgggggaggctcctcgctctacccgcgcgtcgggcagccctcccacggcgggggcggggcctccacggcgtctccgcgggccgcgccgtaccaccacggctccgggtccggatccggctccgggtcctcggctcccgtcgtaacgccgttggctccaacctccttctcctcgtcctcgtcctcgtcctcgaaagtgggcatacaagttgcgataaagcctgaattccgcattaccccacctcctcaattgccaccagagatggtagagattcctcgcagcaccttcaactttgattttgagtatgagagaatgattcttgctgaggcagagaaggagaaccccaactggactaaatttgtggtagaaagacaggctgcacctcttgtgccacagcaggctagaccagcatcgtcagggtcaggggatccagttgttgacaagtatgtctcaatggggcttgggcgtcaagccgtctcatttgcggtgttgaattatggagataatccaacaaaggtgaaagagttcgtgaaatcctacagcatcctccacgagatgggcttcacatcgccaaacgtccccgagctgctagccatccacgacaacgatcccgacaaagtcatccagcgactgctatcctcgccatcctgatcctagaagaacaagacgcctcgcatttgtgtgccgcatccatgtacagccctgcccctacgctggcaaccatcacagatgatgtatacgcgttgcctgccgttagttctgtgaaccgagtaacacgctttgtatgttgtacttgtataccgtcacccgtttggtgtttttccttaaaaaatgttttcgcgtcgttttattcacgtttgaattttttgtgagcctatacagtacaacatgattgggttagtgatgattctcgtcgagaaacggggcgtacttgctttgcttgactagttcatctttttttcttcagtttccttgcaccgccgagcgtcggcgttggctgtcacggattgtcctgtgtttggtcagaggatacaaggctatagcagcagcgtccgaaatctgaattgatcgaagtgtccaacaaagtccaaaacatctgtcggtcgttggactccactccacagttcacatcaccagtgtaactgagaattctccaacaggctggacagcaaagcatgagcaaatactagtagacgtactagtctacaagcatctccagccagtaacggcgctaccgctttgtcatggcgtcgcggcggcggctgctgccgttctctccttccccgtgcagccaagctccagccgctcaacgcgagcaaatcccaaagatagttttcatcactaccaaggaagtgacaaatttccagctcaacagcaggaactggtgccgctgccgcctataagtgtgccatgtcgccaccgctctctacctctacacaccgacacgcatgcagatcggttgccggggcacgatgaggaccgcgtggccgctgctcctcgtggcgacggcgctgctttcgacttcggcagcgagggccaggaggacctgcaggttccctgccgtcttcaacttcggcgactccaactccgacaccggcggcttctgggccgccttcccggcgcagcagggcccgttcggcatgacgtacttcggcaggccggccggccgcgcctccgacggccgcctcgtcatcgacttcatagcgcaagcgatggggctgccgctgctgagcccctacctgcagtccatagggtcggactaccggcacggcgccaacttcgcgacgctggcgtcgacggcgctgctgcccaacacgtcggtgttcgtcaccgggaccagccccttctccctcggcatccagctcaaccagatgaaggagttcaggaacagagtgctcgcctccaaaggaaacaacggccaactccctggctcggaaatcttgggcgacgctctgtacacaatcgacatcgggcagaacgacttcacctcgaaccttggatccctcggggtcgaaagcgtcaagcgaagcctaccttcagtcgtcagccagatctcctggacgatacaggacttgtacagcagcatcggagctcgcagcttcatggtgttcaacatggtgcccgtaggatgctacccggcattcctcgcggggcttcctcgtgacagcaaggacctggacgagttcgggtgcgtgaaaagctacaacggcggggtcacgtactacaaccagctgctgaacgacagcctagccgaggtgaggaagacgctgcaggatgcgtcggtcgtgtacgtcgacaagcatgctgtgacgctcgaactgttccagcacccaaccgctcacgggctgaagcacggggctagagcttgctgcgggtacggcggtggaacctacaatttcgatcgagatgtttattgtggtgacagcaaggtagtgaatggagaagctgcgacggcgggggcttgtgcagacccgcaaaactatgtcagctgggacgggatacatgccactgaagctgcaaatagtaggatagcgtatgctgtgatcagcggctcctattcgtacccacctttcgatctttcaaagctatgtagcccttaggcatcatcagtcgtgaaagggagtacagcatcaccatacaccgcatttctctgaaacaagcagccacatttctttcattgacagcatcaacacacaggacaaaagctacgaactcaagaacgacgcacgcctacaacgagtcacgacgagaacagaggctaaagacctactccctctgccctagaaatgaagtcgtttgacttttttaagacaagtttgactggtttgttttattcaaaatatttatgaaaatatagaaaaaaaacatttgatagttaaa

SEQ ID NO: 26891 - DNA, 1521 bp, Zea Mays
tcccagccgccgccgactctatctctcccttccctctcaccacctcctcgtcatcctcagcgtgcacgctgcgcgtggccgtagtgggggtggccccgcggcacgtcggctgccgaggcgctggtctcgccgagggcccagatgcaggtgctctcctctaccaacctcgccgctgacttctcccgcgcgctgccgcccggggcacccatccccatgctccgccgtgaggtgctccactccttcctccgccgtcgaggccgagctcgtccagggcctcatcacctccgccgtgaggtgctccactccttcgtcttcaagctctcgccccaggggtgcgctagtgccaggtgcggcgagccagcagatcaaggaaaccgcccgtggccgccccaagcgttacatctgcactggctgctgctggtgacaagcaagaacaaccaaagtaaagaagtctacataattgccaagaatcatcttcatccatggggatccggtaaagcagcagcccctcggctgggtaacctactgtgaagcatcaggtcagcagtgaaggagatctgagttcgaagcaaatttgccgcgaattctctccggaaatcattcgagtggctggattttgaagcgcagccatgggatcggaggattttgtctgtaaaatgatgtgattcggcgggtgagagactggttcttccgggtccattgtagcagcagtcctttttttatctccttagttttgttggagttcttccgggtgagagactggttcttctgggcccagcggcgggtgagagactggttcttccgggtccattgaagcgcagccatgggatcggaggattatgtagacttctttaggccttgttcgtttgtatcggattgtatccgtaatcattccagctaatcaaaatttatataaattagagaagcaatccggttaggaatcgttccgacccaccaatccgtaacgaccgaacaggctcttactgtgcgaaaaaaactgcctcggaatcattacaggtgctctagcctccgcatggaattcgcggaatctgcagctgtgactgactctgctatggcagaagctgctcttcaaatgtctgtccaggatgcaaacatgtccagtgacactgatatgagtaaggtgtttgaagacagaacgtttgtgtcatctatccttaattcgtttcctggtgttgatcccaatgatccatctgttaaagatttgctggcatcattgcacagccagaaagaggaagagaagaaggaagacaagtcagacaaaacagaagacgagaagaactgcttcaagctggagtgatgtcgctgtggtgcttttgtgactgatcatctctggagcttttgtgaatgatgtagctagctatctgtaattgatctagttgtgaatgatattataattgtgatacttttgtgaatatataattgtggtgcttttgtgtttatgtgatggatctatgactgtggtatactgattaattgtgtatgtctttatgattcgtgtat

SEQ ID NO: 26892 - DNA, 1380 bp, Zea Mays
gtgaacttatcgtgggttctaaatgccaaatatacttttaatcttgctgcttctaatagaccgaaggagtggaggtcaaatagcgaaaggacgcacgaaccccaggaggcaccgtctccaaagtccaaaccctaaccctagcgcccccaactcgtcgccgggagatggccatggacgcggagcggcggcaagcggagctgatcgcgcagttctcctctcaggcggtggctctttcgtccgcgcagcagctcgccgctctggtgctcgaggccacctcccacccggccctcttcgccttctccgagctcctcgccctcccggccctctccatgctcgctggcactcagtactcgtcttcactggacttgctccggctcttcgcctatggcaccttgaaggactataagaataattcgggatcccttccagcattgttgcctgatcaggtccgaaagctaaagcaactcagtgtgctaactctggcagagtcaactaagatactaccatatgatcagctcatgcaagagttggatgtttccaacggtatcgtcagaggcaaactggatcagctgagaagatgctttgaagtacaatttgcagctggaagagatcttacacctgatcagctaaacaacatgatagagatcttatctgactggttgggaacatcagatagcctgttgcatcaaattcaggagaaaatcaaatgggctgacacaatgagtgatgtgaacaagaagcaccagaaagaatttgaagacagagtggaagaggccaaaaaatcaattaagaagttgaacaatttaagcaggcagacatcgacatacgagggcatgacgactacctctctgaatctgtaggaataatggattttgaagaggaccgtgtccgaccaaagaggaggcgacaaccactggcgtagtttcaattaagcccttacaaatctctcctacaatgggaactgctgataccttgattgagacattttgacgccagagcgaggaagcattgtacatttgtcatataatgcctccagtagtccagtgtagcgagtcagatattttgccttctggtcaaactgctcgcgtgtgtgtgttttggtagggaatgtacaggttcaaaccttgacgttatgttgtattttttggtagatgacccatggtagaaatagcgctgttatggttatggcactgggtttttctccaagtttcatttcgttctgtcatgttttgatgttttgtgtggtggggtgctcgcagggtcgtggccatgggcgctgcaggtgccctatttgccattgatgtgacgtgaatcttcgccgtttttaattttaagatgatatagatccgttccaatttttggctgtgattttataccaac

SEQ ID NO: 26893 - DNA, 950 bp, Zea Mays
ccgccgccccctggctcgtctccctggtagccgccgccgcccttggctcctctcccacctggccgccaccttccttctacctcgtccccctgcttccctgaccgagcagcgcccaggcaaccgcatagcaccgcgtgaccctgaccgccaggagcccgaccggccgaagccccaccgccaggacgccagccgcgccacccgacccgaagccgcccgcgtccctgcacacgacgcgccaccgaggaccgacgccaggactcgaccgcgacccaggctaccgtcgccacgtcgcgccaggccgagccctgcatccgcgccgagcgaccgcgccaggaacccgacacccgcgcgtccattcgtcatgcgtgtaatgaagcttcaagacgaccgtttctctcccccattacttcctccctccattgatgcatcatgaagaacccgccaacgccattgatgaccatggagcacccggcgccctctcatctcctctctccctccctataaaatctgggactcccttcctctcttcctccccaagctcctctctcccttctccctacccgagctccctctctctctcacacactcctagttcgtccgcgccgtcgccattcgttccaaagcccgtggagactcgctggagttcgtgctcactgtccgcgtcccccggccgaaccccatgtctcgctccctactcgaccgagcactacccctcgtcgacgttcatccctgcgcatgagcaagaacccaaggttgaagacaaccccaaaacgttgatttattttgtaaagcatgttttgaattaatttataaatcttgtgaattatcgttgtaatgatttggcgattcacgtgtataattttagagatttcgatgtatacgtatagccaaaatcgaaccccatggcaatactttgaatatgtgtatgattttataattttaaaaatgag

SEQ ID NO: 26894 - DNA, 3992 bp, Zea Mays
gacgttgttggagagtaaggagatatagagaacaaaatcttttagacaagactgtaaagaacggatataaagtacgttgctggagacagccttacccattaaagacatgtttaggttcttccggatggaaagctactgagcacattaaatctctttctatttaattttaactataaaagattaatcctcttaaattcactttcgatccacttttaaccaaacagacccttatccattgcagacacatgggtattattaatttttttttctgcaaggtttcagttgttttaaattttttttcccctgcaaagccaacatacatggccactaaccactttatttttttacaagaaaatagcacacacaaagttggttaactggtaataacataaattaaacttacacattctgaatttagcacaccaacactactttacagcgctgtgttcagcgcgcagctagcctcgtagtagtagtagttatactagcgcatcgacgttcagcagcctcgcaattacagtagtttattcaggcatgcatcggtgggcatttggtgcttgcattggcaaactggaaaaagaggtaggtagctagctctggacggaggtctcgtctcacggcctgaagaaggctgggtggggacggccggtgccctggaaggaggtgttcttgaggccgtgagacgtggccttcgtccagagctagctacctacctctttcagttcgatcgtcgtcagtgcaaagcaccaccaatgcctgaataaatttaactacgaggctagctgctgaacatcgatctgctactgctagtattactacggcgaggctgctgaacagcgctgtagagtagtattggtgctcagttcagaatgtataatgttacttctaccgattaaactgttaaaaaaccctagtacgcttatgtggtcaaataccacttatatctgtgagcagtgtcgcatctctatataaaggaatatgtatcttctcagaaagaggttagagacccaactctacatactgtttttttaatgtgttttctgagtgtgtggattgctagaaaagaaaacgtgcttctaccgacttttcgcgtctatactgctgacaggaggggaaatgagcaaatctgatgatccatgttaacattgatgatttgtgatagcgtggttctcagcgtaaccaaccttgtctgttattctcacgtagagagggagagagaaaaaacaataaagtagcactaccccaggagccagtgcgttttaaaaagggccgcacgcaccgttaccaaccatttgacacaagtgcaaaagcccatcacgcgtttttaaacgggccaaattctagttacgataggtttttttttctgtagcataaatcacctgtattgaaccgaaaacatcatacgccgccgcctgcctctcccgccggccgtgggctgccgcatcccggcctggtgccctccggcggccgcatccaaacccccccaccccctcgcgtagataagcctagtaatcagtctcggcggcgcgggacgctgtggcgggggagaccagtgcgagactgcgctgtcttgtccattggggggatttggggctgtgcgcgaggcagttaataatgcccgtcctctccccaagtcagagtccgctgccatggccgtcgccgtcgccgtcgacgtcccctcctgcatccagctcctccgctcctgcagcgcggtcgccggccggcagctccaccagctcctcctcaaatccggccacgtcccctcctcgctcccgcccactaactccgtcctcctcatgtacgcgcgcggctctccgctccactcccgcgacgcccgccgcctgttcgacgaaatgcccacgaagaactgcttctcctataactccatcatcaccgccctcttcaagtccggagaccaccgtgcggctctccgcgtgtttcgctccatgcctgacaggaacaccttctcctacaacgcggtgataactggcctcactggtgctggggatctcgacaccgcgagtgagttgctagatgagatgcccgtgaaggacgccgtggcttgcaacgctgtgttgcatagtggttggcgcctgtgctgatcggacgcagtatgagattgggaggcaagctcacacccggttggtggttgccaacaccgggattgattcgatattgggctgcgcgttgattgacatgtattgcaagtgtggggatttggactccgctcaccaagttcttgacaggttagaacatgtcgatgagatttcgctgtccgcattggtctatggctacgcatcttgcggacagttgcacaaggcgttatgtcttttcgacaagatggagagccccagcattgctctatggacgtctcttatcagtggttgtaaccctgcctatcatggagatggtgcttttgttctttttgtaaggatgttgcggtcagaaatgttgcctaattctactatttatgccattgttctgaacatgtgtggctttttaggcatgctgaagcctggtcagcagacgcaagcttgtgctttaaagagtggggctgtcaatgacttgatagcagcaagtgctctcattgacttctactcgaaatgcggcctctgggcagatgcctgccaagctttcagtgagcttaggcatcatgacaccattgtgctcaactcaatgatcactgtatactcaaactgtggccaaatagatgaggctagaagagtttttcgtttgatccctagcaagagtgtcatctcatggaattctatgattgttgggttcagtcaaaacgggcatgctcttgatgcattggagctgttctgtgagatgcaccggcttggtttgcagcttgacaatgtagctatatccagtgtccttagtgcatcaggcagcatctgctctgtaagttccggggagcagatttttggtcttgctattgcgcttggtctgcagtctgaccatattgtagcctcctcgctcattgacctatactgcaaatgtggtaacttggccaatggacgcaggatcttcagtggtattgctaatccagacgaagtcctgtggaactcaatgcttataggttatgcttctaacgggtatggactcgaggcactgaaacttctagatttaatgcaaagtaggggtctgaagccaagcgaacggacatttgttggtgtcctttctgcatgctgtcattctgggcttgtggaagagggattgagatggttttaccggatgaaggaagattttggcgtgagtccatcagctgagcattatgcatgtgtgactgacctgttggtccgagcaggtcgactggatgaagcagttgagttcatagagaacatgcctttcaaagctgatgcaattagttggacttctattattggaggatgcaaagcccagggcaatgaggttctgttggacaaggttgcaaacaaattgatggaaacaggattgtcaacacattcaagtttgtatgtgcagctgtcaagcacactcgcagctcatggggattgggacaaatcagctgagattaggagtatgatgcatgacagaagaatctcaaagaatgctgggcgcagttgggttgacagggcatagaggaaatgaccagtgtcacctcccacaggcgtctcggtccattttctcttgggccttccctattggctttggtttcttcgatgtgttcttccgctagttaggaagtggtaacaaacaacgatcctgctaaaatatgtgcttttgatcatttgcttagttgaaccatatgaggtgatttcttggatgtggattcctgaagcatgcacaggttaatgctaatgattcagtccatgatatcttcgacatcaaaattgaccataatgaaaatgtgtcaaccaccaaaaagaaaatctttagctctaaagaagagaaaggaagggctctgaagttgaataatgaacacggtctagcccagcaatccctacagcggccaaatcattgcgtctctg

SEQ ID NO: 26895 - DNA, 2302 bp, Zea Mays
cccgtccatatcacgctttgatcgcttcttttttctctccatcatttctccccgtttcgtctcgcttcttttctgtcgcctcccgtttcgtctatctccggccggcctttctgctgcaaggaaaccaatattgtttgctggatctttcaaaaagggaaaccgaattcccgagagcgagcagcagggaatctctgctgaatccgtaggctccgaattggagctggaagtgtagtgatttcctgattggggacataaggtggggtttgtccctactccccagtgagctccacgcggtccctgctgttcttccagtcaaaattctgtacccttcggtgctggggtcaaggaactaggcgtgttgtcctgaactcttgattcctgcttcatggaaattgtatatgtttttctctgaattcaaaatcgtccctattctcccaaagctttctgaggaagaaggatattgtccctctccaaaactataaacatgggttggttgagtaaaatatttaaaggtccagtaaatagagtttcaagaggacactacaacgggaactcccatgaaggctattcagctcagcacactaaatcatatggtgtgcatggcaatgaggacgaagacatggatcatgctattgcattatccttatcagaggaagatcaaaggaagggaaagaccattgataccgggcatcatttagatgaagatgaacagattgcacaggctctgcaagaaaatattggtcataacctagctgaagacgaacagcttgcacgggctctgcaagaaagtatgaatgatggacctcctcgtcagcacattccagttgaagatgttaactcagaaagtactccagcaagcatcttgccctcaaatattttccgcacaagtggcttgagggtttgtgctggatgcagaagtccaattggccgcggtcggtttctcagttgtatggactctgtttggcatcccgagtgcttcaggtgttatgcttgtgatagaccaatatcagagtatgagtttgctgttcatgaaaaccatgcctaccacaggccctgctacaaggagcgtttccatcctaaatgtgatgtttgcagtagctttattcccacagataaaaatggcctcattgaataccgggcccatcctttttggatgcagaagtattgtccttcccatgaaaatgatggtacacctaggtgctgcagttgtgaacgaatggagccaaaggacagtcaatacataacattagatgatggccggagactctgcttggagtgtctgcatactgctattatggagaccaatgaatgccagccactgtacattgatattcaagaattttatgagggtatgaacatgaaagtagagcaacaagttcccttgcttttggttgagcgacaagctttaaatgaagccatggaagcagagaaatctgtgcaccaccttcctgaaacaagaggcctctgcctatctgaggagcagattgtcagaactatattgaaaggaccaattggaccaggcaacagaatcatagatatggtcacaggaccatacaaactcattagacggtgtgaagtgactgcaattcttatactgtacgggctgccaaggctgctaactggctcgattctggctcatgagatgatgcatgcttacctccgacttaaaggataccgaaccctgagtccagaggttgaagaaggcatctgtcaggttctagctcatctttggcttgagtcagaaatcacatcaggttctggtagcatgtcaaccacctcagatgcgtcatcgtcatcttcaacatcttcatcatcgaaaaagggcgcaaagacggaatttgaaaaaagactcggggagttcttcaagtaccaaattgaaacagattcttctgtcgcttatggagatgggtttcgagcaggcatgcgagccattgagcggtacggcttgagaagcacccttgatcatatcaagatgacggggtcttttccatgctgaagctggtttttttttacctcggcttggatatgggtatacatattttttttggagaacttttggttcaggttatacatacgaaaagccgaacttctgtgtcgagaagaggcataaggatttagctatactgtccattgcaggaaaaaaaactgtttcccttttcaattataaaatttcacagtgcagacatgaaggtatgtggtctttagcttggccaaccttgtggaatgctgtcacttgatgcaaaagaaatttcgaatacatatgctttgctgtgcttgaaatgcaatggttggatgctatgct

SEQ ID NO: 26896 - DNA, 1124 bp, Zea Mays
ccggcccgcatacgtcaacaagaactcatcaccgatcggacgggcacgggaagaccgcgtcaaaatccaccaccaactcgtcccggcccctgggacggcagaaacggacgcatcgtcgtgctcaccgcagggaatccgcgcgagcttcccccttccctacatccggaggcgcaaaaggcagggcctagtgcttccccatccccagttttttttttcgtcttctttaatttacagcaggaagccaggaactcaacccaagagggaaaaaaaatcaatccccggagaccggagcccggagcaggtgaagaaatcctagaatctccagcacgtctgccccggtctccattgaccataaccatatgaagaagaaaaaaattgcttttccaggcatggcctgggatttgccgagatctccccttcccggcgtgcccaggcacagccacgccagataggcgggccccaccgctagtagtatagcgtcgccccctccttcgtacgtgtacgatcctacctacggcgtatcgacgaacctcgctctgccacgcaaaacaaacaaagcaaaattggatgccaaatgcagcgaatcgtctgtttgctcgaactgacaccgccgcgcccgcgaagaacagtcaataaaaccgggggaaaaatgttgtcacctgacctaataaaaggtactacaagttctgcattgtcaaggcgtagtaggcataaagggtcccccacagagatgtggtcagacggcgtgcgtagaacgtatcgggtaggagacgacaatacgggtcgagccgtacggaaagtgttgggcacgccgcacgcactactaccccatctgtgtcgtggacgataacctggttgctgcgcggggttagagaataatcagcttggtaggttggttttaatctgtactggcttctactatactgattctacgatatttttgtctctatatatttcagttgtgtcagtttaaaaagttcgctttaatcccaaattaacagtcacaaataagcattttcatgttgaccgccgatacacatgtggtcctagcattaccacaaaggacatggtgccctcagcgtgtcccggccgccgcctctgcagccagcttgataggctttttc

SEQ ID NO: 26897 - DNA, 863 bp, Zea Mays
gatttcaccactatttgacatcgacaaaaactcgtgctccaatcggatgtccaccactttgccaaactaaagatgagcagaacagctagggccatgacaacctcttgacgaatagctttggacaccacaacccaaaggccaactacgaggtcacggaggcactctgctatagtgatggaatcataacaagataatgccctacagaatattcttgcaagaatacacctatgtgaacctaactgttggtcgtaatttgtgtgaattgggaattccttaagaagttcatgaatagagacaggagtatgacctatacactacactcgcgaggtaggcaattggtagcctagtatcagttcatatgacaagtgaaacttgttcacactaaactatcaattcaaggcttagtctattatgtaattgtggatgagcctagctagtcgttctaggtagatgttcaacctgtcggtctctattgaaaagctgacattaacagtactttggtacatggaggatgaaatgtgcctctcaaatctggtggagagtattaaagaaattggatttataataatttctataaatcacaaagacccacttatacacgcatagtatggtgggaacgttagtaccaccttgctactccaggtggagtgaagccaacttaaatacatgagttgtctccacatcgttgaagctattgaggagaggaaaatgaagaacatgcgctcgctcactcgtctcgcctcgccgggtcggaccggacggggcaatgggcgcgggcgcacgacatgcgcatgaatgggctgatgatttctcgcctccgcccttgtgagtgcgcgaccttcttttgccactctatatttttg

SEQ ID NO: 26898 - DNA, 2291 bp, Zea Mays
actaggaaaaacctagacacgaagtccaacccaaatctcaatatcccaaccctccgatccccatttccatccactccgacaccaatcctccgctccgaccaccgccggagaaatggggcggcgccgccggttcgcgcagctggacgatgacgacgacgacgacgaagacgtgcccatcaatttcaagccctcgggtggcgcctcctcctcggacgccaaacccaggaagccccagccgccgccgcagcagcgccgcgagcaggaggccgagacgaagactcgccgccgccggggacggcccaagcgccgccgcgacccggggagcgaggatgaggagcccgaggagctagagctgcaaacggaggatccccgtgaggaggagatcacggaggcggtgcccgtagctgtaggggacccggtcaagatcactggcaaggggaagaagcagaagaagcactatgcttccttcgagtacgagggcaacagcttcgagctggaggaccccgtgcttctcacgcctgaggacagcaatcagaagccctatgtcgccatcctcaaggatataacagaaactgatgggagcctatatgtaactggccaatggttttatagaccagaagaggctgacaaaaaggagggtggattctgggtagcacgagatacacgagagctattttacagttttcatactgatgatgtgcctgcagaatcagttatgcacaaatgtgtggtccatttcattcctcagcaaaaacagattcccagtcgaaagcagcatccgggatttattgtccagaaggtctatgatgcagttgagaagaaactgtggaacctaacagacaaggactatgaggataacaagcagcaagagattgatcttctggttaagaaaacaatagaccgtattgggcagcttcctgatctcgaacctgaagagacacctcttgagaacaattatttgtcaaataaacgaggcctgcgtaagaaacctgttaaccctatagatgtaacaagagaacctccagttggcaaatccgagcagtttgcaaaagcagagacacctggaagtgataagatacggaattatgatacccttgttaagtataaagtacttactggacattctcatcgtgataggtggctcgataaattgatagaaagtattccgcttgcatcaaaggagaatgctggaacatctgctgatgctaattctacagccaaaagttcaatcagtggttcacctgcaaaggatgttggttctgctgaaaatgaaaaatcatatggacttgatgttgttgttgagataatgactgcattagaaagatctgcatatgaagctcttggaacagattttgggaaatataaccagaaactgcgacaactacagttcaacatcaagaatatctctaaacttcgcaggaggctgatggacaaggagcttgatcctccagttcttttaaccatgtcccccgatgaattaaaggtgtatttcccatttcatattttgtgtttttgttactgtacgatccagataccttatcctatttaccttgttgacaaaattgatttcattcttgtggtaatttccttcaatattgtttgtactgccaaagttgatatgacaatttagcatactatgacaacttgggcagctgcttttgcagcatgaaactgcatcatatgccaacacaatataatcttactgtatataacagacaagtttttgtttttactgcatatttttggaaatttgtttttcatcagtgatgcacgatatattcccttattccttcagttctcattgagtagggagtgtttgtccttcaaaggccgaatacctatactccttcggtttttattcgagtataaaggtgcatagttccttttccaaagagattgacgatatgtggctgcgcatactgtcagttgtgtgaattacttggtggctcatctgtggtagtgtttggtgtggggtgcgtgggggttgcggtaaatatttaaactcttcctcttagttcaattatacacagttctgtgtattcgagaggaaaatagaattatgactattagcactgctgtacatttttttatctagttacgttaaacttgcaagtgcatggtatttgacagtaatgcattgagtttactaaagtactggtagtgtaggtttgctagagggcctcttctattatgagaaaatggtttttatattttcttaaatttcttaacattttccagactgtatgttacactatatcatgaattcgctgccacaattttttttctcgaac

SEQ ID NO: 26899 - DNA, 2899 bp, Zea Mays
cggaccacccgagccagaagcgcgtcgccagctgataactaacccaacccaacccaaataagctcgatcctgctctctgccgacgcggccggattcgaatccgaggacgatcgatgacggtgggcgccggcatcgccgtccaggacggcagcctcctggcgctgggcgccaaggtcctgcgggaggtgcgcggcaacgtgctcgtgacgccggccgccggcgggggcctaaccaacggcgcgttcctcggcgtccggtccgcgcccgccgccagccgcagcatcttccccgtcgggaagctccgggaccagcggttcgtgtgcacgttccggttcaagatgtggtggatgacgcagaggatgggctccgcaggccgcgacatcccctccgagacgcagttcctgctcgtggaagtgtccggcggcggcgagcagcccgccgtcgtgtacaccgtcttcctccccgtgctggagggctcattccgtgccgttcttcaggggaacgccgacgacgagctggagatctgcctggagagcggcgacccggacgtggaatctttccaaggctcccatctggtcttcgttggcgccggatcggacccgttcgaggtcatcacaagttcagtcaaggctgtcgagaggcacttgcagacgttctctcacagggagaagaaaaagatgccagacattctgaactggtttggctggtgcacgtgggacgcgttctacaccaatgtcaccgcccagggagtgaagcaaggattgcagagcttggagaaaggcggggtttctcctaggttcgtcataatcgacgacggatggcagtccgtcgccatggaccctgtgggaatcgcttgcctatctgacaactcagccaacttcgcaaacaggctgactcacatcagggagaaccacaagtttcagaaaaatggcagggagggtcacagggaagatgacccagcgaagggcctagcacacgtcgtcaatgagattaaggggaagcatcagctcaagtatgtgtacgtatggcatgccatcaccggatactggggcggagtgaggccgggtgcagctggaatggagcactacggatcaaagatgcagcggcccgtgccatcgccgggggttcagaagaacgagcgctgcgaagccctggacagcatgacggccaacgggctgggcctcgtgaaccttgacagggcgttcagtttctacgacgagctccactcgtacctcgcgtctgccgggatcgacggggtgaaggtggacgtgcagaacgtcctcgagacgctgggcgccggccatggcgggagggtgatgctggcgaggaagtaccagcaggctctggaagcgtccgtcgccaggaacttccccgacaatggcatcatatcgtgcatgagccacagcacggacaacttgtacagctcgaaacggagcgcggtgattagagcctctgacgatttctggccgagagaccctgcttcccataccatacacgtcgcgtccgtcgcttataacaccgtctttcttggggagttcatgcagccagactgggacatgttccatagtgttcatcccatggctgagtaccatgctgcggctcgagcggttggtggctgtgccatatatgtcagcgacaagcctgggagccatgacttcaatctgctcaagaagctcgtgcttcccgacggatcgatcctgcgcgcaaagctccccgggaggccaaccagagactgcctcttctctgaccccgcaagggacggcaaaagcgttctcaagatatggaacctgaacgaacactccggcgtcgttggcgccttcaactgccaaggcgccggctggtgccgggtagccaagaagaacctcatccatgaccagcagcccggaacggtgagcggcgtcatccgggcgcaggacgtggagcaccttgcaagggtggctgatcacggctggaacggcgacgtggtcgtgtactcgcacgtgggaggggaggtggtgtacctgccgaagaacgccttgctgcctgtgacgttgagatcgcgcgagtacgaggtgttcaccgtcgtccctctcaagcacctgccaaacggtgcctctttgcggcgatcggccttctcggcatgttcaactccggtggcgcgatgagggagctgagattcggtggtgaggatgccgacgtcgagctcaaagtgcggggctcgggcacggtcggagcttattcctcgacgaagccaacgtgtgtcgccgtcgattctaaggcggttggtttctcctacgatggcacctgtggcctcatcagcttcgagctcggcatccccgaccaagaaatgtacttgtggacgatggatccctacggcctaagggcccccggatctgtcacaccatccgaaccccctccccttcagtgttctcaagatatggaacctgaacgaacactcaggcatcgttggcgccttcaactgtcaaggcactggttggtgccgggtagccaagaagtacctcatccacgaccaccagcccagaacggggaggtggtgtacctgccgaagaacaccttgctgcctgtgacgctgagatcgcgcgagtatgaggtgttcaccgtcgtccctctcaagcacctgccaaatggtgtctcctttgcggagatcggccttctcggcatgttcaactccagtggcgcggtgagggagctgagattcagtggtgaggatgccgacgtcgagctcagagtgcggggctcgggcacggtcggagcttattcctcaaccaagccaaggtgtgtcgccgtcaactccaaggcggttggtttctcctacgatggcacatgtggcctcatcagcttcgagctcgacatccccgaccaagaaatgtacttgtggacggttacagtagggtattga

SEQ ID NO: 26900 - DNA, 855 bp, Zea Mays
gtacttagctttctgcccacagtccaaaaccagggcttgcataggcgcgtgctatgtttctgacaagactaataatagcgtaggagactaatagttcatattcagtcaacatagatgagttttgatacaaaagatgctacaagcacttcgggcagttcgcgcctctgggtggagaacaagccgctgcagagctcccgggcgactgggtctccatgggccacagcacgcagtggctctggtactccgtgtatgccagcaagcaagtgagctggcgcacgcgggtgctggtggtttccgactggactcgccgcttcatattcgggagggactcaagccggatctagctgccaaggattctcttctgcacaggggggggggggggggggttcgttccgtccgaagaataatcggtttcgctgctgctggagcttgagcaagcaaagctgtttccccgcgcctggccctgccggcgaaactgctgttctttcttctgctacatggtagatggctctcaaagcctcacgccggttactttcactgaggttttagctctggtttatttgatgtccataggttttcttcctttgcttgtgatctcaacacatccatcactatgattcatttgtgtgtgatacatattgcaacttcagttaaaatccaaccttttcttaggaacagggctctaaaatccagcgtcctcgtcagccttctctcacattggtcttctagtctcttatcacttttgtgcaatttattgtaaatctagtgtttgtcttacaaaatcaatgtcaatttatgtacaacatctgcatctgtagataatccaaagacaaacttaggcaccctaccaactaa

SEQ ID NO: 26901 - DNA, 1659 bp, Zea Mays
gccgcgtccgtggatatgacgccgacctctcttctcttctcccctctcctctctagccgtagtagctagcaagccgaaggctggagctgcctgcctgaattctctcgtttctctgcttcttcctcctctcccgcccagaaccagaaccaggaagcatcgcgagccaccggcgagccctcgtcgccgccaggacgtgcaccgacgaccgggtctctgccggccgctggcctttctacaggtcttcgccgtccgctggggctaagcaagctagcttgcgagggagcatatatggtcctccgcgtttcatgaccttcatgaggtgttccgcggccgtctccgacggcattgcgctgcgcttccccgccgagggcagggccctccgcggaggcgtctgcgcgcgcgggcgcgggctgctcgctctgggttcccacaggagcagcagtaggagggcgaggcgcaggcacgtggcggtcttcgcgaggcggcggctcggcaagtggcagcggccgtggtggaggaccttcttcgcggactggaacgacgacgaggagagcctggccgggttcagggaggacgacgagctgctggaggagattggggccgaccaggagctgtcggagaaggccaagttcgaggagtggaggcggaaggccgaggccattgttgagctgcgcgaggcccagcaggacgcgttcaacgccgaggagcggtcgtgggaggactggaccggcggtggcggcggtggtggcgcgccggagaatggtggaggtggggactggggcggggaggccagcttgtcggagcagataaccgatgatcctgcggagatcgtctgggataagggcgtcgttgaggttttcagaggtactatcgatgaggattacgaggatatgctgttcgaagatcgagtttttatgtatgcctccacgaactcggccaaattcctagcattgctgatcgtggttccgtgggtgatagattttctagtgcacgactatgccatgatgccctttttagagagaaggtgccgcttgcagctgagttacttgatgtgaggcgcagccagaagctgcagatggttaaggacctgaacatcgagaaggcaagataccgtcttgaagtagagatcggcaaatctcccccgctctctgatgaggaggtctggtttgagctgcgggaaaaagcgcttgagttgagggacgattggaggctagaaaaccgacaagcttttgcaaatgtatggtccgatatggtttatggggttgttctattcctgcttatctgcttcaaccagagcaaagttgcgatgctcaagttcacaggatataagttgctaaataacatctcagacactggaaaggccttccttattattctagtatcagacatccttctagggtaccattcagagtcaggttggcatacaatggtagaagttattctcgagcattacgggcttgaatccgatgaagcggcggtcacattttttgtttgtctggttccagttgctttggatgtgtacataaagttttgggtatacaaataccttccaagattatcacccagtgtgggcaacgttctggatgaaataaagcgccactaaggaatcatttggataaattattgccttggaggctgggaaactggttacaatttgca

SEQ ID NO: 26902 - DNA, 2007 bp, Zea Mays
tcccacccacgtgtctttctccgccgccgaactcgaacgcggcacgcctcttgcctcaccacaggccagacgaagaagcggaccacacgccaccagctccacctccacggaatcagacggtctcctcctccttttctttctcccgtggactgcagcgccgccgggtagagatcccaaatctgcgcctcgaccaattcctccttcctccgatgggtgctgctgaacaacagctcgagaatgtactgccatgtctttccagatagaacgaaaccgaaaaggcaatacaggcatcagtgggtgccttgcttctccaagggatcttcgttccaagatccactgccctctgtaaagccttcacgccttcttccagcagaggaactaaagacatatcccaacactgttcctgaggagatatttaacacgatcatactagatgactccgatgcattctatgtgctagaactgagcacgagtagagaatttagttcctctttggataaaaattctgcaatcttaatctgcctatttgatgtcgatggtgactccctattacaaagagtaccggcaatctatttgggtcaacctacacatggatttaagacagagcagcagatacccttccaaagtggttcagttgatatcgttactttcaaggggtcaaaactgaaaacgattaaagaagtctggatcggtcttgaatcaggttcatggagattagatggtttgagcttgaaagtaatacatggaccagttggtcagcctaaagaaataaatggaactccagaacagaagttcagcggtttgcagtacacttttgagaacgtaaatgtgttccttggagatgatggagcttcagtagctgaagcaaggccgacggctatcactgacctctcaggagtcggcctttctgatcttcaacaagggatgttatcctcaagaagcaaagcttcaagcattcaggaagtaagagaggatgggttgagagagtacgccgaccttaaacaatctctgctgctctatgacgcatctatagtgataaccggcttctctaccttcatcttggcttcaaatgacagcgctgcctattcgttcctgataggtggcattggagggttcctgtacctgttgctgctccaaagatcggttgatggtttgcctgtgatcggttcaccttcagaagctggcggtgcacagccttcggtaaaaagtttcagcggtgtaaggaggccatggttgatactatcactagtactggttgcaggtgcagttgcactgaagtatggtgctggaggcgacagctttgcgctcacacccaccgacctctttgttggcactgcagggttcctagcaaacaaggttgctgttcttcttgcagcgttcatgcctatgctaagtgactcaaagagtgaagatggatctggtgacagcagttaattggacttctttaaaaatatgttagtaatagtttcctatagaagatctgtattcaagactggaacggaattagctgaagtgcaaaggacaagtcctagtttctgaactggaaaaaagaaccctctcatcttggtgactgtgtcatccttgcaagggttcaattcacagcaagagttcaagtgttgtggcagtttgaagtcagaaacttaagttgtatttttcagacatgcaggacagctgtgtatcattatatcaagaagaagaagaacaaaagtctaggatactttgaagcacccttagaaaggcatgaccagtacagcagaagaaaaacagagacacaaaaactaaggacatggccataaactacggagcgttttggcttttgccatacagcacaacttgatttcatcttagaaacttgagttgtagtatagtatactcacctatcggacactgaactgttaagatgatataccgactacagctttgttgtatgtaaaaatatgacatttgtgaggttaaatacacagtaactatcgaaacaaaatgcttggcgttgctccaaatcactat

SEQ ID NO: 26903 - DNA, 1441 bp, Zea Mays
cacacttttttcgcgacaaaatctttacaacttatcttgtttcgacggcatgtggtctcatccttgaaaacatactctgtggcttgtgctaaaagttcgccagcgtttgatgtacatggtggaatgaattgtttggatgggtccccatcgaagaaaataatgttaagagccatggtttcagaaatgtgattatctataaggttccagagactccactgcacagacctactgagctctctcctcttctcaaccattcaccagtaaacgaatccaccgaccaccactcccaggagcagggtattccgactttgattacatggagccaaggaggagatgaggtgttcctggaaggatcgtgggataactggacatcgaggagggcacttgagagatctggaaaagatcacgccgtcttgttggttctgccatccggagtctaccattaccggatcatcgtggacggggagctgaggtacatccctgaactacctcacgcagctgacgaaagagggcgagtggccaacgtcctcgatgtccatgactacgtgccagaaagcctcgacagcgtagccgagttcgaagcgcccccgtctcccgtgcacagctacgacctgcattgcccgggcgacgaggagttcgccaaggagccgcccacgctcccgccccagcttctcgtgtccgtcctcgggggggacgtcgatagcgctggccatggcaatcaagctttgaagccacagcacgtcgtcctcgaccacctgttcatcgagaaagggtgggggtcgcagtcgctgctcgccctcggcgtcacccaccggtttgagtccaagtacgtgagctttgtgctctacaagccgttggagaggtgatggtggtactgtctactagctgtgtgtgagtggaagaacagagtggactgctggaggtgaataatgtgtgtgtgtgcccttgtatagaagggaaatgcatgcaggagcttgtagctgtagctgatcttttattttatttttttattttcctttcactttcgacgaaagtaataaattagttgaccatgcatgcatgcttcgtgcaaatctgaatgtttgtgtggtctgaatgcgtgcagatatccggactttgttctgatgtggagacaccatgggaaaaaagaaaaaaaaaggaaaataacgacaccagcaaatcagtggataaagcggatttgtcgatttgatggaggcggtagttaactaggacaggtaaagaaaatgatggatgcccgctgatgtcgatgttcaccaaagggacgatagataacgtcgtgcgatcacgagctgcctggatttgtcaaaaagcttgacagcgactaggggaggaaatggtctttttctctcgattttttggagtccgaattcgtttttatgaatgatttccatggggtgtctgtatgtagattcgattccga

SEQ ID NO: 26904 - DNA, 2802 bp, Zea Mays
tttatggggtctgccttgccatcgtgcagtagaacgtggtggctgtataagaagcctgagggacattgctgcattgtacaactgcgaggcctcacttgagaaggtggagaagtttagaagtgctgaaggattgaaatcgattggctcaaaatgcttccaagctgccaacatatctgttatacttatagatgatggcatagcattcgacaaaatgctagacctggagtctcacaaggcatttgctcctgtagttggcagagttctgagaatagaaaggctagcagaaacaatcatcaatgctgagtcattcagtggatcaagctggacactggactcattcactgaaagctacatatctaagctgaattcagtttctaaccaaattgttgcattaaaaagcatagctgcatatagaagcggtttagagatcaatcccaatgttagcaagactgatgcagaggatggtcttcgtaaggagctaacaggtcctaggccatttcggattacaaacaagaacctgattgactacctatttacctgcagtcttggaattgctgtttcacttagcctgccagtgcaaattcacacaggttttggagataaggacctagacttgcgaaagtgcaacccactacatttgcgcgctgttcttgaggacgaaagatttgctaagtgccaaattgttcttttacatgcttcttatccattttctaaggaagcatcctatcttgcatctgtttactcccaggtttaccttgattttggcttggcgattccaaaacttagtgttcatggaatgacatcgtccctgaaagagcttctggagctagctcccataaagaaggtcatgttcagtacagatgggtatgcttttccagagacatattacctaggtgcaaaaagggcacgggatgttgtttaccgtgtcctatctgctgcatgtgaagatggtgaccttagcattcaggaagctatcgaagctattgaggacatctttagaagaaatgcattgaatttgtacaagttaaatgttgtcaatggatcaataaatcatgaaactgccatagttggtaaaagggtgtcattgtcttctgttgaggaagatgtgctctttgttcgaataatctggtgcgatgcttctggtcaacatagatgccgcgtcgtgccagctggacgattttatgagattacgaggaataagggtgttggtctgacttttgcagcaatgggaatgacctcattttgtgatggcccagcggatgggtcgaaccttactggtgtaggcgagatcagacttgtaccagatatgccaacactcgttaggctaccatggtcaaggcacgaggaaatggtgatggctgacatgcaaataaggcctggagaaggctgggaatactgtcctagaaataccttgaggaaagtcacaaaagttctgttagatgagttcaatgtgacaatgaaggcaggttttgaaaatgaatttttccttcgcagaaaattagtaagtaatggagttgagatgtggattccatatgataataccaattactgctcaacttcagcatttgatggtgcatcatccatattacaagaagtatattcttccctcaaagattcaggcattgttgttgaacagttgcatgctgaagctggaaaagggcagtttgagatagccttgaagtatatcttgtgcactgttgcggctgacaaactcatatatgctcgtgagactattaagtcgattgctcgaaagcatggactggtagcaacatttcttccaaagcctgatttggatgattttggatctggttctcacgtgcatctgagcttgtgggagaacgatcagaatgtttttatggggtcaagtaaagataactttcatggaatgtcaaaaactggagaacagttccttgctggagtgtatcatcaccttccgtcaatattggcatttaccgctcctcacccaaacagctacgaccggattcagccagatacttggagtggagcttatctatgctgggggaaagagaacagggaggctccattaagaaccgcatgcccacctggtgtgcctcttgatttagtcagcaacttcgagatcaaatccttcgatggttgcgcaaatccgcacttgggtcttgctgctatcgtagctgctggcatcgatgggctaagaagacaccttaagttacctgagccaattgaatcaaacccttctgatcactcttcaaaactgaaaaggctaccgcagaacctgcaggaatctgtagaatcgctttctgcagataaggttttgcatgagttaattggtgataaacttgtcacaactgctatagctatacggaaggctgagatcaatcactttgcgaagaatccgggtgcacttaaggatctcatcgaccgttactagggcaaaagaacggaatgagaagctacatcttcttggacgtggcaaggggtttcactgtatgaccaaccgagagactggaagaataaattttgttccaatggttaacttcggattctcatatcctgtgactgaacttttgtgactgaacttttgatacccagtgtttctcttatcaaataataaaggttatttaaatttttaaaatgagaaatgctaggtgtcttcaccatggtattaaggtatcaaagaaaatgggagaaataggagatagacgaatctctaggaccgttgaatgaagacgttaatataacagtatatacaaaggtacggagatacaggttgcttaagcatgatactaagtcttctacgtggtgattggtggttgattaaat

SEQ ID NO: 26905 - DNA, 1279 bp, Zea Mays
cgcctcaactccacctccgcctccaaatccgatcgatctccgaggcctccagatccccggcggccggaagacggcgagctcaaggcggtggacacccctcgcagcgctcgtctcctctcgctctcccaatccccttaccagggacatgagggaagatactccatctatgtgcacgcatcacgtgaaaagcctgttcatactagttctttgtttgctggtcgggatattcacagtgatgcgatagtatggggattgatttcaatggttgatgctgagaagagactattagcaaatgcactggaagatgttgataatcaagtttttgtcttgctttctgacagctgtgttccgctgcattcatttgattatgtgtataactacctgatgggaacgaatgttagcttcattgattgtttcaaggatccaggtccacatggcagtggaaggtaccctattgagatgtatcctgaaatagacgagagtgattttagaaagggtgcccagtggtttgcagttacgaggagacatgctttaatgattctggctgacagcctgtactacaagaagttcaagctatactgcaagccagcagaagggcgcaactgtattgcagatgagcattatttgccaacgctgttcaatatggtagatcctggtggcatctccaattggtctgttacacatgtggattggtccgagggaaaatggcatccaaggtcatatagtgctgacgatgtcacttatgatctcttgaagaatattacaacaactgatgagaacttccatgtgacaagtgatgacaagaaacttgtgatgcagaagccgtgtttgtggaatggatcgaagagaccgtgctatcttttcgccaggaagtttaatcctgaagcactcgataacctactgaagctgtttacaagttatacatctgtttgagcctatgagtcctacctgattctttgccttgggctttctaatcccacatttttttctgtttatatgtaaattgggaagcccgtatttattgggatctgggcctaaagatatcggtacaactgcaacagctgtgatggcttggagtacagtcctgggtaaatggccacaacaatgtttatagaatgacactgccctgagtgtaatttgtcgtgttcaatgtatgtctccatagtcttccagccaactcctaactcattagttctctattcttggagaacagttttttttttgtcagaatgttatatgatccattctttgtagacacagagattacaacagatgtacc

SEQ ID NO: 26906 - DNA, 874 bp, Zea Mays
aatgcagcccaggagtggagaaggagggcgtggcactggtacccgattccggttccgggtaggggaggaaggtaagcgaagaagcatccggactctctcgctcgagggtagggcagggcagggcagggcaggcggcgatccgaatccaatcgccggagggaggaagccaccggtggccgcagtgagggcggcggaggtagaggcaaagggatgacgcgcgggaagcagaagatcgacgcgcagcggcgtaacgcggagcgaaaccagaaatccaaggggtctcagctcgaggcccgcgccgtcggcctcaagatcgtctgctccatctgcaaggtattgtgttgtcgtgctgccaatgtgtctccaaactgtatgtggtcaccatggcattgggatgatgcgaaaaaattatgagcgtatccaatgtttgtgtggcttacaagatggtttgtgcccgtgcgttcgctccctaaacggcttcgcccgtgccgcttgaatggtgccgtgcttccgaatgaatgaaatgaaatgacgccccgtttggatcactagaattgaattctattctaataatagtaatttaggcatatatcaaattaagctaattcacttttatacaaacgccccgtgaaggaaattggccggtcgatcccaaacaaggaaggctcctgctcctctgactcggatgttatgccattagccggatgtaattttcttcttaatcctcgaaaatcctagaggtaatttaaattttcaaactagcctccttatataaatgtctcttagttttgtactccttgcgctctaaattaactgcacgtctcgcataacatactagcccttatataatattaatgtttaccaaataaacatt

SEQ ID NO: 26907 - DNA, 1347 bp, Zea Mays
ctttgtggtcctcacatagtcacatccaaagttaagccatgaatgcttgacatttatttccgtgaagggcatatattatcaggctgaagttcaaggacaaaagatcacctggctaactccgcatgctcttcagcaagtattaactgatgatgttgatttcaatgtgatgctttcttttctagaattctatgagactcttctaggatttgtgaacttcaaaatctatcattcaataaatgtaaattatcctcctattctggatccacgtctggaagctttagctgttgagctctatgcattgtgccgatacatgtctgctggttccagaagaatgattgggaattcacaaactgacgaagtaatggaagataaggatgagaaaagtaaagctgaggaagtaattgaggaagagaaggttgtgaagaataaagcaagctcaaaagcagatgaatctgagttcagattagcacagcttcaacatcagctcccaaccaatgaacctggtgcactgatgaatcttgtagaagaatcaactgccgatgatgcagatgatgatgatactaaagattgtaaaggtttatttaagaacttaaagttctacttgagtcgagaggtagggagtccctgttatttataattccagcatttggagggactgtttcatgggaaggagaaggagctccatttaaagaaatagacgaagatatcactcaccagctgaaaacttgcccaacacattagaatatattgaaggcgaggttgaagctcttgacgaagttattggtagccatgctgacttctgcgccctggtagcttctcggggcacagctaccgcttttctgaaagctggttgcacgcatggaaaaattgttaataggcccaactacagcttatcatcatcagatctgatagatattccaagcctagctcgaagtatcggaaatagatttatgacccagatttgggtaaatggcgggcggaaaatggcgggtgacgaagctcgaagtcatcttaagccggtaaaaagcttatatttgttacttttaccttcttcttgaaatttgcacctttcttattctgttctttaatactcgtaggatgacgaagctgaagtataacaaatctgaagtatgacgaagctgaagcttgatagttgctacaatattctttcctgtaaaaattctggagagacttttgtaatattattatgtaaaaactcatgtaaatttgtacataccttgtaatatattttgtttccgctatctgtgtacaatctgctttgttgtggacgaaacttcttttttgagccgaaggcgaaaaacatattcccttcttttcgtacataac

SEQ ID NO: 26908 - DNA, 617 bp, Zea Mays
caggaaggcatgggcgcggtcatgccgagtgatggtggcagcaacttttgatagacaaccttgttggatatgatactatacctacaaacagcttggtgatttctcctggtcatggttatttatacaactttgagatgaaggagctaaatggtcttagttatggccatgaaacaccagaaggtcctacaaaatttggagcttggaagatggtgctacgattttcaagagctgctagccaacgccaatgcatctcgtttaagatcgtgcatgtgacctttcctctcctctcctgatgttaggccttcacaacttgtattatgtgcgggcagaaaaaatccactcttttatatagcaaccacctgctgttaagacctttttgactctatatcctaaggctgcaaactgtgttctctaagtatatgtgtaaccagcatcttttattggcccaaaaatgtatttgattccatgcctcacttatggttgtttacttttatttatagttatttctgtaccttaagtctagctggaggtgcttttatatacttgtgctaactgaaagttagcattgtaccttaagtctaactggaattgttatttctatacttgcactaactaaa

SEQ ID NO: 26909 - DNA, 895 bp, Zea Mays
ttattttggtctttacatgctgcatacctgattttgggtttcactgagattcagatgtcaaaacttaagaaaagcgaagcattcactagagaaagggagagagaaattgagcaggttgttgaatcagtcaacgaacttgcacagattatgaaggatctttcagttcttgtgattgatcagggaaccatcatcgatcggatagactacaacatacagaacgttgcagcttcagttgaggaaggttacaaacaattgcaaaaggctgagaggacccagaagaaagggggcatggtgatgtgtgccactgtccttgtcattctgatcttcatcatgatagtccttctgattttgaagaccattttctgacatacttagctatctcattttaatggttgatgaatggtggccaagcacacaccacgctcatctattcatgtgagtgaggattgcaccatgcctgcatatcaagaacgccacaaattcatttgaatagcggcgatacgactcactgatctgaagatggaaccatcttgagtcttggccacaatttttgcatcgttgcagatgtagacatgccctattcatacaggactcttaattttagagagagaaaaatctgaagaggattgtttgacacgtttcaccttccagtttgccttggagcaaccgggttaggctggctgtgtatgcctctgtatagagtgagttgtatcatacatcagggtatcggaaatcagaaagtaggttcagttcctgtgtcatctcttttctgctttatgttgtctgcccttctattttgagctagctttgaagtggcatttcattgtaccatatcctaacaattgttctgacaactttcgcccgggtagtcggatatgcaatgagattttgtgct

SEQ ID NO: 26910 - DNA, 6539 bp, Zea Mays
gttagttattatgacactattattattttgaccggagagaaaagaggaaaagcgtagcgagcaggtggtctcgtctgattatgtgatccgacactcccgaaacccagcccaggccgccgccgccgccatggcctccgacgacggcgacaaggacatcctcctcctcgtccaccaggtcccactcgacatggaggatgtgccagcgccccgcctggcgcacctcctcgccccgctccaccgcgcgcctccaccgcccccgcctccccccttccgctcgccgcccccgccccaggccgccgcttccgccgagcaccgcctctcattccgcggctggctcggcatcccccgccactgggacgactgggtcgccaagctccggcccctccacgcccgcctctggcgccgcctcggcatccacgacgccgtccttgcctccaccctccgcttcaagcgcgacgcctccgccatcctccatctcgcctccttctggtcccctgccaccgccaccttcgccttcccctggggggaggccactgtcaccctccaggacgtcgccctcctcgccggcttccccgccctcggcgccccggccacggccccgctcccgccccagtggcgccccgacgaggccgccctcaatggcgtgcgcctcggcttcaaccgcagcgcctgcaagaaggcgcaccactccgcctgggtaaaacacttcctcaccgacgataacgcggacacagtcttcgagcacgccgccttcctcgcgctctggctcacgcgcttcgtcctcccgggtcatccggagtccaccatgcgccaggccgtcttccccatcgccgtccgcctcgcgcgcggggaccgcgttgccctcgcgcccgccgtccttgcctcgatctaccgggacctccgcgagatcaaggccttcctcatcgccacgggcgccgccgccaccaccggcaacgccgatatgatctcctccttatccgtctactcgccactctacattcttcagctctggatgtgggagcgcttccctgccctcaggccagcaaaggtgaacccactcgttgatggcgatccgcttgccgctcggtggcatgatctgagcaggaagctgaacccggcgcagatacgtgaggccctcagcacaggatgcaactttgtgtggcagccttatgtcagctccatggagcacactgggtgggttcacagcagtgatctagccgaggatgatgaactggcatcgctcgcacaatttttgcacccctgtgagctcgtagggatggattgcattgagcagtacctcccgcaccgtgttgccagacagtttggactggaccaagatgtgcctgcagatgttcaccgtgccaaccaggattgggcgattgcttggcagacctaccagctggaaggtaagaatgtggctttcttcatccctcactctgagcctgggatcacaacacggtatgcacagtggtggaggcagcaacttctgccttctggcattgatgctgctacagcaagtgctccagtagagtggaagacttccaagcgcaaggtgaaaaagacaccagcggccatggaagctgaagctgagaaggagcgtaagatgaagaaggcccgggtctctcctacttatactgataaaaagcgcaaacttgaagagttgtatgatgctaagttgtcggattggcttccaactgcaaggaatgagattagtgacaccactagtgatatggaatcggaggaggccttattgcctaatgttggaactacaaatgatgatattgtgctactcatgccaaggaagcagacaacgactgcacctgtaagggcattgatggataatgacatgatcctggctctaggagagagaggaaactttatggttgatgagcctccagacatccaaagtgaacctgaagctgttgtccctgcaacgctggatgaggaaatagttaaaattcctgaggttatttctcttgatattccagataagccagaagaaggagccactgcagtaatggaggagcagaaggaagctactagtgtatctgatagatctgaagaagctagtgctctggtcataggagaggtagaagaaaaggttgccatagagggagctatttgtgttacagggatgaatccatcgggaaacaactcagcaactgtaatggaggcagatgaaagaaatgcagttccaaaagaatttggaagggctgccaaggaagtaattgaagctgtgccccagagccaacatgaagttaatgcaggtgttataaacaattctcatgatgtggtggctttacctgaggaggcccatccagttcagcccacaaataattctggtggatgtcccgtggtatcttgcataatggaagacagtaaagttgctggagattcgggcaaaattgattatgaatatttttgtgattttgttgaggaacagagggagattccttgtgtacaagagatttctggagaaaacagtcgaatgggtgagaaagagagagaagaaacctcccatgaatctcctcaactagagattgtagaatgtgtgcaagacatcgttcttagggaaacagactatgatgttaatcaaaagatagtttatccagcagtggaggatgtagcaacttccgatagtatgagtacatctcttctgggtgttcctgaaccagaaaatgcagaactcaataaacatccttatctagcaattaaagatgaggaagatatacccatggaagctgcacgaggagaagtagcagaaatggaacaaattagtacttctgcaaagggaggtgccgaggagcatggggacttttctgaacttgatcacatgggccgagcagatgctaaattgcatttacacttaaattctgaagtgcctgagaaaattgatgaaatagagtgtaaagaagtcgctggcactatgagactaactgggagatattctgatcagaagcttggagatgtgcctgaagttgggtacacagaagatgaaaacattagggggctggtagtgaacacaagtgataggaaaccttcagaagtctctcaagtcgagcctgcaaaactggaacattctaaggatctggtgaaagaggaaacagacaaatccgaaaatattcctggattagaatgtataggattggaggaaactcgtggagatttgatggaagagtgtgcaaataccaagtctgataatgttcccgaattagaaaatacaggattaggaggaactcatgggccaatagaggatactgatggtagactgaaggaaattcatgatgtcaatgcagaactggataaacacaatgtgcatgagagcgatattgatagatccgaggacatcatgcaaatcgatccactaacacaggataaagctacgtggctggcgaaggaagaaactgaagataaaactacaaaagttcaagaagtaaagtatgaacaattaagaaatgagccaccgattcaagaggattccaaggaaaagccctgtgctgatagcaaggatctatcagagaatgttgtagttcagtccaaagaggtagataaattgaaacaagcaggagagggttgccaggcgttaatggagaaagacatggagaatgctagtggtgcttttgtactagaacagacagaagatggacacagaaaatcattgatagagacaagtataaataacgatagtgaaattactctagtcgagcagttggatggacaaagtgagagtcttacgaggacaggtactgtggaaattcatggagaaaccattaaagcacaagacaatgagttctataaggatgtggtagaagattcaaatgactcaaccaatgaaaaggatgtggtagaagattcaaacgaatcaatcaatgctaagatgccatgtagttcagctactgtacagttaaaagaagataagatggaagtttttcatgaaggcaagatggaggagccatgtgctcaggatgctgaactgagtaatcagagggaaccatcatctgatgcaactgctatggagattgaggcagtggctctggaacaggacagcagaatcatatgcaaaaacatggaggcaacaacagtggaaggcagccacacactggatagtggactaagttccgatctagccaaggttaatgaaactcatgctgcacgggaaattaaaaaccaggaagttttggatgtggacatgaaagtagcaatgagtgtttgtggtgaatatcaaattaactcaattggtatggaggatgtcaaatctaccaaaggatcacagaaccaagaatgtttggaccagaaagaagaccatataatggaggaaagagtggagtgtgaagtaagagaaggaagtggagtatcctatgaagaggcatgtgagctcggtggtggtagagtgaaagcctctggagttgcagtggatgttagtggtccagtgctaaacaaggaggcctgcaacacagaggagttgcaggcaagggaggataagaagcgtcatggagttgggcatgtgaatgagaagagggttttggaagaaactagtatgattgatactggtgaattgaaatctgattcgactgttatggagattagcatggctgggttaagacaaggaacactcaaccaatgtgcttcaagttcggagaaggaagaagcagtgcaggagaagcatgatcagggattggtagatgaaaacacaaacagaggttcagctgacaatgatgcacttgaatgtggtggagtgaatcctgatgtggccataacaatgtttcatgaaactattcttacaacagaagctgtcaatatagctgggtctaaaatttcgtctgagaaccagcaaaaggaagcaccctttgaagtacactctataacagaagtcgaaggttctgaatcaaatgaatcatcaagaaaggagcctgaaggagctcttgctcttccacaagagcctggcaacctggtaaaagttaaacaagaaagtttggagaatgaaaccgagatgtccatttttagggagaatgacaaagtttctggaaaagatcaggcatcagcagagtttataattgatccttcaaatacggatgaacggagggagaatgatattgggcggcccgatgaatcagcaaaaggctgtgaaaggttaacttctgattctataaacacagttcactccaaatttggcaagtctagtaatgaagaggataagagaacacagaacaccaggtctacggatccaaaagatataaaggaatcattgggtagaattcgtgccgaaccatcaaacagggtacacacaaccagtgttgggtattactctcagcatgcagctcatgatccgatttcatcttgtaaggagatcaaagtgcctttgcgagacggtgcaagggattctggaagggaccgtgcactggagttagtggttacaagtccacgagaagagactcctcgatggaggcaagaacagtacgcacttcagattttagaagacgttcaaaattcccgaattgctgagagatctaggatggagatggagatcagagtactgaaggcacaagtcagtagcatggagagacaagtgatgaacctggatcacttctctgaggtcaagtccagatctagtttgaaccaacaaatggttattccgaacctcctcccattatactgaatgattggatgcatgacggtgctagggcatgtctgggttatgcctgaatcctgatgacatgactaaactgcccaaggtgtcactagctcaaatcgatggtagttctgctgtctatcttttagattgacgataagctcggataatttggaacttctgtgcaccacatataaggaatcagttcatttcacagggaaatcggaaaaaaatatcagcattccaaaggggtctaggtcttggatggtcagccatttttattatgtacaaatgcagtagaagatgaggaacttcatagtatgtttatgaactcgcaactacttagaccgcatattagtgtgaagcgagtctcattttgtttctagaagtgaagttgaattccattagttgtcagcattcacctgttctataggagctgccgtccagactccaggacttgtgaaagaatataaggggtaagatcgtcaatgcacatggccatacaatggcagaagagcaatgaggacacaagattgaatttaaaatggggaactggcaacaaatcgaactactggccgtgtttttttatataaaaaactggctgttgagtgttgacggcaaacgggagaagcccaatgtttcgattggcagaacggcaaaattctggcctgctggctgatttcgacgcaccaaagccaacgttccttgcagtcttcctttcatgtagaaattctactctacctttttgaactaatctccttgtcctattttctttcttgaactctaaaaccatacattttagcctccaaattagggatggttcatgattttttattcagatgtaaaatttgtggtcttctttcttccattgtgaataaatatgatataaaagttgtcatgcaaatccata

SEQ ID NO: 26911 - DNA, 3060 bp, Zea Mays
gcttgatgcgacaatccctttgtgctggagtgcagatcggaggctgtgaaccctgcttctgcagtgcaaactggaggtgtaccctgctactgtgtcaaccagaggcagccgctgcagctcgtgatgcgggataagggaggatgattcctcctgagcggaacagtgattgatcctactaaatgtcgattgatgagtgtggatgaaaagcgagaacttgttcgtgatttatcaaagagcccagaaagcgctcctgacaggctccagtcatggacacggcgggaaattgtagagattctttgttctgatcttggaagggagaggaaatatactggtttatccaagcagagaatgctagattatctcttcagggtggtgtctcgaaaatcatctggtccagtggaacatgtacatgagaaagagaaagggaaagataaagagtcaattcttgagcccaatacaactaaccatcagtcccctgccaaacgaccgagaaagagtgacaatccatcacgattaccgattatcacaaacaactcagcagcatctgatgtaactgggccaactaataatctacgcttctgccaaaatttagcttgcagggctattctcagggacaatttttgcagacgctgttcatgctgcatttgttttagttacgatgataacaaggacccaagcctctggttgtcgtgtagttcagaccaacacttacaaaaggatacctgtggtttctcatgccatcttgaatgtgctctaaaggatgaaagaacgggtattctgcagagtggacaaggcaagaaacttgatggtggctattattgcattcgctgttggaaacagaatgatttgcttgggtgctggaagaaacagctggtgatagcaaaagatgctcgacgattggatgtattgtgtcatcggatttatctcagtcataggatccttgtctccacagagaagtacttggtattgcatgatattgttgatacggcattgaagaaactggaggctgaggtcggtcctttatctggagctccaaatatgggtcgtggaattgtcagtcgacttactgttggtgccgaagttcagaaactttgtgctcaagcagtagatgctgtggaatcattgttctcgggtgtatctcctgctagttcaaaaattcagcggccatgcatgatgcgaccaaactttgtaaagtttgaagctataacccaaacatccgtcatggtatttttggatttggttgattgtcctatgcttgcccaagaggcaacttcttttaatatctggcaccgagtggctgttactgaatcgtacccatcaaatccgactggcataatacttgcgccattgaaaaaattacttgtcacttggctcgcaccggctacaagctatatctttaaggttgtcgcgttcaagaactcaattgagttgggttcatgggaaattagaatgaagacaagctggcaaaaggatgatccaaggggttcaatgccaggtggtaccggactaggacaaaatagtgagagcccaaaggcaaacagtgatggccagtctgatccttcctcagagggtgtggactcaaacaataatactgcagtttatgctgatctaaacaagtctcctgaaagtgattttgagtactgtgaaaatcctgagatccttgattcaaataaagcttctcatcaccccagtgaacgtattaatgacttgcaaaatatacagatggctgcagatggggtaacagaagtcacagagctggaagaagcacctgggctctcagcctcagccttggatgaggaacccaatgcttgtgttcaaacagtgcttctcagggattcaaacccactagaacacaatcagagaactgtggttcctagatcacatgatacatctaatatactggctggacatgagttggtgattgttggacctcgatattctggttctgtgcctcccactgcaccaagaagtgtggaaaacagcaaagacaatggtggaagggcctccaaacccaaaccttgtgacatagttgttcaaaatggctcttcaaagcctgaaagggaaccaggcaattcgtcaaacaaaagagcaacggataaaatggacgactttggccacaaggatagtttctctgaagtgtcctatgaatactgtgtaagggtggtcaggtggctggagtgtgagggctatattgagacaaacttcaggatgaagtttcttacatggtttagcttacgtgccaccctgcaagagagaaagatagttagcgtatatgtggatactcttatcgaggaccctgtcagtctctctggccagctcgtcgacagcttctcggagaggatatatagcaaaaagcggccttccatgccttctggtttctgcatggatctgtggcattaaggaactgcagggtcttaccgttcgctttgtagggagcatattcggcccattcttttgttgcagatcgttgcattgattcttcattggaaatttagctgaagtatttgacttgcacatcttcattgaaactttccttggtgatgacagtaggttatgttatcgtcgggcaacttctttttcccttctgttttttttttcttcatttgctccataataggttacagtgctcccatgttaatcttagagcatcaatgtgctgcattgttcagtcagcttagtgccgtcatgaattttgtggcgtgtagcttgtctgaagaagaggatggttgccaggctggatcaggaatgcgcctgtgggacgaagcaggcttcgtgtggacgctgacgaatccaagctaaccatgtcttgtcggtaaaatggttgtgctgtatcttcggggggatttgcattttcttgctgactctttctgggaatgggaggaatgatgtttaaggtgcagaacgtctgccttaatttaatgttatgttgactcatgctcctttatctgctgcatttgttggttcgatgcatggtgttctgttctatggcctccaggttctgtgttgcacctgtttgagtttcgttccagtgcactgacactgtatatgtccaatctagct

SEQ ID NO: 26912 - DNA, 1455 bp, Zea Mays
gcgacaatttccctgttcatgtacgtgtttctagggattttctagagcttgttgaaaagaatgttcttagcagccgtcctccttggagagtaaatgcaagttcaattgatatcactgctgatgccgctcttctaatagcagaccactctttattctctggtactccaaagggtagcagctgcatagctgtagagataaaggccaaatgtgggtttgtgccatcatcagaatatatatcaaaagataattctatcaagaaacaagtaacgagatataaaatgcatcagcacctcaaatttcatcagggtgagatatcgaagactagtgaatacaatcctcttgatctattttctgagtcgaaagaaagaataagcatggccatcaagtcatttttctcaactcctcagaacaacttcaggatttttgtcaatggatctttagcttttggtggcatgggaggtggtgcagatagtgttcatcctgctgacactgataagtgcattaaagatctcagcaaggtcagtggcctggaactccctgacttcactgagctcctgtcagagacaattttcaaatctggggtattgggcaaactgttgaccactcaaaagctggatgatcatgacattgaaggggcaattcatctgtactacaacataatttctcagccttgtttagtctgcaaaaacctaactgatgtagagctattgcggaagtacacactcttgcattctcttccgttggacaagagcttgaagattgtcagaaacttcctcatttctgctactgcaaaggactgtagcctgatgatcagctttcggccaagagagaatggaagtacagattctgagtatgattcagtgtttcttgaatcagcgaagcgaacctatgagtacaagacatatttcgttgatctggatgtgaaacctctggacaagatggtacattattttaaactggatcagaggatagtcaattcctacacaagatatggggaggtcttgccacctccaaagggcaagtaataccaaagacacttcggcgattcagctccaacaatgaggagcctctcttcttactatatacgtctggactatggagaagggtgcatcagagagctccagcccactacgcccttaggttctgtgcatatattgttgtatctcttaactgtttgatgatatggaatattcttttcccaatatggtaccgagcctttcttgagcctcctcctcgctgccgctcttcttcggaatgccgcggcatttgccctcccctcatgtttggcgagccggctgcacgtacagcacgacagtgagtgccagggacatgcacatcatggcgacggtttaagcttgtggacactcagcagatagggtgatgaccgccattccctgtatgacagacacgatgtgcatgcaacatgatcagccattcgatgcatttgatttgatg

SEQ ID NO: 26913 - DNA, 1451 bp, Zea Mays
cttctggaatcccccctcccctccgccacccataacttccatcgccatcgctccaccaaagctggggacgcctccccgcccgaccagcgccgacgccgacgacgagcatcccatccgccagtgaccgaaatttcacaccaggcgctgcaagcgactgcaatggctatgtaccagcgctccaagcgggcagccgggaactagctcatcagtcattactgacggcgtaatcttcatccgagtggtcagtggcgtctacagtcgcagcagcttgtgcgcgcatggctagcaacatgtacggcaccacggtggcctgtaggatgtgctacagagaccagtacaggccgccgccgcgcgacttcacttgcgaggccaggaaatcggaggccaggaggtggggaaacgggtaccacctcatccccaggctctgccagtggaagcccagaggcagcaagtctgatggctcactgctcggcgacggccacggtggccgcgatgctcgctgccactcttgtggttcccataacagctgcgagtgcgaaactagagactgcgatgctatggaagatgctgctgcgagctcttaccgagatttcaagcaacattcaaggggaaatcctcaattttcagatgatcaagtttcatcgaagaataagtcagcctatgctagtcaagggttggctgaagcctgcaaatttgtttacaatgatgctaagtttgtaaatgaaagggctcaaaatgacattctattactttcacgtggcataacaaggctgaacaaacgcgcatgccaggatgctgctgttttgggcctggggtttctcaaacttgatgctcgtgcacggaaggatactcaaaagattgaccacacagtgaaggagagagcagcgcttcttaaccattttgccagagcatttaaggagcgagctcagtcagacttgaagaaagctgcagacaaacattggagtgatggtgccttggaggcagacctgcgacgagctgacttggttgttaaacgacgtgccatggaagacgctttcatggcattgaagtttgttcaggatatccatgacatgatggtgaacagattatatgagcagcttccgaaggacggttcatcttctcgtacaaattcaacagggtttattacgcttgagaagaacgggaaggctcttgaactgtttcctggtgaagtttctgctgatcagatttatgccatagaggaagcataccagagtatggcatctgccttttctgaagctgatggtattgactacacagatcctgaggagcttgaattgttggtagcaactctaattgacctggatgccatggatgggaaaaggagtgtttccttgattgctgaatgttcaagctctccagatgttaatactagccaaaaaacgaaattgggtgccaatttcttattttcaatggccctagttcctatcgca

SEQ ID NO: 26914 - DNA, 1211 bp, Zea Mays
gtacgagacacggcggtagtggcagctggcacgaagggagatgattaaaaataccgtggccacgctgatggtgcgcctccaccacctgcccctgccccgcgccgcgcccgctcccacctaccgttgcggccgccacctcgccctcgcgccccctctccctcggctgcgggcatcggccgccgtcatgtcaacggcggcggaacagacgatcgccgaccagaagcgcacgctgcgcgccgaggtgcgcagggcgctgaaggccctctctgccgaccagcgcgccagcgaagatctggctattcaaactacaatactggattcctcttggttcaaagcaagcaaacggttgtgcgcttatataagctgtcagcagttgcgagaagttgatacatcaaaaatactagcagagtgtctaccgtcgaatcctggaactggcaaaggatctttatgttcctcgagtggaggataagaaccgtaacatgaggatgctcaaaatcaccaccatggatgatttagttaagaattcaatgaacattctggaaccatcgcctgtggatgctactgggaacaatcgtgaagatgtattgtcatcattgtctcctgttgatctttttttattgccgggacaagcttttgatagaactggtcgaagactggggcgtggtggagggtactatgacacattcttgctgaagtaccaagaacttgcaaaagagaaagggtggaaccagcctctcttagttgctctttcgtactcggtgcaaattatggacgagggcatcatcccagtcaattcaactgatgttcctattgatgctctggtctcatcgtccggtgttattccaataagtgctgcggcgttgcagaggatgcaatgaagttgattggcctctgtagccatgctttcacaacaagcaccttcttctgatccctggttgcactagcaaatacaccagcagatcaaggaaactgtctcttttttccccctcgtggctcctctcttgtatcatcttttacgttttaacagggtgaactggacgtctacatcttattccagccacttcagatttatttttgttgaggcatctgtagacaaatcttatttaggctttgttcggttaatcctgttaccccggttaatcctgttacccatggattagacgagattagaaaaaattaagaagaagtttaacttatttgagatttaaacc

SEQ ID NO: 26915 - DNA, 2923 bp, Zea Mays
ttggttctgtcgatgcagctcatcaattccattcccagctccggaaaatcgagaaatttcgattggttatttgatttgatttgattctggccgtgccgaaccctagcttccatctcggtccaatctcagttccacatattgttactcctcggcagcagaggaggccgtcgtggaatgagttgaggatgacggcatactactcgtgctcctaggaaaggtcagggaaaggaagaattcgagccatggaggacgaggcggacggcggcggcgaatccttcgtgctgcgctccggcgtccgcgcgggcctcaagcgcgaattcgccttcgccatcgcctcgcaggccgtcctttcgtcctcatacgcacccctgggccgcacccgccgctcatcccgcatcctcaacccatcggccgcttcgaccccctccgtcgccggcgccgccgtctcgacatcctcctcctcaacccccgacacaaagccaaaagccaagcgcccgcgcccaccagatcctccccctccccctcccttcccccctccaccagactatgcccctgcccccggagaagaccatgacggggccgctgtcggccccgtgctcgccttgatggctgctgctgggcccagccctccgccgacgcctttgactccgcaaccccatgccgacgcggatgcggatcccgcacacctcgccaacatcatcattccgccggagtcgtcgcccaggcgcatcacgcgctccatgctccagcccaagtctcgccttcctaccgccgctcgttctcctgacaatgcggcaccgctcaaaccaaaactggaaccgccggaagaggaggatggcaagccggttccagcgttgaggcgcttcaccagatcactactggtcaaggacaaggacagcaacgacgacgacctctcaggcaccaccaccgccagcaatgcctcctccccttcgcccaaaaccaacaccacaagtaccagcaggagcagcaacaaggggaataagaatacaaacaagattcccaccaacctcagggagctgctcgccaccggcatgctcgaaggtcagcccgtcaagtacatcatgaggaaaggcaagcgagcggtactccggggagttatcaaacgcattggcatattgtgttcatgctcttcatgcaaaggccgaaaagttgtttcaccttactactttgaggtgcatgctgggagtaccaaaaagcatccatcagactacattttcctggaaaatggaaataatctgcatgatgtgttgagggcatgtacaaatgctacattagacatgttggagcctgcaatacgaaaggcaataggcccagcacctcaggagagaatattcagatgcaaatcatgcaaaagttcattcagtacactccgcagtgggaaatttgctttgttttgtgattcgtgtcttgagtccaagggagctaagaataatatcagttcatccaaagttgggcgaagtcaaacttcatctgccaaggtatataagagtgcatcaccaggagcaaagtcttcaagtgtaggaaggcttacaagaaaggataagggtatgcataaggtcgttttcatgagtggcattttaccagagggcactgatgttggttactatgttggtggaaagaggttactggatggatatataaaggaacttgggatctactgtcattgctgcagcacagtggttagtccttcacagtttgaaggtcatgctggtcgagctgctcgacgcaaaccttaccacaacatatatatgtcaaacggcgtttcactacatgagctgtcaatttcactcttgaaaggtcaaaagatgtcaaacagacaaagtgatgacttgtgcagcatttgttcagatggtgggcaactactcctttgtgatacctgtccaagagcttttcatagaggaaacttttgatcccattatccaggtttcaactggacgggacctcattccagccatggtttatgggaggagtgcaagggaccaagattacacaggaatgtattgtactgtgttaactgtgaacaatattgtagtttctgcgggtcttttccgcatcatgggtagtgaaattgctgagctgccgttggttgctacaagtagggatagacaaggcttggggtatttccaagcacttttttcctgcatagaacgtctgttgtcatctttggaggtgaaacattttgtgctaccagctgcagaggaagcggagtctatctggactgagcgttttgggttcgcaaagataagccaggatgagctgcgcgaatacctcaagggtgggcgaacaactgtgtttcaggggacgtcaaacctgcacaagctggttgcgaaacttgaatgctagttatgtgagaattgtatggcaagagcaaggacatgaagctaagaagcagctcattgtttgtgtgcctctgggattgatgcagacaggaaagaggcaccctgatccctttcttgtaaatgttggtgagcatgttggcattggcatcttgatctgtttccataggtaaggtgaagaggattgtgtaagataaaagggacaagctgtatgtaaagacaagccaaagctgagtgaatttcaggcaccttattgtgtggagggtcctgtgtttgttgagtaggcaacgctcgggctggtgtgagatgatgactgcatttgtgttgtgttggtggtattttcactgctgacatgactgttgtatcggatgacatcttttctgttttatgacagtggcagtgtgatactaggctgttaggaggggacgggggaggtcaaacccaacgtacatcatgagtggagctgctgtaatgtaacagaagtattgcaccccccccccccccccccccaataatatataacatgcttaatttggtgcgaattccttgccgcttgtggagcttag

SEQ ID NO: 26916 - DNA, 1259 bp, Zea Mays
tggcggctcagatccagactcctccggtgtgggcgggcgctagttcccccggcggcgcggccctagcagcggccaccccggtgggcacggcttgtgcgcggccgtcctgacctgtgcgcgggcgcagcgtggccctcgacggcgcgcttgcaagcgccctaccggtgcgtgggcgggcagccacgatggcgcgcgggcgaagaccctcggcggcgcggcgggcccggctctgatccggtctcgtctggcgggcgcggccctgccccggcggctcccgtgaccctagtgcatggcaacggacaatgggtattgatgaagcaaatgtcatggttgaacaaccccaatgatcagctatgagaagaaatgacacgtatctttgacacacacataggagccagacaaagaacatactaatgaaaagatcgatgaatgatattgatatggcatgagtgttttgaaatgtttggtaggttctgtttatatggatttttgtatgtacacaatgtttgcttacgtcatcgactcgagccaggtgagggttcggcgtggaggttcgtcgaggtctgctgctcgtagctcccgtcgctccactcaagatccagcagaagtggagcaaccacgagaagaacttaggcgacatcaggattacttgaagcaacaagctacgcaacatgaatattatgctacacagattcaacaatagcaaacactcatacaagtaagttcaaaagataatagctttcactttaagatatgtattgatttaaaacactgatgtgaatgagttcgacaaatttgtagcaactagcacaggcccaagggatacacgtcccggtgcccccaccaccaccacctctcgttcattatccttggtcttcacctccaccaacacctacatctccacctaccgaacatcaggtatgcaaattcatcataatttacttgttgttagttatattatgatctaactcagcaaatatcatttgtacatgtatattagacccctccagctaccttgccaacgcatgaacgagaagacgggttagactttgttgaaaccctcttcactagtggaggtatcgaccatcactcgtcactgtaacctgatggtgatcggcgaccgtgagctttcatgttattgtgttttgatacttgagacatttattatgactatgtatgtgatattgtctcttattagtactggatgagatgtgtcttattatgactatggatgagacttttatgatgtaattgatgag

SEQ ID NO: 26917 - DNA, 1821 bp, Zea Mays
ctgcaatcactgctagtccgcaggcaaccgagagcccgagaccgcccaggtgcccaccactccaccagccaaccctagagcctctccagtctccactgctcggccgccgcctgccgcagcccgccgtccactggtcccgcctcccggcgtccgctccacgcctccactgctcccggcgtccgctccattgctaccatcgtccggcgttctgctcctgcgccctccctttgattcgttgccagttgtagtgtccgggcagatttgagctgtggcagcaagcaaggattgacgaagcgtgcgttcccatcgcaccaccatgggctacacagagatcgacatccacccctctgggagcggcaagaacacacctctccatctttcggtgcttggtggatcaccgtctaaacgatccaccaccagaaccgcccaaccccaagataggcagctccatctcagtcgttgtacccgttcaatggcgagctggtggcagcgatgtaggagatgatccatgccgaggtgcacaagtacatgttagtggacggcacctgccaaagatacaccgtttctactgtttttcagttggagaaaacatttaagacaacattttcatcgtttgttctccatatggggcttgtttcacgccacttgaaggaagaagggaatggtggtgttaagttcggacaatacatctacacatcttggagcatcggcatcaatgttctcaatcttctcaaatttcaaattatactggtcattactttgaccattagaataaaatccctataaaacgtggccatgcaatcactggttgtaaactgatgggcagaatgttgtaggatggattggctcaagaactaatatagcttacttatgacaatgtagtaattcatgaagttattgttccttatgttcatggagtttgttctgctaggtttttatgcttttaatttctatttccttaacgaaacctcaggcaccttaaagacagcttggatgattggtttcatgaacagctagagaacttggatgatgattatcttgtgtttgattgccctaatatattctcaaatcatcttttcatgctttagttgtttcttaatagttgcacagtttcatctcactcatattcttgccacttacatgtatgtgacaaaacagacaatccgtcttttttattgcttatggcgttgtgcattatacatgtccaccaattatatacaaataccatttgtgggttacctctggtgtgtttaggtattcctcagattcctgacattttttctgtctttaaatgtcatatcactattaaaaaaattgatttttgttgtctaaaataccacaactacttttctaggtgcgagctgcaatcaaagttaaggcattagtcatcatttgcttcacctcttctggacaggctgcaagggtgttctggacaaagaaagcttgtaccttaaaacaagaggatacaagaagctggagtggttgtctaaaggcttttgaactgcttgaagcattagtgtagctttggtgattttgtgactgatcagctctggagcagctagagtgatgtagttgtgggcttttgaacaatagctggagtgatatgaaacattagtgatgtggttgtgggcttttgaactgcttcaagctggagtgatgtcgctgtgttgcttttgtgactgatcatctctggagcttttgtgaatgatctaactagctatatgtaaatgatctagttgtgaatggtattataattgtgatgattttgtgaatatataattgtggtgcttttgtgtttatgtgatggatctatgactggta

SEQ ID NO: 26918 - DNA, 1731 bp, Zea Mays
gttttttttgccagagacagtctgcataaactttaattatttttgtgaaaattcaagctagatcaataccacatctgttggaggggaatgatgtgatgggcgcagccaagactggctctgggaagactcttgcattccttataccagcgattgagatgctatatcacacacacttctcaccgaggaatgggactggagctattgtggtttgcccgacacgggaacttgctatccagacacacaatgttgccaaggagttaatgaaatatcactcacaaactctcagatatgtcattggtggtaataatcgaagaagtgaggctgatcagcttgcaaaggggatcaatttattagttgctaccccaggcaggcttttggaccatctacaaaataccaagagtttcatatacagaaggctaaaatgccttgtcattgatgaagccgatcgcatacttgagcaaaactttgaggaagacatgaaacaaatatttaaacgccttccccagaataggcagactgttcttttttctgctacacaaactccagaggttgaaaaatttgctaaactgtcatttgagaaaaatgaagaaagtaaaaaaaaacctgtttatgttggagttgatgatgataagtcaaaggctactgttgaaggcctgcagcagggttattgtgtcatttctagcgataaaaggttcttggttctgtatgctttcctaagaaagaagcggaataagaagataatggtgttcttctcatcatgtaattcagtaaagttccacgctgaacttctgaatttccttgggatagagtgttctgatatccatggaaaacagaagcaacagaagcgaactactacattctttagcttttgcaaggcagaaaagggcatcttattgtgcactaatgtggctgcccgtggacttgatattcctgacgtggattatatcttgcaatatgaccctccagatgaaccaaaggattacattcacagagttggtcgtaccgcacgtggtgagaaaggcaaaggaagtgcattgctgttcttactaccagaagaactgaagtttctaatttacctgaaggcggccaaggttaccctgacggaatatgagttcaatcagaagaatgtgccaaatttgcaatcgcagcttgagaatattgttggtgagaattactttctgaaccagtctgccaaagaagcctacagatcctacgttttggcatatgactctcactctatgaaagacatttttaatgtccatcaacttgatctgcagaaagtagctgcgtcattcggtttcaagaatcccccgaaagtgaacctggacctggatagcagtgcggcgaagcatcggaagaagatgaggagagtagacggtgggaagaggcatggcatcagcgcttcgaacccgtacgggaggaaggacaaaggcggtgccggcgataaacgacagttggcgagattctagaaaggaaggaagagcaggagcgtttcactattgttgtgttcgtaccagggctttgattgatgttacctggcttgggaaaaatcttgacaggccactaagattggctataaattttgggttgtcttgatatatttggtgtgtaacgcaatcagcctgctcgatgcgaaaattggattattgctttatagtacttgtggtttccaacccgaggaaagttggtgctgtggtttctggttttgcgtctcaacacgaccatggcggg

SEQ ID NO: 26919 - DNA, 3275 bp, Zea Mays
cctagacgctcatgggccggttctgccttatctccctccctcctagtcctaccacttcctcattccccacgtactctctcggctgctcgcttatggcgatcgaagctgcgcgcctctcaccgtccatcgccgccgccgccttcctcgccagccgcccccctcttgccctccgcccgttctcccttcgtcgcaggtttcccctcctccgcgtcctcgccaactcatcgggaggggacggacgcgtcgtcgctctgtcctcgtctgagctccgaaagcgccgaggcctgtcttcctcctctggggctgcggactccgcatctgacggggatgagaagctacgctcgcttcgtcgactcttcgcgcggcccgacgttgctattgacgcctacatcgtcccttcacaggacgcccaccagagcgaattcattgcagaatgcttcacgaggcgtgcctatctgactgggttcactggcagtgctggtacagctgtggtcacaaaaaataaggctgctctctggactgatggccgttattttcttcaggcagagaaggaattgagccaccactggacactcatgcgcagtgggaatcatggtgttccaactactagtgagtggttgaatgatgttttaccatctggttgccgagttggtattgatccgtttcttttctcatttgatgctgctgaagaactgaaggattcaatcgccaataagaatcatgagttagttttggttcagggcatgaacctagttgatgagatatggggagatgcaaggccaaatcccccaaaagaaccaactagggtgcatgacatcaaatatgctggtattgatgtgccatcaaagttgtccttcattaggtcacaacttgctgaaaatgggtgtgatgctgtggtaatttcaatgctcgatgaagttgcttggttgttgaacatgagaggaagtgatgtcccacattcaccagtattttatagctacctcattgtggaggttagcactgctacactatttgtagacaacagcaaagtttctaaagatgttctggagcaccttgagcaagctggtgtgaaacttaagccatatgaagcaattatttctgaagtagaaaggtaaatcttgcaaaagcactaatctttaaaaaatttctatctcgattcaagcatatggtttgtgtttagttgttgatgtagacctttgtttctatagtaagacaatcatcatggtaaaaagcaaaatatattgatttaacagtcccattgggctcatggttcttcttcttccatattaaatttaatcaattggattgcttatggccttatctgtgcaaaatgcttcactgccctggaggtgatggagtttttgttctttttcttgtcattatttatttttttgtaaataaaatgtctgtcagggtttactagtgaattttcagatctcactattgacattaatatgtgtgttgtaccatatgtatatttctttttaataaaatgatgttcatctctcctgagtatcagaaaaaagatcttgcgacaattcaatagggaaaatataatttttgcaatgttgctgttgatcaaaacattgatcgctttgtcaagactggcagagaaaggtgcaaagctctggttggattcttcaagcgtgaatgcagccataattactgcatttaaatcaagttgtgacatgaaaaagaaaggaaaagcaggtgaagaagttggagaaaaagaagcatcttcaaacgaccggataactggagatcctagtgtccacaatggagtcataagtgctgtatacaatgtttcaccggttgcacttgccaagtcagttaaaaatgatgcagaaattgagggaatgaagaattcacacttaagagatgctgctgctttagcagaattctggtgctggctggaggaggaaatctgtaaaagtgtgccccttacagaggtgcaaattgctgaaaagcttcttgagtttcgtcaaaagcaagatggatttatcgagacaagcttcgacactataagtggttatggtgcaaatggtgctataatacactacagaccaaccccagagagctgcagctctgtaggaagtgacaatctgtttttgttagatagtggtgctcaatacattgatggaactactgacataaccagaacagtgcattttggtgaggcttccccaaggcaaaaggaatgcttcaccagagttttgcagggccatatagctctcgatcaagcagtgttccctgagagaactccaggctttgtgctagatgttctggcacggtcatctctgtggaagattggactggattatagacatggcacaggccatggagttggagctgcgctaaatgtccacgagggacctcagagcattagctatcgatatgggaatttgacagccttacagaagggcatgattgtcagcaacgagcctggttattatgaggacaactcatttggcattcgtatcgagaatttacttctggtaaaggagcttaatctggcaaattcgttcggtggaatttcataccttggttttgagaaactaacctttgttccaattcagagcaagcttattgagtcatccttgatgtcaccttcggagatcaattgggtcaatgattaccacgaagaagtctgggaaaaggtttcccctttgttgagtggccattctcgcgactggttatggaagaacactcgacctcttttagatgtgtaataataactcaacgcacagcacggcttgactgcgtaagtgaaagaaatgaacagacatgtttggctggagcatctcttgaagatctgatggccttcaatggaatgcaactatatggcagtaaacagaggcaagacaatagatgcgtaggctggccagggttcagcggatgataggttgaggctggtgtatttgacatccagccaatttggtgcaacacttgaaaaatgaattacatgcaagccttttctatttattacactatcgacgacaccgtccattgtttgatgaatttattatttattacatttggtacctttttttatacaaaaaaacatctttttagagtgatgaagccatttgagaccatggtttcgtatatggaatcagtcagattcttagggtgctcttggtagggctatggcgaaaacaatttgagctatgatttttgtggtgaattatgatggagctgaagctattttgaagaaaacgattgataaaatagtttggtgacttggcgttactattaaaaaagactgaaatatccat

SEQ ID NO: 26920 - DNA, 591 bp, Zea Mays
cagggtttgcctatgcaaaatttgggaagacaaaggtcattgtatctgtgcaactctcacccgccgccgaagccgcccacagacctgcgcccgccgctcggccgcctttacggccgcagcccgcagcccggccgaccccggcgcctccgcggcttcgctcatctgccctcccgcggcccgcccagacctccgccgaccgtcgacccccgtccggccgtccagtcgacgcctgaccttcgcctgcggccgctgcctggccgcccgtacagccgcaggccgcagccccgcctccgcccgccagactccgcccctccacccggcgtcctccgccacagtgcccgaccaccccgcgccgccgcagcagcagcaggtgagcgtctctcgtccctttcctactgtcctgtgcacgctctgggttccggtgcttgctctgtttgatctgctctaatttgtcagtagaatcgtggattttctggagacagagacatgaagttgataatatacttctcagtttgtccggggaaagaaaatcttgtcaactatgagcatgaaatgtttgttagatcgcaggtgaactcagagaggttatat

SEQ ID NO: 26921 - DNA, 1113 bp, Zea Mays
tactacatcttgttccaaatacagttaaatttgctgactagattggtcgaacaaagcagaagaaaattcgtgtgacttcagaataacaatccctgaaatactggaggatgagtggttcaaaaagggctacaagcgcccggagtttgacgagaaatatgacacgccattggatgatgtggatgctgtcttcaatgactcagaagagcaccacgtgacagagaagaaagaagaagaacccgtagctctcaatgcatttgaactgatttcaaggtcagcaggcctaaatcttgggaacctatttgactcggagcaggaattcaaaagagaaacgaggttcacgtcaaaatgtccaccgaaagaaatcattcgcaagattgaggaagctgcaaaacctctaggatttggtgtccagaagaaaaactacaagttgaggctagagaaagtaaaagcagggaggaagggaaacctgaatgttgctacggagatactacaggttgcgccctcccttcatatggtacaagtccggaaagcaaaaggcgacactctggagttccaaaagttctacaagaacctttccaagaccttaaaggacgttgtctggaaatctgaagacctgcaaatgcgagctgcttcttagcatccactagatggcgagatgttcgtacgtgtcagattccattcccgtagcatgatgtgtcgtcagccgtttctgttcactgcactctgcatggtccggtgggcgcgtggcttggcattttcagagaccgcgttgctcgttgcagcccgggatgaaggcgatgcagtaggttttgtggatgtggtgagctctgtatatgcctattgatgagtcatgttgcaagctgtaacgacactatgatccgtgaagtgtagaagcagccaagtatgttctttctatgctgccccatttcccggcagtttccatgcattttgaagaaaaaaatagtggctaactcattgatatttgtatttggtcatcattaataaatcgcctctccatctgtgcatgacccctctatcgttgtaagatttttttacaatcctcatctttctaaggttctgtttttttaccagattatataattcagctcaaat

SEQ ID NO: 26922 - DNA, 1744 bp, Zea Mays
gggagcgaagcgcatccgcacttccgcagaggatcctcggttcggttggagttggaggcccaaaagacctcccgcacccaacaaaactccagcctcacatctctccctctccctctccctcttcctctctgcggtccaaacaatctctccctctctctctctctctctctcttcttcctctctgcgctccaaacaatctcgccctctccttctctactctccaaaacaaacgaaacgaagcaagaaaccgagaaatctccctcccctgtggctgtggcggtggcggtggcggcgaggatcatgtcggcggctgcggcagcggaagtggggaaggagaagggcgccgccacccccggccccggccccggccccggtggcgcgtgcgagctgtgcggcgccgcggccagggtgtactgcggcgccgacgaggccacgctctgctggggctgcgacgcgcaggtgcacggcgccaacttcctggtggcgcgccacgcgcgctcgctgctgtgccggggctgcgcgcgccccacgccgtggcgcgccgcgggcccgcgcctcggccccaccgtctccctctgcgtccgctgcgtccgccgcggcccggcgggggccgtgggcgtcggcggcgatgaggagatggggggagcgggcgacggagacgccgaggatgacgacgacgaggacgacgactccgaggaggaggaggaggaggaggaggaggaaggggagggggagaaccaggtcgtgccgtggacggaggacgccgaggccacgccgccgcccgtcgggagctccacgtccagcagcagccgggaggcccccgccaacggcgcagagcgcgcagcgaagctttacctgaggcaggcaacctgcgatgactggtgtagatgctgatgctaacattagaaggccagcttttagtgcatccaagctccggggaagatgcggatcacgacggcacggcgagatcagttcccaccgaggcatacatctttcttcgatcatcagttcgtcttcggtcctcaagcaaccttgcacgccgcagagtttaccagagcagcagtcctagaaccatagtagtgttcctaaacgtcgatggcttcgctgagattgtatatgtccccattacttcgttgtgttcgattccgtcctcttctgcttgttttctaaccttagagaaacggtatagggcaggctcgcagttgcaccggcattgttcgatggcctcactgtctgctttcttgaattgtgccctgagtggctgagccctagtttcttgtttcttgacagttctttcggtgagatttattgtctatggttgcagtggcagctgaagcatgcggcactgtcgtcgctgctcacctggcaaatacatacaatctgggcaagttgcaacatggcgaagatggatctggaattgttaatcgcccatttgggcgggcgtggggttattaggatattgttcgtgtatggatgcccagtgatcttgtcagatgggtgttcttagacgggggggaaatatcctgcctggtagggggaacgcggaagtaacgtcatttgaaaatgtgcaggctggtctataggtcagtgacagcaacgtactggttttgatgctgccatggtcacggatgtacgtacgcttgctgctgctcgcaggcccggtcgctgtcgacatcatctcgccacaaagaattgaacctgaaaatgaaagcaggggtttgcttttgtgatgtgaaagaaccga

SEQ ID NO: 26923 - DNA, 1292 bp, Zea Mays
atgcgtgagaccgatgggctcgtggatgcggtcgctgagaacctcctataccgcctcgaggactgcaggaaagccttcccctccgcactctgccttgggggctccaccgacgccgtccgccggttgctccgtggccgcggtgggattgagagtctgatcatgatgaacatgtcagccgatatggtgaagaagtggcgagagtcagagaatgccactggtgatgggcctgagacccactttgttatcggcgatgaggagtttcttccaatcaaagcgagctcacaggatttgataatgagctgtcttggacttcattggacaaatgatctacctggagcaatgatacaggatggtgaacagttgtatgggatctgtgaagcaattgatgaagaaaaggatccagagtgcttgatgctttcttttcatgtagtggaagttgtcatggagctgtttccagatccatctggtttggcagcacagttcacaggggacgtttttgagattctgagcaagtattttcctgtctacttcacacacggagtgggtaatggtttggacactacacaggaagacctctctatagcattgatgcacgttttttgttcaacccaattttttgagccttttgtcatccctttgcttcttgacaaactttcttcctctcttccattggcaaagggttcctggtggcttatcttgcagaaaaagctggagcagttaatccatctctttcgatccatttttactatagcttctcaatctatgcagccaaatttcagacaagaatatgtctcttgtgctatgaagggcttgctaacactagcaacattcccggaacaatatattaatcaggttcttgcttatgcacaacaatcaagagaaagggcaaacaaggaacaagcttctcttgtcgagaggatgcatgagtacaaaaggcagatagaccgtgagactcggtcttctataaatggtttgaatgattcttataatggtgatggaatacagactattggcagaagttcacataaacagatcgaggcagttatgcagtcaacttcaaaaggcaaggttcagaccattcgtcaaggttatctttcgaaaagatcttcaaacttgagagccgactggaaaagaaggttctttgtacttgatagtcgaggaatgttgtactactatcggaaacaaattactaggccacctgtaggtctctgttgtaacattcgctgttgaaatgctcattaaattggcacaatattttgttccatgatgcatgatatatatatatttattta

SEQ ID NO: 26924 - DNA, 499 bp, Zea Mays
caaacgccacgccgcgagactcccacgcggtccgcccccgcgtcgtctggcctcgcgatggccgccgccgccgactacgaccgcgcgcaccgcccgtacgcggctcccgcccccgccggtgagtacgaccgcccctaccgcaacgaggtcgtgccctacggtgaccgccgcatcgacatcatcgtcaagccgcccgcgaggtcgccgccgccggtatccaacaggggcggcgggggaggggtggggtcggcgtggtgcttcagcgatccggagatgaagaggcggcggcgggtggccagctacaaggcttactcggcggagggcaaagtcaaggcatcgttccgcaggggattccgctggatcaaggccaagtgctccgagctcatccatggctgaacccggtacctcggtgaaattctattgtattgtattggcatggtgcaagatgcggctacaaagcgcgagagatggttattatggcatggtcgataacacttcg

SEQ ID NO: 26925 - DNA, 554 bp, Zea Mays
cccccatacccgtctcgcctacaaatagcgcatccttcggcctcgtccactcgtgccctttttccgccgccgctactccacaccacccattgcgtcgccgcatcccacgaggagacaaatcaccgccgtcacggatagccatctgcagtggggttcggcccccatcgtggccacccgagtctcaggctgattgcatagaagccgtgggagagagtaatcgaaagggacctagctaagtccatgggaatccttcgccggagttgggatttccatcgcgctcgcgccccaccgtgaacagcccgtgcgtgactttgtgtttggagaagaacatgtggcgcaagaggaggtctacggcgaagagtataagcttatctaggtggcgtctcccagtcagctttatggtgccaaggaataatttttagtccattttattgctatcatttatttatgtaagactcttccgccatgtaataatgatatttatgacatttatgtctatacacttggtcattgtatgtgttgttcttcttttgtgcacatatgagacgcacccg

SEQ ID NO: 26926 - DNA, 1396 bp, Zea Mays
gttgggaccttcggtcagatataaacaaacagtctctgattgacaagacccgggccggtgtgcttgtgggcactggtatgggtggcctcacggtgttttcggatggtgtccagaatctcattgagaagggatacagaaagataactcctttcttcatcccatatgctatcacaaacatgggttctgccctgcttggaatggacattggtttcatgggtccaaattactccatctcaactgcctgtgctacctcgaactactgtttctatgctgcagcaaaccatatccgtagaggcgaagctgatataatgatagctggtggcactgaagctgcaattattccaattggtgttggtggctttgttgcatgtagagcactgtcacagaggaatgatgaccctaaaacagcatccaggccttgggacaaggatcgtgatggttttgtcatgggtgaaggagctggagtcctggtcatggagagcctagagcatgcaatgaaacgtgatgcaccaataattgcggagtatttaggaggtgctgtgaactgtgatgcttaccatatgactgatccgagatctgatggtcttggtgtttcatcttgcatcaagcaaagccttaaagatgctggtgtggcgcctgaggaggtcaactatattaatgctcatgcaacatcaacccttgctggtgatctggcagaggtgaatgccatcaagcaagtcttcaaggacccatctgggattaaaataaatgcaaccaagtccatgataggacattgccttggcgcagcaggcggtttggaagccattgctactattaaagcgataactactggatgggtgcatccaagcataaaccaatttaacccagaggaagcagttgaatttgacactgtacctaatgtaaaaaagcagcatgaagtgaatgttggtatctcaaattcctttggatttggaggtcacaattctgtcgtagtatttgcaccatttaagccataaggtgttccttgcctcacaaatcttggtcagaacagtgagatctgatttctgcgttcaattttcatgtgttctcttcgggggggaagtaatgtcagatttgaaccagcaacgttaaaaatgaactaaagatgagatacattgcgttttagatgactccatgttcacttagattgagcgcggctgtacaacattcctttgaaccatttgtaattgattgtactgtttttcatgtaatggaagaggagtcttgtagatgcacatctggaccttctagttaaatagcatacaaatgaatttggaaggcaggaattctgtccctattgctggatctggactcttttatgcatttttttttaaaatggctatatatacaaacgcgcgcttcaattaaacttgcacta

SEQ ID NO: 26927 - DNA, 1646 bp, Zea Mays
cactgagcgaaggcacacagccgcagccccatcttcatcttcctcgcagcgccggcgttccatcttccgctcctcccttattcgcgctcggcacgcaggcggcggcggcggcactcaggctcgggatctcagcgacggcgctcaggctcgggatctcagcgacggcgcccaggctcgggatctcagcgacggcgtcagcggcttcccttcagcctcgcgccctcgccttcgatcctccgcacaccggccggtgaccctgcgttatttctctgagggcactcatgatttagcacaagtcatactgatctctaactctggtgacataagctgttgttagggtagcaaatcaagagataaaaatggcagattcaatggtagcgagcttctgggggcctgttacatcaacaactgagttgtgcgaggagaattatgcacactcatcatatatagcagaattctacaacacaatttctaatgtcccatgtgttcttttggcgcttattggattagtgaatgctttccgccaaggttttgagaagcgattcagtgtcctgcacatatccaatatgatacttgctattgggagtatgatttttcatgccaccttgcaacttgtattcagtagatgaactttcagaatattgatacacccattaagggacgaagtcgggaagaaccattagggtgtgggggcttagctatattaaattgctagagtgacgagactccaatggtctgggagatccttctttatatgtatgtcctttattcgccggactggcattacaggagcacaatgccaaccttccttttcctatatggtgctgcctttgctgtagttcatttctttgcccggttccaattcgtattcaagctgcattacattggcctctgcttcctctgcatcccccggatgtacaagtactacatacagaccaaagacgtggctgcgaagcggctcgcaaagctgtgggttctcacgttaacccttgggactctctgctggctagttgatcgcatcttctgcaagaagctttcgcattggtatgtcaacccgcaggggcacgcatggtggcatgtgcttatgggcctcaactcatactatgcaaacacattcctaatgttctgtcgggctcagcagcgcgggtgggaggcgcgaatcacctaccttcttggatttttgccttatgtcaaggtccagaaaccagagaagaagagggaatgatttgtctctgcttaacactgatgctactcagtccaccgccagtaagctaatgtctatcccccaccccatcccccacccaatgtgcgcagacaagttgtggcatttttgtatatgggcatccaaatgattacggactataaatgttctgatgtcacactggatttcggtaacttttgactggcacctgttttgtaccatacttaatcatcgaacggagattagttggagtggttggttggtgtcctagttttggccatctttcttttggtttctttgcaattgccttttggtggtaataggacagggttatttgtttattcgtttgtcgttgaatggagtccagttgtactagttatcatcactccgcatggggatacatccttccatatgatgaccgttaattcattgacttgtgttggtg

SEQ ID NO: 26928 - DNA, 3009 bp, Zea Mays
ggaaactctgctcatcaacccgctgggtgccagtgtggtaccggtacccttccctcactctcccggttctttcccggcgctggattcagatccgcacgcttctccatttccgtaaagctccgtgcctcctcctcgtctcttcactccaaatccaccgaggccatcgcctgggccccggggaaacccctcgcgctcgtggccctgtgagcagccgcagccatggcgcagccgctcgtcgtgaagaaagacgacgatctcgacgaggaagagtactactcgccattcctgggcatagagaagggcgccgtgctgcaggaggcccgagtcttccatgaccctcagctcgacgcgcggcgatgctgccaggttatcaccaagctcctgtacctgctcaaccagggtgatacctttaccaaggttgaggctacagaggtcttctttgcaacgaccaagctgttccagtctaaagatgcgggccttaggaggatggtgtacctcatgatcaaggaactctcaccttcagccgatgaggtcatcatagtaacaagctctttgatgaaggacatgaatagcaaaactgatatgtaccgtgcaaatgctattagagttctttgtcgtattattgactcaacccttctcacccaaatcgagaggtatttgaagcaagccattgttgacaagaatcctgttgttgccagtgcggcccttgttagtggcatctacttgcttcaaacgagtccggaagttgtaaaaagatggagcaatgaagttcaagaggctgtgcagtcaagagctgctcttgtgcaatttcatgcccttgctcttcttcaccaaattagacaaaatgatcggttggctgtcagcaagcttgtcactagcttgaccaggggttcagttcgctctccgttggcccagtgcctacttattcgctacactagccaggtgattagagagtctggtgtgtaccaaggtggagatcgtcctttctttgatttccttgagtcctgtctccggaataaagcagaaatggtcatacttgaggctgcaagagcaattacagaactgaatggtgtcacaagccgagagcttacacctgcaattactgtgctgcagttgttcttaagttcatccaaacctgttctcagatttgcagctgttcgcacacttaacaaggttgcatcaactcatcctttggctgtcacaaattgtaacatagacatggagagcttaatctctgatcagaacaggagcgttgcaacccttgcaattacaacactgttgaagacaggcaatgagtcaagtgttgatcgtttaatgaaacagatgaccaactttatgtcagacatagctgatgagtttaagattgttgttgttgaagcaataagatccctgtgcttgaagttccctctgaaatatcgctcattgatgaacttcttgagtaatattctacgggaagagggaggattcgagtacaagaaagccatagttgattcaattattatactcattagagatattcctgatgcgaaggaaagcggtttatttcacttatgcgaattcatagaagactgtgaattcacctatttgtccactcagatacttcactttttgggaaatgaaggccccaaaacatcagatcccagtaaatacatacgctatatatacaatagggtgatacttgaaaatgctacagttcgagctagtgcagtcagcacattggcaaaatttggtgccttggttgactcactcaagcctcgcatatttgtgctcctgagacgctgcctgtttgatggagatgacgaggtgcgcgatagagcgaccctttacctcaaattgttaggtggggaagctacagtgggtgagacagagaaggatgtgaatgaatttctcttcggctcacttgatgttccattagtaaacttggagacgagtctgcggaattatgaaccttcggatgtaccttttgatatttcatctgtttcgaaggaaacaaaatcccaaccccttgcggagaaaaagtctacaggcaagaaatcagcaggtccagcatctgctgtcagtggctctgtttctacagttgatgcttcgtatgagaagcttctttcgtccattccggaattcgctgattttggaaagctttttaagtcatctgcacctgtagaattgactgaagctgagaccgaatactcagtgaatgttgtgaagcatatttttgatcgacatgttgtgctccaatacaactgtaccaatacaattcctgaacaattgcttgaacaggttattgttttggttgatgcttctgaggctgacgaatttttagaagttgcttcaaagcctttagaatcattaccatatgattctcctgggcagacctttgtggcttttgaaaatccagaaggtgtcattgccaccggcaagttctcaaatatcctgaaattctttgttaaggaggttgatccatccacgggtgaagctgaagatgatggtgtcgaggatgagtaccagcttgaagatcttgaaatcgtttctgctgattatatgttgaaggtgggagtatctaacttccgaaatgcctgggaaaacatggatccagagactgagcgagttgacgagtatgggcttggagtaagggagagtttggctgaggctgtaagtgctgttataagcatccttggcatgcagccttgtgagggaactgacgtggtcccaagcaattcaaggtcgcacacttgtctgctctctggtgtgtttattggcaacgtgaaagtcttggtgagactgtcatttggaattagtgcaccgaaggaggtggccatgaagctggcagttagatctgacgatccagagatcagtgacaggatccacgaaattgtcgctaatggctaaaaacaatggtatttttggttgttttggatctgtacaattttccttatatactgaggacttaaaatagtatacgcaataatatgcaggtaaagttttgctggaaaaaatgagcatattgccccc

SEQ ID NO: 26929 - DNA, 1096 bp, Zea Mays
aggtgtgtaaaattgatcttttgccttggcagtcgaaatactaggttggaaagaattacgtgtgtagtgagtggaagcaggagcttatcacattttctcagttcctggatagaatgtcgtcaactgtctgtccatcaaacttgacatatctggctcagcatccattgtttgagcaggtagctgatttttcatgttgatcctctagtagtttgcctttgttcagttgtgcattttacctcattggatttggcagataaaagagctcagtgaagacataattgttcccgaatactgttacgctggtggaggtgcactccaatcacttaatgcttggtttggtccagaggggacagtgacaccattgcaccatgatccacatcacaatatcttagctcaggtattgggcaggaagtatattagactctatcctgctttcatagctgaggacttgtatccacacacagagactatgctaagcaataccagtcaggtagatcttgacaacattgatttgaaggagtttccaagggttgaaaacctggaattcattgactgcatattggaggagggcgacctgctttacatccctccaaaatggtggcactacgtcagatctctctccaccagtttctcggttagcttttggtggcgtgcagcagttcaaccttcaggaggctcatagcgtcaatttcatgtctcccatattatcaaaaccagattgcagaaaaccaaagtaacctgacaggaccctttgtttcaggtgactccgcttttgaatggatgtacacacgtcatcaccaatgtccattgttagttttacttttaccacagtgattaaaatgttgaaattgcttatatgccgaccatcatgctatcatgtgattcttgaaagcagaggttgaaggatgtcttcactgctacaatgtcaaattcttgaaattgtaaaggtggacttactagctccgagaatttaatttagatgtattctcgatctgactaaataggtagataaaagtattaatttttataacatcaaatatatattatataagtatgtttcattacgaacctaatggtatttattttgtatgataag

SEQ ID NO: 26930 - DNA, 863 bp, Zea Mays
tttttttattctgtactcactgaatggctttctgattacatttcaggttcatatggcctgtgtaatgcaagggcgtagagttggagtggcatactatgattcagatacacgccaactttttgtgttagaaatctgggaagacagcgttggggaatttcctctgattgatcttgaaaatgaacctttgggattcgtggaaaatgaaaccatatagctgacactttgtgatcctggttttacatcagtgaaatttcagtcaaaagcgagcacaatatacacaagcacaaaaacagaagaagcacttttgtcggctttacaaaggaatgatggtaacggtgaggctcctgttgtgaagctcacgaaaagctcaacattcagctatgagcaagcctggcacatattgatctacttgaaagttgcagctatggatgatggactaagtgcaaaagaaaggatatgctttcttaattccatgatggatcttggaagcgatgttcaagttcgtgctgctggaggtctcctagcaatattagacaatgagagacttcttgacaccattgagcagatggaaggtggagcatccattgcgatcgattctgtggtacagatctcattttatcctctgatggagataaattgaacacactgatgtgttgagatttaattatatcttctgtcatgggctgggcttatggccccagatggcagtatgccagatcagatccgaccttatatactgctgctgccctggccggccgcccgtacccaacagattgcccatgacaactttcagtggcagtctagtttgtaatcaacaaaattatatacataatttatttcctactttcaaggatatagttact

SEQ ID NO: 26931 - DNA, 1937 bp, Zea Mays
tcaggtcagtggtgttgtggtgcaagcgctttggcaaccatgagctctaggatgtcgacatcggcctaccggagctggagaacgtgatgttcctccacgtggttggctgacgctcgctgctcctcttccttcctcttccccatgaccgaccggtgcccacgacaaccttcctccgcacgttgtcgctccgtgtgacgcccacgttctcttgcgtcacgtccactccctgattatgataacataatttctcctgcttgtgttcttgcttaccgacacgcttggcatgggcaactgggtcagaatggaggttctgcaaaatcatatattttcatttttaatcatttgtgttggttggtgtagatgtacttcctgaggcataggatggtagaatttattttttcatctgggaatttgagtattccaaaggagaagatgcttttcaaaacctgaagttagttgctagcttttgattacatatatttccacaactttttacattgtgattagcaactctttttacctaaatattcactgcacctttttatccactcttgagtgtttcccctcttaattaattgctacatgctaggtgtatagtgtatacacagccacacaggtttaattgagtatactcaggcctcttaaggctagctttgttcatttacaccaatccagctctggattagcattgattggaattaaatccatgtcacaatctgttggggacttgttctcaaatactatgagttaagaacaaggcaacacaaaatgttaaaggttaatacccttcgtcattcgaagcattatctcccttaggacataatgatcttcagacgaaggccatgaagaaagtacctccttcatcttcatagtatatgttaatgaaagaagaagcatatgaaatatgaaagataatatgaataatcatataacatcatcaatgtaactttattgtatcatcatggataaacaagaacaatattgaattacatgagtaccttcggcttgacagaaggttaaagtccaagcgtgacgcacgaacgaatataagtcagcgtgaacagtatggaggtactgttcatctatttataggcacagggcgcagcctgtgtaaaattacaatcatgccctttatgtttactattgacttaatgacaatccaacgaggactagatagccttttcccctttaagtcggttcctttctctgccgttgaaccgaagcttccttgcgcgtagcttcgggacttgttcaaccttcgtcccgaccatgctttacatattgtatacagctttattccgagtccgaaggtttctgttcatatattacacttgggaaacattgttagtcatgtttttgaggaccttcataagacgaaggcccccaacagtagcccctcgcagtattaatttgttataacaacgaattcagactgcgacgtgaacgaaggccttgttgggggtatgcttcgtagccgaagatcctaaaggaagaaaacaccttcggcagattctatcagaagcagcgccgaagctatcacctataaagcttcgtcacaatgacagatctcaagacgaaggggtgaaccgacttaaagatgaaatgacttaaagacccatgatgttttgtgtcattattgtagtcgattgtaaagggcataaatgtaattttacataggctgtgtcctgtgcttataaatagatgaacagtacccttgtactattcacgcaatcttgtaacaactggcacattacgctggaattattgctttctgccaagacaaaggtatacatgtacctaaatattatgttttaatatttgggttcatataataaaatatgtgaataatgttatctattttaagtatatctttctataatgtttcatgttttatattttatttcatattgttttacaagtctgatcacgaaggtgtg

SEQ ID NO: 26932 - DNA, 292 bp, Zea Mays
aagaaatcagattaggcgtggaattgtggcggcggcggccgtatcctcccgagctgctccctagacggcggccggtcctctacaggcggctccccagcggctacccagtcggcggtcgggactcccaagacgccgctcgtcttcctccccaggcgccaggcggccgcggctcgtgttcgtccccaggcagccacgcctcctgttcctccccaggcgtcaggcggccgtgtcctccccagccgtcggttcttgacttcatagatggctgacaacatgacaactttggccaaac

SEQ ID NO: 26933 - DNA, 2634 bp, Zea Mays
attttgacattttttatgacaaataagatccttatagctggtgataaaaagggtaacatcacagcctatcctttccctaaaatattggtactgcatgacagtggtctgatgcaacagaagatgcttccatgttgtcgctttaaaggagctcatggcatttctagtgtcacgagtgttcatatagaagactccacttctgatcatattgaaattcacactaccgggggagatggttgcatttgctttttcaagtatggaagaattgcacaaaagattgaattttttggaatgaggcaagtaaaagaactgggcaccattcaatccatctacactaatcttgcatctgagagccaatctagtagtacctacgcaataggtttcacctctgcagattttatcatttgggaccttgagaatgaaacaaagatggctcaagtatcctgtggtggctggcggcgcccttattcttattatcttgggacagtccctgaatatcagaactgctttgcctttgtaaaggatcatgatattcacattcacaggcactgggcaccaactcatgataagaaattactcgctcaagttctccatttgcagtttcatggtagagaagtgcactcgttgtgtttcataaatccagcaagccattcagatcctgagaatagctcagatctgttgatagcaaccgggtgtgaagatggaactgtgcgccttacaggatttttgactggtagttctggaaaatggcattcctcaaagttgctaggggagcatgtaggcgggtcagctgtgcgagctacatgcttcataccagagacctacacagtaacatataattcatgtaactacagttcgaacggtatttctgatggcattgctgttgaaaaagacgagactttcttactcatatctgttggatcaaagcaagtcctcactacttggattttgcaaccgaggaatgcagaaaacagacaagtatattcaagtggcttagatattgactccaagcaaaactccagaaacttggaaaacgttgattcagccatgtcatttcaatggctaactacccacatgccaccaaagcttcctaggaacagactgaaatctggccacataaaacagagggttgaggaaggaaatttttctgttgttcagccaaatatggacgttatggatcacatggaaaatgactggcgttacctttctgttacagcatttcatttgaagcatccggttctcagcaggttgacagtatgttttgttgctgttgcttgctcggatgcaacagttgtgctccgtgctcttctgttaccttctcgattgtggtttgacgttgccttcttggttccacatgcatcaccagttttggtgctgcggcatattatcatcaatgctagccactataaagatgatgctggagacagataccttattgcgagtggatcaacagatggtagcatcactttttggaacctgacagagaccattcatggcttcatgcaactaatatcagagactcaaccacatatgagtattgattatcaaaagcgtcccaggacaggaagagggagtcaaggtggtcgtctccggtggagatcactgtcatacgcttcgaagaagagagatggagatatgtcatcctctgacggaagcaacccgggtagcctaaacactgctgaaaattcatctgaagcttctggtgtggaaaacactcagattgtagtgcatgaagcaagtgacagctcaaaaactgagatgccttcaagtacccagtcatgtgatatacctgaattgagaccaatgcactcgttatccggtgttcaccagtcaggcgttaattgcctccacatatcattctcaacacctgacaagtcatactgcattataagtggtggagatgatcaatctgttcagcgcttcaacttcagagtaatatcttcggaggattgcttaacaaccccagcaaggctaaattcgcatgacaatgacacacttaaaattctatatcaacataaggtagcatcagctcatagtgcagcagttaaaggaatctggacagacggcacttggtcgttctctactggccttgatcagagagtaagatgctggaagatgggattagccggccaattcacggaatactcccatgctatcattagcgtgcccgagcctgaaactctagatgttttccatgaccgggcaaagaggaagtaccacattgctgttgctggaaggggtatgcaaatggtcgagttctcaccacctgaagatgattgactacaatgattgcaacccctgctatggatgtcacatggatgttgattttgctcggcttgcgtggatcatgtagttctatactgagacggttttttttaaaaaaaaaatggttaaggatgtaacaaacagagaatttgatgtgttatcaggctatgacaaacagatcctacatatacacatataaaacactgttttgcatttgcaatgtataatgtactatttacagagtggagtttcaaatgagggattgagatgagtaagctgctagagatagtcttagaaacgtttggtgcgcaggggagcactgtagcagggaagtgtggcctgacgatacgtaaactgttgagatcatcgttg

SEQ ID NO: 26934 - DNA, 4358 bp, Zea Mays
aggtttgttgctttatttcctgacttagagcaatttcttgacccttatgcagagctggtccacatggattcaagattcagggaatgttggttcctcctgcttaggcaattcgggctgcaagttttggcaccgcaatcatctaatataaatttcatggaatggtggcatgaagcaaatgaagctattcagggtcccttcagagatggcctaaactctcttattgtgctaggtgcttgggccttatggaatcatagaaaaacacatgcatctttgatggttttgctccggaagttgtcacaatttctggatccgataggtggtaaatttctgcattttaggcattactctgataattcaaagtctccttttctgtatcggtgcagactagaagggactgtaagtgaatatgaggcccttttgctaacagaaagacaacaaaatgaagcagctaatgctgcagttgctgaatctcaagcaagaagtgaagcattggtaagcaagctcgaagatgctgtgaaacaaaatgatctcctccatgaagctgctcaaagatttgaagaagctacaaaaaatttggaatcttcactaacatttgagaagcaacggcatcaggcaaatttgatagaattagatgaagcgcgagaaaagattgaagaacttcaaagagaagttggggacactgatgaaaaatccaccctgcttcagactagtatacaaagccttgaagaaaggttaggagagaaggatgctctattgacaacagaaaggctagaaagtgaagcaactaagaaatcgctcaatgaatctgaggatagaaacaaggacttactaatgaaaattgaagttgctgagaaagacattgctcacttccaagaaactgtccaaagaaatgaagaaaatatggcagcactggaaacttcgttgagatctgaaaggcagcaaaaggatgcaatcatgaaacaactagctgaatctcagggtgaaataggagagctgcaaaggaagcttgaagatgctgatgccagaaatgggcttcttcaagattctttgcagagactcgaagaaagtacagcagataaagattctttattggctacagaaagacatgaaaacagtgaaaccaagaaggaattagctggttctcagaaaaagattgcggaattgctaactgaagtgcaagataccggtgcatatattgcagaacttgagggctcggttaggagactcgaaggaaacttgacagtaactgaagcttcattgctaactgaaaaggaacagaatgcttccaccttaaaattacttacagaagcacaattgagaatcgaagaattaataaaaaagcttgaaggttcaaatagaaaatctgatagtcttctggatacaataacaagacttgaacaagatgtctctgccaaagaggtcttattgcttacagaaaagcaggcacacgaggcaacaaggaagactctcactgaagttcaggaaaaaagtgaagaacttctgaagaaaattcatgataatgataaacatattcttcagcttcagtttactatacagaggcttgaggaaaccacagttgcaaatgagaatttgctgttgagggagagggagcagaatgacacaacaacaaaagcgcacaatgaaagtcaagaaaaatatgaagaattactaaagaaatttattgatgttgacaggaaaatcgaccttcttcaaggtaccatagaaaggcttggagaaaatacaacagcaaaggattctctgttgctatcagagagacatgaaaaggctgctattaagaaagcacttactgaggctgaagagaaaaatgaagagttactgatgaaagttgaagatgctaatgaaaaaataggacaccttcaaactaagataaatatgcttgaagataatgtagccgcaaaagatgtttctttagaagctgcaatcaaggaaaatgacgcaaccaggaaatctcttactgaagctcaagagagaaatggtgaattactcaagaaaatcagtgacagtgactacaggatccatttacttcaagacacggtacaaaagcttcaagtagatgcaatatcaaggttgtcgtcttttgtaatggaaaaacaagaaagtgatattgcaaagagagccgttactgaagctcatgaaagaaatgaagatttactaaagagaaatgaggacctcctcaagaggaatgatgatttgattaagaaaattgaagactctagtaaaattgtcactcaacttcaggaagctctacaaagacttgaaggaaaagcatccaacttagaggttgagaaccaagttcttcgtcaacatgcaacttcaactccaccgtctactgctaaatctccagcttcacgctcaaagatctcaaggatccatagaagtccagagaatggccatattttgaatggtgacattaggcaaactgaaatgaagccctcaactggcacatcagcagcaattacctcagtagctaatgttcctgacttgggcgaccaaaaggagtttgaacatggagaaaaactgcaaagaataccaaaacagaaatatcagccttcccataaccagcagccccaagacgatcagcagtggctagtcacttgtatttcacaatatcttggattttctgggagcaaacctgttgcagctctccttatataccaatgtcttctccattggaaatcatttgaagccatgaagacgggtgtctttgatagcattttgcatgctataaactcagccacagaggttcaaaatgacatgagaacattggcgtattggttgtccaacttatctacattaacagttttccttcaacggtcattcaaaactactaggaccacaatctcaactccacaaaggagaagattttcgtccgagaggatgtttggaaatcaaacttcaaatgctgggcttgcttatctcagtggtcaatcagttggatctgctggattgctccaagttgaagcaaagtatcctgctttgctattcaaacagcagctcgtggatttaattgaaaaggtttatggcatgataagtgacagcgtgaagaaggaactaaaccctttgcttgaattgtgtatacaggatccacaaacttctcagtcaagtattgcaaaaggtaatcttaatggcatgggtcaacagaaccaactcacacattggctgggcatagtgaaaatcctcactagctacttggatgtactaagggaaaatcacgttccctcaattctggtgcataaacttttcactcaaatgttctcacttattgatgttcaattatttaaccgattacttttgcggcgtgagtgctgttcttttagtaacggggaatatatcagagctggactagctgaactaaaacattggtccgacaatgctacaagagagtttgcaggttcagcgtgggaggcattgaggcatattagacaagctgttgatttcctggtgatttctcttaagccaatgaggacattaagagagatacgcactgatgtgtgccctgccctcagtatacaacagctagagcgaatagttagtatgtactgggatgatgtgaatggtacaaacactatttcagcagagtttacatcaagcttgaaatctgccatacgtgatgaatccaatatggccacaaatttctctatactgctagatgatgattccagtatacctttttcacttgatgatattacaaagacattgccggtcattgagctggctgatgacgactttctgccatttgtccatgaaaacccaagctttgcgtttttattgcaaagaggggagtagtcttttttttttgtcaccattgtgacttcacctacctgtggataagtcaggattcctgctaggatgtacagtacgcgtgattctttttgtaccaggtagcaaggcatcaaagattagatgctaggtgagcttataggcttctggtttctattgatttgtttgttggttgtatatttgtattcaggttttccttgccattttttctacttgtagccgttttttgggcttgtatactaggtggtaagggcagaagaccctgccctgtaagcatagttacacaaggtcttgctgtaggtatggaagctgtacatgtgttgtaacggattataaaagggggaaagtagtgcgtagtgatggctttgtggttggtgtgttgcttacctttgatcaatgatcatgtattggttcgtcatatattgtttattgtactgcacaccattccattgtagataacatacacgctcaagacttgttctgggatgtcaaatgagtaatctgttacggtacagaaatgtcatgcttacttccagatcttctgtaatgaacacaaa

SEQ ID NO: 26935 - DNA, 1996 bp, Zea Mays
ggaatcccaaattcccaattcccaaacccctagtagacccacgtctccggtccccctctcctcgcgccccgccatggcagcctgcggcggcgccggctgcgggccgcagtgctcctcgtcctcctccgcgggcggccaggaggatgctctggtggagagcatgggacgcctttcgaccgcctccgccgccgccgcgtgcggcaagtgcgacggcggcggcgcggccgtcgcggtggccggcggcgtcggcatgtgcgccggctgcttccgggctcacctcttcggcaagttcaagctctccgtcacgagcaacgccatgggtggctctgcagttcatacacgagatgcagtccaaggcgatccagagctgggaggcgagcaactcccaggccctgccggtcttcagcctcggcgtcgcgttcgtcgacgagaggagcgtcatctcagcgagtcttccggggcacgaaatccaagctgcgatagaagatatcaggtccgtcgtgtcgggtctgtcaccgggggataagcgagtgcacatcgcctctctcgaggaggtgttctcgtccgggtcagacgacaaggcggccaggctgaaggaggtggtcggcgtgatcagtgacgagacgggcagggacgactttgttaggcgcctgcgcatgctttcactgcagaaggttgcactggagaacagatacaccaagatcatgctgggaacgtgtgcttccggaatagcatgccatgtgctatctgcaaccgtgaaggggcaaggctacgctttaccagctgatgtccagtatgttgatacgcgatgggaagtacccgtggttcttccacttcatgattgcctggcccaagagcttaacttgctctgtgaaattgatagtttgaagacacagcaacttctcgataggccttgcagtggcatcaatggcttagtttcatcctttgtttcacggctaagggaagagaactcttctcgagagcataccattttaagaactgctcaaaagcttaagccattctcgtttaacaagttctcagcaaacggctaccatgatttcctgccatcgcggcttcgtcccaagtttcagaacattgatgccaacgagtgtactttctctgagattctttgcctaatatgtggaagcccgttcagtgaatcagagctcctgaatttggaaaacacaaagctcaaggctcagaagaaaattgatctttatactgcccattgttgtcaaagttgccatttccagattctcccagcagctacagatatgtatggacatttcttttcgctactaccgaagttttggactgagaaagtggacgctgcatctgccagccatagctcactaagagatcagatagcggactacctgctggatgaagatgatggaaactgactttattctctggtttcgtgacataatttcatggagtcaaatgtttaactcacatggaattcccgaatgcctgtctgtactgacatgttttgtttgttgtactataagacatcgcattctaattgggcctcacacaggcatatgccaaacttatggataacagtgtttcttctttttttgtttctgacaaaaccagtatcactagcatgacactgctactggtattcttcaactcatctgggatctgtatagtggtgaggcaaaccatcactagccagcaagtttccactgattttacagagacagcacgggttggagagctgaacgtttcccacttaaaatgtgatttcatatgaactggtctcatctcctgtgctgtgcgagctattctgccagcaaacattgtaacaagatgaatttatccggtggtttggacaattcgttttctctacaaattctgtacgaactgtggttacactcagttaccctgttgtattcgactcgaagatactttggggatgttgtgcagacaagcgctgcatctttcagcctgttcgttgtttttaattcgtatcggctcctactgtttctat

SEQ ID NO: 26936 - DNA, 2306 bp, Zea Mays
atctaacgaaagagcccccaaaaccttcccagaaaggcgacggagtcaggttcgaatcgaaatcggggtcaccgcggcggcggcggcggcggcgggtctactcatcagagactacagagcagggggtctcacgctccggcggcgggacgatggccatggcgccgtcctcctcttcctccggtggcggcggcggcgacggcgccaacgccgccgacgcgatggctctcgtgcaggggtacacggccgaggagctcgccatcgcgggggagttcctcaccacctggctccccttcctctctgccggcctctgtccctcctgcgcctcctcgctccgcggccgcgtcgactccctgatcacgcgagctgaggaatcgccgccggtcgatcagattgagccgtcagggtgggactcggatccagcggacccgcagaaccttcctttcgagccgagtggttgggattcggatccgcccccacccccgccgccggcgccggcgccggcgccggtggagaaaccgaggatgtcgtgggcggacatggcgcaggaggacgagctcgccgcggcggcggaggatgacgcggcggccgcagcggccgacgagggggaggacggggccgaggcggggaggcccaaggtgccgctcacgagggagcagcgggaacagaggaggctcagtagcttggtgcgcaacaaggagttcaggtgctacgagagagttcgtggccagctcgtcaacatcctcgctggccttgagcttcatgccggcgtgttcagcgcagctgagcagcggcgaattgtccaatgtgtgtatgacctccaggcaagagggcagcgtggggagctcggagagcgcacatatacagaaccccaaaaatggatgcgtggtaaaggccgggtaacaatccaatttggatgctgttacaattacgctacggataagaaaggaaatccaccaggcattatacggaccattgtttctgatccaatgcctgacctctttaagactatgattaagagattggtacgatggcaagttctgcctgcaacttgtgtaccggacagctgcattgtaaatatatatgaacctggagattgcatcccaccacatatagatagccatgattttgttaggccattttgcactgtttctttcctcagcgaatgcaacattctttttggacccaacttgaaagttgctgcccctggagaattcatcggttcaattgcgatccctctccctgtcggatctgtgctagtcctgaatggcaatggtgctgatgtagcaaaacattgtgtcccagcagtccctaccaaaaggatatccattacattcagaaaaatggacccagcaaagcgtccatttggctttgaagatgacccggaactacttaatcttgctcctctagggacagttgtacaagaaactggcatatcatcagatgaaggcaagggcaagctacctgacgtccaaataacaaatatgggcaaagcatccagaggcaagaggtctaaaggaagaacagctgctgggaaatatgggagcggcattcttggagaacagtctcctgggcatgcccaagcccctgcagtggaagtgcagtcactacggaatccgcatggccagcgtcctgtctccgcttcaagtgctgagagggaaaggaattctgctgggaggtcaagggaatcgagacatcaatctagtacgcttgtggtgcactcacaagtggacaatagcaggcagtggccacgtcggtcggcgcaagagaggtggcatagtaatggcatgagtttctctgaagatggtgtgggatccgcggaaaggagaccacgggtggagcatagacagatttcattgataaaccaaactataagcgacgacatggattccctgtcgctctcaggccgtgaatcaggcgaccagcctcgtgctagtgtgcggaccgtgtataacaagcccagggaggaccagattaagcctagatgattgagctcttgggttgctcgtgtctgcatactttcatgcgaagacccgatgacatcaaaaatgatatttactataaactgtattgtatattttcattgggtttcggtgtcatgaaagcaccaaaaagttaagcgtagaattcctacgtgtactgaatgaacttaattgagacgaaatcagttgcaatcgggcgcctgttctgtagataaaatctcatgtaattttgactgatgcattggtgatctggcttacaattcatttgcaatttgatgcaaatcctagctggactgtgttaccaactatatacaatgggattggcga

SEQ ID NO: 26937 - DNA, 246 bp, Zea Mays
caagagccacctctccagcagcctccccatggcgagcactctacggtgcctgggctccttcgccgtacgctggagtccctgcgcgccggccgtcgaactctctggccatgggtaggtcggcactagcgcctggtatgctcgacaccgtccaagcaagtgtgggattattgccgccaggcttaatctccaggagcgggcgccggttcggcctcgacaaccggtccagtggaaaagggagctctaagc

SEQ ID NO: 26938 - DNA, 1457 bp, Zea Mays
ttcgatatccaacttttggagacccattctcgtttgctgcacgaattaaccttacgtttcttgtcatggagctcggggcttgctcaatctgagcataggttggagctcctcgcgaattgagtactcattggcagtaatggaaccacagatcaggttgagaagattgtcaaaaccctgaatgaaggaaatgttccctcttcagatgttgttgaggtcgttgtcagtcctccttatgtgttcctcccggtggtcaagagccagctgcgccaagagttccaagttgctgctcagaactgctgggtgaagaagggaggtgcattcaccggtgaaattagtgctgagatgctcgtcaaccttggcgttccctgggtcattcttggacactctgaaaggagagctctgctgggagaatcaaatgagtttgttggagacaaggttgcttttgctctgtctcagggactaaaggtcattgcatgtgttggtgagacccttgaggagagggaggctggttcaaccatggatgttgttgctgcacaaacaaaagcaattgctgagaagatcaaggactggagcaacgttgttcttgcctatgaaccagtctgggctattggaactggcaaagtcgccaccccagctcaggctcaggaagtgcacgcctccctgagggattgggtaaagatcaatgtcagccctgaggtctctgaatctacaaggatcatctatggaggttcagtaactgctgcgaactgcaaagagctggcagcacagcctgatgtcgatggtttccttgtgggcggtgcttctttgaagcccgagttcatcgacatcatcaacgccgccgccgtgtgaagtccgctgaagatgttccaacccttcaccctgttgcggtgatgtgctgaagacagatcagactatttttttgtttaaccgtgcagtgctatgtaagctactaactttgcgctggtgcggatgctgatttccctccccctagctttttgtgaggctactctacagcttgattcagcttgctaataatgtttgcctctggacatagcgatagtggtgtttgtgtagccttttttttgtgtgtgtgaattacgatggatccgtcttcgcccgacgcccttttgtggcactagtctacaacgtctacacaaatttgtgagacattgtttgggcattttagtttgtgagactagtttgggcctttgttgtgcccacagccccacattggtcgaatgctgccaagattgtactgatcgttgatgccctgtacggattaacctggtctccgaatgcaatcgttgcacggaggcaggcagccaattattgtacgatatgcgatatcctcagccataggacgctaggatccctgccaagcactcgtatttgcactatggccgcgattatttggggttcggcctattcggttctatactaaggtgttaaaaatgcca

SEQ ID NO: 26939 - DNA, 2508 bp, Zea Mays
cgcggtctgctagatacagtgacagaaacgatccgcaacgcaggcaggcccgccgcgcagcccaggatccatccatccacctcacaccgcgtcgtcgtccagctcacactccccggccgcgcccccgctgctcctcgccgcggggtcacgcgcgcaggcaggcgagcgaccagtaactgacgtctctccttcctcccccccctgctccggcccctctacaaatccccgattaaaccctagacttccctccccacccaaatgcgcgccccctcctaggcggcgcccctcgaattcggcaccggctccgccgaagggtgcgtataatgagtgcgggtttcgacaagcagatattggctcagaagctttcgaagcttaatagctcacagcagaccatagagactttatcacattggtgtgtctttcatcatcgttgctgccaacaagttgtagaaacatgggattctgagttccatgcagctcctgtagagaggagggtatctttgctgtaccttgcgaatgatattatgcagaatagcagaaaagaaggtaatggatatatagctgaattcatgagggtcatccctgctgccttgaatggagtgttgactgtaagagatgattttgggcggaatgtcccaaaaagactgattgacatatgggaagaccgtaaaatatttgatacccaggcacaaagcctgaaagatgattttttcaggaggttaaaggacattagaaaccagttgaaaaatacaggcagtgagcagctggagaaggttgtctctagctacaaacatgtcctgaatgctcctatggatgaggatactctgatgcgaaaatgccaagcagctcttatcaattttgatgaactcaataaaacatatggaaataactccattttaggtagtagcaatcgttcgggctttatgcaggagctgcaggaacaacatagcattctcagaaactccatcgaacaacttaaagtgtcagaatcactcagggccaccctgatttttcatttgaaggaagcgttgaatgagcaggagctcaaagtggaacacctcagaagccagcttcaggcagctcagccccgattcaagagagcttctgagctctgcgtggggcttggaagcaacatggaaaggcgtcagccatcaaatcaagggcttaagaggtccagtctctccgatccacttagcactgttgctccagaagctgtgaaatctcttcaaaagggacaatcaagtgcagtgctgtattcacaggagggaaatggtgttgagcacagcgtgacagagacaaagcttgctgcaggtgctgcttcagatgatatacgtggtggtgctttgtcttcacgagtcaatgggggcaacactatgctgaaaatagaagagcacacttctggtaacaagaggcagaagctagaggatgacgcacatatttctcagcctcggtcagagtcaccgccgccgccgccacccccattccctcatcctgatacatttcaaccgcctccgccaccacctgagtatcctcgatcgccagatcctagcccaccaccgccacggacttcactgccaccccatataatccccccaccgccgccgccaccacccgcaatgccactccatatgttctcacatctaccacctccagctggtacatttgtaccttttcctgctggaccacctggcccaatgtattgcacttatccatcttttactcctgttgtcaactttcccatgaccagcccacctggtttccgtaatctaaccccgcctccatcttttcgaggattagctggtacattctatggccctcggttccccaccgcgcccccaccagcagacaggaaataagagtagtaacttacctgcagacttacagtgccagcagctttggcaagtatcataccagtttttttctgtttcaacagaggatacaaactcgtggggatgcgtcaccatgtgttgtagagctcaggaaactgttctattgttgtacattcagccagtcagcgtgcaacagtcaattttctgaactagttctggtcttggtcccagagtagaaagtgtagagcctgtacatgtcggctgctagagggaatttggaattccgagagcccggacccggagcaaatggctgcgtcagtttaatgatcgactgatccagtagttcctggtctaggcggtggagtaaaaactgtagattccgacagcttagggagaagatatggaacccaatagccgaagacagatgttgtagcatgacatgttgtaactcatcacagttgtgctcttcgctagatcatccgagaacacgtagatgttcttgtgatgtcttgagcgtgtaatcctgctgtttggtgtaagatatggcttcagctgctgtcgatggtcgaatctcttgctctgtttttaattacccttttttgctctcggctattctagcgccaataccttttgcgtctactttcgcatgtgttcccaaggaatttagtggtctgtcttg

SEQ ID NO: 26940 - DNA, 7214 bp, Zea Mays
tttcccttccgtttcatccgggcgcatggacctgcgctgcgcggttcggctgcgctcccgtccgaatcgcgccccttccttaacctcagcgttgctttgctcgtgctgctctctgttccgccgctcgccacaaaacccctctcccctcacgctccccacccacctcctccccctcgaggcaatgccgagcgcccttaacctagcctgagttcgagctcaatccccattccgtcatggatcggccgccgcatctcgtcatcgacctcaacgaggccccgccgccgccgtcgagcgacaccccgccggcgcaggccccgtcgccgccgcaggagttggctccgcccgtccaagctcctcctcctcctcctcctccgccgccgccgccgcagtttcctcctctcctgccgccgcagctgcccctgggtgcgcccaaccaacaggtgcggctccagcaggaggccctcgacgtggtgcttcgggtccaccgccccctcgaactgaggaatacaccttttgggcccatagggaacgtgcccgccggcttgctccctggtctggggctgccgctgctccctctgcagccgccggcgcctcaccctggggaggcgggttggggcaacccgccggccccctgctcgtcctgcggtcgccaggagattctggggggaaccttggtctgcgacgcgtgtgacagggggttccatcccaactgcgtccgcgtctggccgcctctcttccccccgcccccgccacccggcccccctggcgcccggcggccccgtgccgccgccaacgaggactggatctgccctgcgtgtgagaggcgtggcgctcgctccacccgctggaagctaggtgcagttgagcttgacatcaacgctgctccgccagaggaccccgtcacagtcatcgccaatgacatccgcagacaaaatatcaccgatggaccccagttgacagttgccaacttgccacattttgaggggggtcacttgcagaatactactctttatgatggaatgcagtttatgccagcatttgatcttgcccagtgttttggcatgagacaaaattttacttccatggatcaagatttaattgctgatggaaacgtaccacaaagatcagctcatttacgcagaagaagagatcttccacaaacatcaacattacccaaggttgcagtgaaccatgagttaggaagtgctggcacgtctatggatccatcattttttaacaatacaatcaaacaaagtcctagtgaaaacagaagttccttaaagcctccaatatttcttatggagaacagtaatcatcagccacatcatcatacagttgcactacctgttcaatatagtgattttttcattaccagcttgggagaaattgacaatcggacaagttaccacaattcataccagatatggccagttgggtttacgtcttactggcatgatagagttactggttcactgtttgagtgtgaagtgcacgatggagggaattttggacctttgtttaagatgagaaggttaccgtgttcagcattccaacttccggatgcatcaaccacagtgtgcctaaatgttgttaggaacgctgatacaatagaaacgaaggaaggtagtgatttgattgaagatactgccaatgatgctaatgataatatttctatgctcttatcagatttctctgagacgaatcaagatttcttatcatgtctaggtaatgatttggagggtaaagaaagtttagggtgcagtaatgtagaaactaaggatatgacagtgccagatgtgctgtcagatcctggctctttcagttgggcaccgaccaatgatgcaaatatgtatgacaaaattggtgacttcagttatgaaggaacatcaccttcctcagtctggaggatgatttcttgtgctatgatggaagcctgtgaaaaaatgtacaaggagcatggccatttggtattattctgcactcacagtagtgaaaaatctccatttgactatgaaagtggacctcagcgcactgatggtcctttcaatctattggctaagttttgctcatcaaatgggcctaaggtaccacagtttatagaaaaggagaatgatgtgcagtcaacttgtgcattacttaaagaatggctgtatccagacagaatcgggtttgatttggaatttgttcaagaatttgtggaatctcttcctaaatccggggcttgttcacactatcagttcttgtgtaacaggactggaattaactcttcactgacgattgcaagtggcacactggtagctgttaataaaaatagtccaatgcatgcgagacatggatctgtagtgagtgggccgcaggatcatgctcagcctagctcttctagcatccgtgagcttcctccaggaaatcctattagccgcaagcttgcaccagaattggctggggatgttttccagatattggagtttcttggacgatttgctgaaatcatcggcctgaaagaacttccttcaattgagcaagtagaagatgaactcattgacccatggccaatgcatccaaataaaaatgacatccacaactacatggatcacaatccaccgatgaattcacctgctaatgtttcttcatcgtactcgaatggcgaatcaggtataacttctattgaagaaatggtatatgtgtctattccagttgagacttcttcagcacgagaagctgctcaaaataagttggctgcccagacacttgggagatgtagtggtttagtgctgcctgagatccacattgcactcttgaaggttcttttcaccgaacttgtatctagagtcgcaatttttgtggatccaagcattgatttaaaagaatcaaaatccagacgaggaagaaaaagggacactgatactctaacaagagagttaaagattgatatgctgactgctaacaatttgacttggccggagttggctagaagatatattttagctgtttcttccatgagtggctgcatggatttatctgatatttctagtcgagaaggagtgaaattgttccgctgcctacaaggtgatggaggtatcctgtgtggagctctacccggggttgttggcatggagaaggatgcatcgctacttgcagaggctgaaacattgatatgcaattcttcagcaaatgaagggaataccgtctttatgatggattacaaggatactgatattgtagattctcctgaggagcctgctagtgacactacgttgccagattgggtgaaatcattggagcctgtgagaaaattgccaactaatgtgggaacaagaataaggaagtgtgtttatgaagctttggagagaaaacctccagaatgggcaaggaaaattttggagcactcaatcagtaaagaggtctacaagggtaatgcatctggaccaaccaagaggcatgccgtacaaaagtaccccagaatacagaaaaaccaagaaaagagagaaatattatctccatctcagaggctgtcctgaaaaagtgccgtattgccctgcggcgtgctatttcctctgatgaatcaaagcagtttgctaatttgcttggaacaactctaacaaattccaatgagaatgaagatgagggcatccttggatttcctggtatggtatcccgccctttggatttccgcacaattgatataaggttggctaagggagcttatcgcggatcttgggaggcttttcttgatgatgtacaagaagtaatttgtaatctgcaaactgcatttgctgatcgacctgaagtgctgataatggttgttgcactgtctgagagttttgagtcattgtataagacagaggtacaagaccttgttgagaaatttgacagatatctaagcaatgaaaatgatagctcagaaatccaccaggagctacaagatgctctcacggcagcaaacaataaactgccgaaagcaccatgggaggatggtgtctgcaaagtctgtggaatcgaccgtgatgacgagagcgttcttctatgtgataattgtgactctgaataccacacttattgcctgaacccaccactggcacgcataccgcttggaaactggtattgtccatcatgtactgcccaaactcatgttgcagtgcaagaacaaaagaagtgccttggggaggaagctcatgtttttattgagaaactcaacaagttagctgttgcgatggatgagaaagagtactgggagctaaccgtagcagagagaatctatttgctaaaatttctatgtgacgaattgcacaacacagctctcatcagagaacatctagatcagtgttcagacaagtcaaatgatctccagcagaaattacgtcacctgaattatgaactgaaagagttaaggtatcgggtagaaataaaaaatccttatgccacacaaagtagatggatgaaaaatgaccaagtaagcaatagttcaggactcgtggagaatcagcagcgtgctatgcccacagcctcagagcatcttgaagaggctgaacaggttaatgttggagttaacctgaacaaccctgctgaaggggttcctgctgcactattggatgtgggtaaaccttgcagtactgacaatggcatatccagcacatctgttattgaaggaaataaatctttggggctttcagaacaaccatcaaagataattactgaccagactgatcgggactctattgccgaaggatccaatagttgcgagaaatcattagttggcaaaagtggtacttgtgatccgaatgtgggagagactcatgctgctacagttatcaatgcaccaaatggagatttacctgatgaaaatgctatgacattgtcccaagataatattgaaacatcgacatctaaactggttgaccatgatgctgatatgaacgaatcaaataatttattggagaggatttcacagttgcatggttcaattagcacagtagagtcacagcttagtatggcatccttgagaggagagtgcctgggtagggattctgttggtcgattgtactgggttacaggaagaccttgtaagcgtcctcgtcttgttgcagatggaagcatgatgatacccaaggacagagacattagcatggttacaagccattctcagtcaacattcgatagaggttggaattcggcatcacttgttatttatgaatctgatgaagaaatgaagtgtcttgttgactggctaagggacattgatccaagggagaaggatctgaaagactctatcttgcactggcaaaagtctatttatcgccaggctagtttccccatcactgatcctccagtgtccaagttttcaaagagtgagccacttatggagcttccaaacaccaatgcttttatagttttggagcaaaagtatggtctgcaaacggatcaggacactagtgagctatccaaaaggagaggaacgaagtcaaggtcgggttctgaagaaagagtatatcgctgcgactgtttagagcctatatggccttctcgacaccattgcttaaattgtcatgaaacttatctcacattgatggaatatgaagggcataatggtggaaaatgcaccagcagtaacgactgtcctaatgaaagtaaagaaattgatgagccgaaactgaagggcagcaagtctgatataaaggaaaaagatcctgtagttcataattgttccgttgaaccatctaacagtggaaaattggagtcatgcccttatgactttgaagaaatttgtagaaaatttaccacaaatgattcaatcaaggagacggtgaaggagattgggctgcttggctcaaatggaattccatcttgtgtaccttcacctgcatatttccttgacccgccagttctgctaaatgaaagtaaaagaaatgacgataaaccaaatgattggacttcctcattgcaggaatgccaagctgtgtctgccaaaatgtcagggcaagagggatctcaagttggccaagatttttctggcaatgcaggtgatgaggagttgccaaaatctaagaagcctgtcagggatagtacttcagccaaggaagcaccttcaacagacatatccacaagattgctaactgttaatgggggattggttccagagtcatcactgatgcctgtaataggcaggaattttcatatcctgaagcagctaaagattaacttgcttgacatagaagcagctttgcctgaggaagcattcagagcctcaaagtctcagcaaataagaagacgttcatggcgtgcttttgtgaaggatgcagaattaatatcatatgtggtattggcaatcaatttcttgcagagcatgataaaagccgagtttctgaagaaagattggtggtactggtcctccttcactgcagctatcaagacaacaactgtatcatcgcttgcgctcaggatttacaccctcgacgactgcatcatgtacacaaaggatccagctccaaacctgcagccagctgacaatgcaaggtctggaaacaaggggaagaggaagaaagacatagattcatgagcatcgtaaccacaatgctcctggcttcccctgtagattctatctatctgcatttagaggcttctcagttctctggcagcataacaacgcggtcaggtagattggagatatagatggtagtggtcaggtagattggagatatagatggtagtgatacaggtcgcaacctatgtgtgacctctttcttactgtacattccagtgtcacagcaagggtgcagccatgatttgcccgtttcagtcttgtcctacttactggcctgccattgcgcgatatctgctgttgctaaggctcaatctctgtaaattctactcgagggatggcaccgggcaagtgctggtgtttaatctgttgcccgatgtgttgatctgttctaggggattagaggaggaatgctaggtcggtaggatttaccccatttctaccctgcttcattttattttagtggtggcagtgggtagtcgtagttttttcttttcttttcttttcagagctgggattgtttgatggatgtcccctgcggcatctgactgctttagggaatttgatacatgacgagtgtaatattttttttgacatagaagttgtaactaaaccgaaactaataatgatgaatgaaaatgaatccctgttcctttccccgtttcttcatgttggctgg

SEQ ID NO: 26941 - DNA, 1037 bp, Zea Mays
gttccaaaaagctcgcttccgttggcttcactcccaactctttactcgctcactcccccgcgccactgatctctccttccgggaccctaattccgcaggaggccgcgccgggggagtgacgccgatgcagcgccgggtgggcatggcggacggcgaggctaggtgtcggacgctcggcgccgtcatcaaggagaaggatgaggagttcgcgctcttcctcgagatgcgccgacgcgagaaggagcgcggcgctgcggccgccgcggcggaccagcttctgctctccggggacgtcgcggcggagaacgggatgctgctcctcgacccgccgccacccgctgagcccaaaccggcggcgtacaaggtggctggcggcggatttaggagggcgcctgggggagtggacgacttcctcaatgcagacgccagcgacaagaacgattacgactggcttctgacaccaccaggaactccattattctcatctctaaaagttgagccaaaaaggtccctggtgagtcaagctggaacgccaaaggctcgtccaactgccttgaaatcaaggggagaaggtgatgatggtgacatcgagtctgtggaatttccaaagtgtgtggtggcaagtaattgcacatggtcacatactcacattgaggagatggaggagagggagagataggacccgggagaggagacatgagaggcacatggtcattatattttgttggctgtaactgtaagcctgtaattgttggttgcaacttgtaagttgcaactgttgctaacctgacatattttgttggctccctgcaactttgtcctgaactcctgaacctgaagtcctgatctataattgttggctgcatcactgcatgtatttggttctagaactgaaactctgaaagtatggaattatggattatggaatggaatggaactattatgaacataagtctataattggtggctgcatgtatttcaatatacaattattttttgtttgtttaagtgaatgagatggctgctattttgtaaat

SEQ ID NO: 26942 - DNA, 1233 bp, Zea Mays
cacggttacaaggtgattttgccagtcttccatttgaacgtgtttttgaaatctatttggtctatttttcttcaaaaaaaaatctatttggtctatctcaattccttatctgcttattagtgagaatgcctataaatgcaatcatgagccctagtgatgtcgtttgtagtgaaaagcttcactgggatgtatgtcctaagataaaccaagaccaaagtaagcatgatgcgaccatactgaaggttttcagggttcaggctgttcttttggtacttggagggtacgaggttccgcctggtttggtaaacatggctgtttcttcagcaaatgatgagaagaatacaactgtggctgctagaagggttgcttccttaatgagattccgtgagaagagaaaggaaagatgtttcgataaaaggattagatacagtgtgcgcaaggaggttgcccaaaagatgaaacggcgtaaaggccaatttgctgggagatcagattttggcgatggtgcctgttcttctgcagcttgtggctctccagctaacggcgaggatgatcattttcgagaaacccattgccaaaattgtggtatcagctcaaggcttactccagcgatgcgtcggggcccagctggtccgaggtccctctgcaatgcttgtggcttaatgtgggcaaataagggtactctacgaagtcctctaaatgcacccaaaatgactcagcagcttcttgccaatccatgtaacatggtagatactgatgacaaaaactcaaatgttcttcctgtggagcataatcaagccacacccaaaactgactcgatgatgccaaaagaggagcagaagctggacatacgcttgcccaccgaagaagatacgaaggcagtttcatgacaaatgctcaaacatgtatatagatcgagacaggtttctgagtttaggatgacatataaatcagtaaaactaacaaaggcagcacaaaaaaaattacatgcattgtgttgccacatttatctccgtacccgattcatattgtattgctaactgatgcagttcttactccttaccctgtgtcaacctgaccaggtgacttggcaggaactcaaaatgttttcaagaatacgacgcattcttgagaaacgttttgtttattgttgtaaaaaccacttcaatagtaatttgcatcaactttgatgcaatttattttatagaaaaacatgtgatattttggtatttc

SEQ ID NO: 26943 - DNA, 2591 bp, Zea Mays
atctctctctctctctgtctcccaccacctatcttccctccccatgtgggcggcctcgagctctgcttaggtctcacagctgtgctctcgttggttgggtgatccgccccttgtcggctcctttcaactcgagagctccgggacagcgagatctgcgctgtcgccgccttacctttcttacgagctcgcgtgcaggcaggcactgagcagtgagctcccccccgtcttcctcagcctcgtttcccctctcgttgctggatctggctcgcaagatccaatctttcgtgccccctttttccaaagatcctcgcttgggtggttcttcctggagattgctgggaggatgcagcacgaccagaagaagaaggcaccttcagagatggattttttcacagagtatggcgaaggcagcaggtacaagatagaagaggtcataggcaaaggcagctacggcgtggtttgctctgccgtggacactcatactggcgaaaaggtcgctataaagaagataaacgacatcttcgagcatgtgtctgatgcgacgcggatactccgggagatcaagctgcttaggctcctgcggcatccggatattgtggaaataaagcatatcttgctccctccgtcgaggagggagttcagggatatatatgttgtctttgaactcatggagtctgatctgcaccaagttataaaggctaacgatgacttgaccccagagcattaccagtttttcttgtatcaattgcttcgaggattgaaatacatacatacagcttattgcagcaaatgtatttcatcgagatctcaaaccaaaaaatattctggcaaatgctgattgtaagctcaaaatatgtgactttggcttagcaagagtagctttcaatgatactccaaccgccatcttttggacggattatgttgcaactaggtggtaccgagcaccagagttgtgtggatctttcttctccaagtatacaccggcgatagatatatggagtattggctgtatatttgcagaattgttaactggaaaacctcttttcccggggaaaaatgtggtacatcaacttgatataattacagatctccttggaacaccttctcccgaagcaatatcaaggattcgtaatgaaaaggccaggcgctacttgagcagtatgaggcgaaaaaagcctataccgtttacgcaaaagttcccaaatgcagatccacttgcactatgtttgttagagcgaatgctcgcttttgagccaaaagacaggccaagtgctgaagaggctcttgctgatccttatttcaagaatatagccagtgtggatagagagccttctgcacaggctgtcacaaagcttgaatttgaattcgagaggcggagagttacaaaggaagacataagggagcttatatatagggaaattcttgagtatcatccaaagatgctgagggagtttcttgagggaactgagtcaagtggtttcatgtacccaagtgcagtagatcattttaaaaagcagtttgcataccttgaagaacattatgccaagggatctacaggaactccacctgagaggcaacataattcattgccgcggccgtctgttgtctattccgacaaccgatcacaaaccacagccaacatcaccgaggatctttccaagtgtatgctcagagaaaatacacagaagacacatccatattctgcttctgttgcaagtaaatttccaccacatgttcctcaaggtgatgttgcaaggcctggtaaagcagttggttcggtgatgcagtacagcccatgtccagcgcctgctgccgagcgatatgagcaacgaagaatcgctaggcacccagcagttgccccaaacaatatcccttctggaagctcataccccagaagaagccagacctgcaagagtgagacaggtgatgccgaaagccatatggatgcgaaccaagctcggcagccaaagccatatgcagcgaacaaactacctgctaccgttgatagtcgtggtggtcactggtaggatttctgcggtgcaccagaaagccattccaaaccgtttcttaacatgttatcagtatcgattacttctgctgagtgctacattattctgacaaatccagaaatgtagttctgtacagatttgtgttctttttccggatacctgaataccgaaagactgtacaactgtagtttctgattcctactccttgtcgctattcaatcgctaaaggatctgtccctggtggagaagaaccggcagattcaatgcaatgttcttgactgacgtcatggattttgttcttcaacctggtagctctgaagacgaattgaatagctgctagtttctgctaatcatctacagtcaggtgcagagtgttctgggagctagttctgaatatcactgtcacgctgtaatctgcacgtttctgagctcctaacttctaagcatgccactaccgtatccctttgtaatttaatcagctgtaccatccagtactctgtttacatttgtagaaacgctctgcaaagaagctattatgtgggagtttctttgctattattataaatgttctgttgttataaa

SEQ ID NO: 26944 - DNA, 1978 bp, Zea Mays
acgcgcgggtacggggcgtccttgccatttcccaccctacttgagctaggcggcaggacggacgcggacgggcgggggaggagaacacacgaccgcgacggaatcgcgaggggtaggcgaggcgaggcgaggcggcgaccgagggaggagcagtcgagcagagcgtagggggcgcgagggatggacgcgaacgggtgcggggagaatgacgacgcgcgggcgccgctcctggccgggcctgggcggcggcgcaactccgtcgcgtccatgcgcggggagttcgtgtcgcggttgcccaagaaggtgctcgacgccgtcgaccccgagcgcccgtcgcacgtcgacttctcccgctccaagggcctcctcgaagtatctatatggagtacgacgttctggatctgcctagtggctagtgcctattattcgccacccttttactgaatatcttgaaggatagcagatttttttccttctcctgaatgaaatagaattctgcgctcatagagaaaacaggggagagagagtactatgagaaacaatttgccacattgaggtcctttgaggaagttgactcactagaagaatccaatgaaatcaacgaggatgaggagcttgcggagcaaatccagagtgaatttgctatgaagatatcaaattatgcaaacattgttctcttagcgttgaaggtatacgctacaataaaaagtggatcaattgctatagctgcctcaacactggattcactgcttgatctcatggctggtggtatcctttggttcacacatctgtcaatgaagagcatcaatgtctacaagtaccccattggcaaactgagggtacagcctgtaggcattatcatcttcgctgctgtcatggccactttaggcttccaagtatttattcaggctgttgaaaagctggtagtgaatgaggctccagataaactgaaccaagtgcaattattgtggctatattcaatcatgatctttgcaacaatagtgaaattaggtctgtggctctactgccgaacgtctggtaacaagattgtccgtgcttatgctaaggatcactatttcgatgttgtcacaaatgttgtgggtttggctgctgctgtccttggtgatagattctactggtggattgacccaattggtgcaattgttcttgcagtgtacacgatttcaaactggtctggaacagtgtgggaaaatgcagtatcgctggtaggtgaatcagctcctccagaaatgcttcagaagttgacatatctggctatcagacaccatcctcagattaagcgtgttgacaccgttcgagcatacacctttggggtgctttactttgttgaggttgacattgagcttccagaggacttgccacttaaggaggcacacgccattggagaatctctccaaatcaagattgaggagctacctgaagttgagcgagcattcgttcacctagatttcgaatgtgaccataagccggagcattcaattctcaacaagcttcccagcagccagccttgatccgaacgaatcctgtgtggtagattgtcgtgcagaatctgctgcagttcttgcattggcgtcttgtgctgtatgacaaaactaagagttcaattagttttgtggcggtgagtttaagatcaggcgcatctaagactacgagagatgaaggtgccgaatgcagagatttctcgagtgtggaaccctttgtggttctgttggtatggtcttcgttttgagcgaaattaagcattttgctgttggcatcatggcatgtgattggcggcgatctagctgtgtgctatcgactacggtgatgtttagacatggtttcgagaaagagagtagatccttgatttctttaagcaaatctcagtgcctttttattttagggctagtttgatatcagtttctaagtgatttctattttttttattttttagaaaataaagtaattttacttgaaa

SEQ ID NO: 26945 - DNA, 1267 bp, Zea Mays
aactaacaccaacagtgacaaggaccattatcatagaagatctcagcgacaaaacaatgaagatcactttatgggcagattaggcgataatgttcaatcttcatgacgtgtacgatgcaaatacaaataaaccgattcttgtgctattcgtcgggtgcttaccaaaatttttcaaaggtgtctacctaagtggtggtcctgcctgtagatggtacttcaatccaacaattccagaggcagaaccttatcttaccagccagtctacaaaaagaattgtgttacagcttccccaaaatttacaacatcctccagcgatggaaacgaagccaattgtcgaacataaatccctctatgaacttcttacagttaacccatatgatttcccggaaacaggatttgaatgtactatcacaatagcagaaataccagctgaacacaaatggtggtttccatcttgcacaaaatgcaataaagcaacaatccctcacactacaggttatcactgtgaatcatgcaattgggatggatacaaatttaaatacaagctcaaattcctggcatctgatgaaacagatattgcagaaatgttttgttttgacactgtagcaaggcacatcgttggtaaatcctgtgagattgttttacgaagtgtcactgaacagtctcctatcccacctgatctagcacaaatcatatctctgaaatttacattcagagtcacaattgacaatcaatctcttttccaacaaaccagttgcccaaacgtgttccgcattaattctattgttgctgcacatgggagacaacgttctttaccaatgcaaataggaatttctgatcaacaaggaccatcaacacctcaaaacaaatcaaaaccgatgttattggaagactctccatctacaactttggaaaaattatctactacaactcctacaacttaaggaagcttctatattccgaaactgacaacacgccgaaaacgcactcaatttcttttactcaattatcttttattcattttaagatttatgcaaacaagagtaatatcaatagcccagaaaaagatgatggcgataaggaaaccgcacagaacttcgatatatgcagcttgatacaatacccactaacaaaggaaaaggaccagcagatacaattgaatcgccacctaaaaggttcaaacaagggacgatacgcatcggaaaagaaatggacatcaaatcctccgagaactaaagtttcactcagatcttcgtcgaccttttga

SEQ ID NO: 26946 - DNA, 877 bp, Zea Mays
caattcgcccccttcccgcacaacgcatcccccttcctcctccccgtcgatggtgttgtcttctctctcaccctaggacaagggagacactatcgctcctctgccaacgatgtcgagtgctcccccacacgtacggagttgttccaaagactcctgtacttcccctgcaagcctcggcggtgaccatcatcgatctatggacctcggtgagtggaggtcacggatctactccaccggtgtcgacgaggtttgtttccccgtcctggagaagcgacgacgcaatagatcttcgtgcactgcagagtcgtctcccccaagccgcaaaggaatcactccactccatcctcgttctttgaatcgatctgattgaagaggactatagtctatagatcatatgctcatttcaacatcaagggcaatttgattcaattaagtctaggatgatgattttcagtacctaggatgaagtttcagagctgccacctaatttcaggccagatttattttccagagccgctagatttcagtttcagagctgcacgatgaatccacacttgattctattttctcttgactttcagagctgcaagatttctacagaattggaagactatgctaccaaaaaagctttcctaatttacctaagatgaagttcagtattgtttaggacgagtcatatgtttatgtctttgtgtctccaaaaatatttgtacacgtatcaagtggtgattattttaagtttcgctactctatatattggctattttatttcaatgagaaatggtttgtccattgcaaccgtgtggagtttctcatttttattaatggcaaatgctgatgtatattcatttttgttgaataaatggtttatttcttg

SEQ ID NO: 26947 - DNA, 466 bp, Zea Mays
ccgagctccgacacagccgtcgccctgagcccgtcatccatgctcccttccatccttctccccaccagcacaaccacaccccctctcccccctcgccgcctccccagaccccgacacgtcctccccggccgcaatgaccgctccccgaccgtggtccccgctagcaaacccaagctcgtcggggagaagagcaaggggggcgcagaggcttgcctacctagctcgtcggggccctatggagatccagcaccaccggggctgggcaactccaaggttgtgaaggtgcagagcgaggaggcgtgggatctgttcaccgatcgagcgagcaatgaaggctgggccaggtatcggcgatgccctcggcgacatcgaaatctactccgcggccaccggcgagcccgtcctgttcagagacctgtgggactaggacgagtcctatcatctctttgctctgcgccccggccgg

SEQ ID NO: 26948 - DNA, 771 bp, Zea Mays
atctctggagggactggacaaagtttgagagatcctataatagggtccaccattgatctctgtctaggtccatccaaccgtcgaacgacctttccaccatggacatctcgggaggaggctggcgagtattgtatcaggaggtacaagtgcggagtcaagacaagcattggttgagctttcactagctatagacggaattgaaggaatgagggatgtgatatttgctgatattccaaagctcattccatttattgatctggaggatatgagcctattcagttgcttctacgattttgttttcttcatctgccgtgaaaagggtcaaaagagtgtcactattcagagagctgtagcagcatggaggattgttctaagtggaaggttccgtttgcttgatcgatggtgtaacttcgttgagaagtaccaacgccataacatatccgaggatacttggcagcagctgctagctttcagcaggtgtgtaaatgaagatctggaaggttatgacccacgaggtgcttggcctgttctgattgatgattttgttgagcaaatgcacaggcacgtgcctgtagggataaacaagccaaggttgtgagaacaaagtggtggaagctgaaagagaagtcagaagtcttcatggaaaggaccatcaaggagggcacttgcaagaaagaagatgacactaacaacatgtgggagaagatgacaacctgcatttggaaggtagccttagaggtgtgtggagtaactaaagggagtggaggcaaa

SEQ ID NO: 26949 - DNA, 1511 bp, Zea Mays
gtggactcgataggtattgtgcatctgtgcacgggccgtcgtttgtagagccgatatagagctaaacacttcagaagcagtacatctgaaacaagaagctttcgcaagctggccagctagctccctaccgactagataccgaggagtgacggatcaggatgggaggggtgacctcgagtgtggcggcgaagatggccttcttcccgccgacgccgccgtcgtacgcgctggtggaggacgccggtgcgggggtcaccacgctcagcggccagccgcaccgggagaacgtcgagttgctgcgcttccgcacccgcaaagggaacacgctggcggcgatgtatgactattcaggatatgggcaatcatcaggaaagccgagtgaacacaatacttatgctgacatagaggcagcttacaagtgcctcatagagaaatttggtgccaaggaagaagaaataattctttatggacaatctgttggaagtgggcctactgtagatttggccagtcgtttatctcagctgcgagctgttgtcctgcatagtcctatattgtcagggctgagagttatgtatcctgtgaagcgcacatattggtttgacatctacaagaatattgataaaatccctcaagttacatgtcctgtgctcattatacatggaactgctgatgaagtggtggattggtctcatggtaaacaactttgggaactttgcaaagacaagtatgagcccttatggctcaggggaggaaagcactgtgatttggagctctttccggaatacatccggcacctcaagaattttttccactcactagagaaatcgccatcccataggcaagcatggagggagaatgtggaccggattgaaccctcgcggaagagcactgatttctttgaaccctcgcgaaagagcacagaccaaaggaaaaaatcaaggtcaactcgagataagacgagaaacactgaacatagatatagcaacgtcgagaaggtagacaagctaaagatatcatttgatcagttcgagaaatccaggagaagtgttgatatcttcgagaggccaaagaggaacattgagcagctggattgtggccggaagagtgtcgacagattggacaggatctgggctagttaattcctttctttcacatgatatacaggttgggcttcggttgttttgggggattttacaggtgtggcgttaagagttgattcaccgacactaaaggagccaagcgtcgttgacgaggcttcgtgtagatgtgatggcttgtgtggtgggagaagtgtatgttgttggtcttcaaaaaaattgttatctggtcttaaactaaatgacactggggaggagtccatggcagcattgtgtataatctaatgctttggatcaacgatgtttttttcttctatttcattgaatcgaacttttccttccatggatattggctgtgtatggattttacggaccgtgaagttaaaagaaaggtgaattagataacttacaata

SEQ ID NO: 26950 - DNA, 643 bp, Zea Mays
cagggtgtgaccggaatgtttctagtggtcgagccgtgagattcacgctgtaaaaatctgaagcgtcgtagttatccatggagacctcccctgcctgcatgtttcctgcctgtgcgacaccgaccaatgtttttcaatgagccatagcctgggttgtgcgtggagccttggcgtggaggccgcgtgtccaacccatgcagctgtcgaccgaaacacgaataacaatcacgtgtgaacatgctcgacgtgctcatgtttctttgtttccttgatactgccttgcttccctgctcggtggagtgctctggcgccttgctgttgcttgtagagttcgacgagagttctccgtgtccatgctctcgcgtctgcgtggaactgcgttacctcgttcaactcgcctgaggccggggctgttgccgttctctctgagcaggtgaccacgccggccgtagctccgcctcaccgtggccagcgtatcggaagcgtcacgacgccgctgccggcgcgcgcgaagagagcgcgggtgcgcgagtctagagctttgggccggctggcaccaattttctctcgtgctggaccaactgggccgatttcagccctagctctgtatatgagtgaagatttaagataaagtggttgctga

SEQ ID NO: 26951 - DNA, 2320 bp, Zea Mays
ataaagcccatcaaggataatgctggtgatttctgagccagccaggagcttgacagtcacagggatggagcagtacgaggtgctggagcagattgggaagggttcgttcggctcggcgctcctggtgaggcacaaggctgagaggaaaaggtatgtcttgaagaagatccgcctcgcacgccagaccgaccggtgccgccgatcagcacaccaggagatggagctcatcgcaaaagtaaggaatccttacattgtggaatacaaagatgcttgggtggagaagggttgctacgtgtgtattgtcattggttactgcgagggaggggacatgtcagaggccattaagaaggctaacagtaaccatttctcagaagagaaactttgtgtgtggcttgtgcagctcctgacggcacttgattacttgcatgccaatcatatccttcatcgtgatgttaagtgctcaaacatatttctcacaaaggatcaaaacataaggcttggtgattttggtcttgctaaagtcttaacttctgatgatttagcttgttcagttgtgggaactccaagttacatgtgccctgaacttcttgctgacattccatatggttccaagtctgacatatggtccctcggctgctgcatctatgagatggctgctttcaagcctccattcaaagcatttgatatgcaagcactgataaataagattaacaagtctgctgtacctcctctaccaacgatgtactctggtgcatttaggggactcgtcaaaagcatgctgcgcaaaagtccagatcatagaccaagagctgcagaactgcttaagcatccacaccttcagccatacgtgtttgaactccaattgaaatccactcctcgcaatttgttctctgctaagcttcctaccagatacgtcacaaataaggctgcggtttctgatgccgaagacaattgtccaccaaaatacagcaagagccattcatttaaattggacaggcatggtcgtcctggttctacaactcggaaagactgtccagaactaagtgaacaaatggagggattgtcagtccaagtcaccaagaatgttaatgatgaactgatacatgagaagtatccaaaagttacaacgtctcctgcacctactccgagaagagcttcatcgacaccaagacgacgactagaagcttcaaagacatttcatgctagaacagcacataaggagcaatctcaaaggtcaaggtcttcagcaaaccaagcgagtcaagcacggagagaatcactccccatgcgtatgatcaaaactcctgataagaggcaggccactgacattctcactagattgaaatctcctgacgtttcagtaaactctcctcgaatagacagaattgctgaattcccactggcatcctttgaaaccccattacatcgcatcacaaagctcacatcgccatctatcattgaccaatatattaccaaggacaagtgcactttccaagtgctccgaagcgatagcgaaaactacactgactctcctgacgtcgaccttcttggttctgacaattcacctaggagttcatcgaatttgaggcagaggaggtttgacacgaggtcttaccagcagagagctgaggctctagagggattgcttgagttcagtgctcaattgctacagcaggagaggtttgaggagttggggatcttgctgaagccatttggacccggtaaggcatctccaagagagacagccatatggttgtcaaggagtttgaaagaaactggattataaccagcggcctgtaagtgcaacactaaacctgcaatgactttgtatcttcacaagcttcaacctaccctgtacagttacagtattgtgattttttcacttgactggtctggtcttagtggaacactgcaacatgttgacatggttagttcggcaatcatctgctttctgtaaacctgtaataacatgcttgagaatttaccaatcagatgaaaaatagcttagatgcctgtgaatttgtatcttgaaatcatgtaaatcagcaagagttgacatttggagagcccctttctatgacgcagcttgatatcgttcattgtcattgcattttgtacttttcttcaggtcatgaaaacaatgaagtgttcatggtccttcagttttgttcttgatttatatgtatcttctacagaaaactggttcagagctggtgtttagggtccttcaatatatagaaaactggttcagagctgtcccttgctgctctgcacgatccatagataaacaatcaacatttgccaatttgctggtgtcagg

SEQ ID NO: 26952 - DNA, 907 bp, Zea Mays
gttggatcgtaactaacgctagagaagcactccgaagacctgctctccttcgttctgtttgttgtttttcttctcccgtccgcagtccgcttggcgtgcgcgacggctagggcgaccgccgccgccctacgccctacgtccagctgcccatgtcttcttcgggccccttgccggcgggaactcaccagaccaggaatcgtgctggcaaccggcgcaagtctggagatagggctgataaagctaattactcctacaataatgatggagagaagagcaatgttccttcattaaagaaccttcctccaattgttcatcatgaaacattcttcagcaatgttcagaatgactacaatcaaacaggattagtgcctttggagggatgttctgccagtgaggcttcacagcttctcagtgatcgctggactgctgcaatcaacatgtacaatgaccaaacaattgacccctcagctcatcatggggtcacctgaagcttcctcatcagatgaacttcctcgaggagttgcgccgtgcagtggacgctcatacagaatttgcgtcgcctgtcgtcacctggaactaatcgaagctgttcgccaggtctatgtatgatgtatcccatacacggatgatgtgccaaaaggctttcgtctgacctgcagctgcttctggaatctgcatctgtacaattgtaccattgttacccctggccttgtagctgcaaagcagtttgttgtaacaattaaatgaggcgccggatcctcacgccatcgaaagtttgaaacagcttggttgttgtatggtagttccaagacttggtgattataatgtgcgcattttctcgacctggagttttagaatatgtagaaggtaatgcttattgaaaacctcagcttttaacttcaacggt

SEQ ID NO: 26953 - DNA, 5179 bp, Zea Mays
atggggagaatggcggcggtaggcgcggcgggagagagcgctgcccacacagggggggtgggaggtggctggctcaaggttgtccatgtggctgctattgcagagcgtgaagctggttggttgctattagcttctcttctagcatccatgccaaaagaggagctggaagaccaggtgtttgatgttcttttgctatgggcgggtccttttactggaaatcctgaatcttaccttcgtcatatacaggattgggcatcagaattgcgggttctgtcagttgcagttgaggcgcttactgccttcataagaagttttgtttatccatctatcacaactactgattgtggaatcttgcttaatcctgtacttgcctaccttggcggagctctatccctcatatcttcgttgagatctaaacaagtgcccaatgtaaggtctgcgctggacctactcacaactagaacattgatggcttattggtccctttcgaatccagtggtatataaaactgagcaccagcagatacttcagctatgctcaagtccgttcagtgatccttctggatgggaagaaagctcatgcttgaagtttttgttggataagagagatgcttcactgggcccatggatacctggaagggattcatttgaggatgaattacgtgcttttgatggtggtgctgatgggtttctaccgtgtgtgtgggatgatgaaatcagcaacttccctcagccagagtcaattcggaaaatgctcgtcaaccagatgcttctctgttatggttccatatttgcatgtcaggaaaacactgtcaagataagcctcttgaacaatcttgaccagtgcctgaagtctgggaagaagtacctgtggtttaagtttctcattacaaatgcatgtgttgctctattgtcagggttaaaggaattcctcgctttacgtggtgctcaatcattgccaattgatatattaagtatgattcagtccattttcaaggccattttagtagagcctgaaatttctacagcacagcggcgagcagcgtgcgagggtctcggtttattagcacgagctgggaatgatatctttacagcaaggatggctcgctctcttctcggagagctggtaacaacaacagatctgagctatacaacttctgttgcattttcattgggttgcatccatcgaagtgctggaggaatggcattatctactctggttaccccaactgtgagctcactatctcatttgagtaaaagctctaatttcaatctgcagttgtggtcactgcatgctcttcttttaacaattgaagctgctggcttgtcttatgtctcgcaagttcaggggacacttttccttgctatggagattctcctcttggaagaaaatggatatgttgatcttcgacaaggaattggtcatcttattaatgcaatagttgctgttattggtccagagcttgctcctgatagcacattcttttcacgatgcaagtctgttattgcagagataagttcatcaaatgaaatggctacacttttagaatcggttagattctcccagcagcttgtgctttttgctcctcaagctgttcctgtgcacttgcacgttcaaggtcttatcccaatgctttactcaagacagccaagtcttagatatttagcagtgtcgacactgcaccatctgattgaaagggacccggctgcaatgattgacgagaatattgaagagaatctgttcagtatgcttgatgaggagaccgattcagaaacagcgatgttggttcgtgcaactattattcgcttattgtatacatcatgtccagtatgtccatcacggtggctggcagttttacgaaatattgttcttgctacgtcaattagaagaaacacaggtgaagttctgtcatgttttgggcataatcctcctgatagtacatctgagaatgatgtgtactatggagaagatgaagacaacatgatttccagctcaaagcagcagcaaatccgctgtgctggttctatatccagccagtttcctccaaggaataaacacctcagatatcgtaccagggtttttgctgcagaatgcgttagccatgtaccaattgcagttggagcagaacctgctcattttgacctcttgttggcaaggagcgcaatatctcaaggcacttatttgtcaaatgattggctagtgcttaaactacaggaactggtctcactttcataccagattagtactgggcaatttgaaggaatgcaaccaataggtgtgaagcttttgtgtttgataatggacaagttcggcaaggcagtagatccggaatttcctggccatatcttgctggaacaatttcaggcccaacttgtttctgctgttagaatggctataagcactgcttctggtccacttcttttggaggctggacttgaactcgctacaagggttatgacgagcagcataattggtggggatagactagctcttagtcgcttgttttctctgataacacgcccgttaagtgacatagagggcctactatatccatcttttgctgactgggtagtgtgcaagataaaagttcgccttctaactgcccatgcagcagtcaagtgtaacacctatcaattcttgaggatgagggaaaatgctcctaatgaataccagcaattggcaccttcacttgtaaacagttcaactctattaggaaaatactggattcgagcactcaaggattatgtttctataagttttggtttgcactcaaaaatcaattacaagccattccttgatgggattcagtcattattagtcttgtccaaggtgcagagaactgaattccaatttctttgggggttatctatccttgtgctgttccattcctgccaatcaatgaagaataattctttgaagatcaaccttgactttaaacaagacaaaaactttggggaatttattgttcatggacttgatgacaaaagaccgtgtgatcaggtcttacgcgtgctttcgtccctcacaacagaagtctttttcagcaataattttatttcagtggatatttgccagcaactcctccaggcacttacatatgcagattgttcaagcgctcctatcatccacctattcacccagattatcagattctgccctgacaatttttttgaggttgaagcctttgtcttctctgcaatagagttattgtctcagtatctgggtctgatacttcaatgtagggatgggagttctcagaataattcaagtaacactttgatttctgagttgtctattgcaagcgagacgatggcttatcggatcaaaggagagtatttgtggaagctggtgatgttagtggtatctacttcacaccaatcatttcaacaagtttcaactaatttatgcttctcaaatattatatgcttcctccaaaatatcttccctttcatgaggaaaatttttagagaaagagtcgaatcagatggtgagtgcacaagtcctaaagttgtctttggtgctatggttggcctagtgggatacttctatgtagagtgtgataaaaagatctcattgctcgaaaacaagatttctgattcctacaagctgttgaataagatactacttttttgcttgggagaagccactgctcttgcaaaacttgttcctgagatcatttatcgaagtgaaaatgtaagtaacaatgatgtgctcctttggggcagcttcaggctgtgcgtacaggttattcaaggttcatttcgtagtaccaacatacaggtgcacatgctgggtctgcaagtactgagaagctatgcacagaaggagctaactgaaggttcagaaacaaagttggattcttttatgatgttgcttacggaattgttgggagacttgtttttggtgatggagactacattgaaggaatgttcaaacaaaaaatctgtcagtgtcgttgatgaatgtttgaaacttgttttcctcttccacacactagcacaatcaaagaaataccgacaagatgctacaactcttctgctggaggccttgctgatggttttctctctgtccagtgatactgtttcacaggagcttgctgaagtgaacaccatttccagaaagttgttctctcattttattcagattccgtctgtggctatacagatcaaagacataatgctttctgcaccagctgaaaggagactacagcttcaggacatggtccgagcttcagtcagtcaagggcagataacggtgccagtggctacgagtgcacactcagaacagaatattcaggatagttgcagtaaaaaccctgggtccacatctgaagcttctgattgtgttgcaactcacgggaataatgacaatgaagttgttgatgatgactgggatgacgattgggatgctttccaatctcttcctgcaattgcaaatgatggtgttgattctggagaaatctctcttacaactaggtacaatgaacagatccctcaagaaaatagcagttacggttcttgtaatgcggatattacagctcgtgctatggaagacataacttgtgtggacaaggaacttgaggagccctctgatttgcaattctcaagtactgaacaacagcctaaacatgatttaccagggtcatcccacgaaggttgtgctaaacttgaaagacatccatctgttgattgcaaagagcaattagctgatgatgagacagcagatgaactgcagcagcaggttcatgaagacactgatcatgtaaataaagatagcgaagttctctctgcagaaattcatggggttaaattggatatccttgatgaagatgttgaagatgattccccaatgaattcaaacaatctatcagatatcgcagaggaagagtcctagggttggtacaatgcaacgagggtggaccgcaagcttgtcgagatagtagagaagagctgtccggttcctctgatgctggcataccagattttagtatgtcaggacacgtgatgagcaagagcggaggaaatgagcaaaatgttattttgcctgtatcaatatatattgcacgagataaaaataatataaggttacaaccatgatttttattttgtgccttcctccgcccctccgcttctaaataaatagttacctttgaatgaatttcaagaaaacccaatcaaga

SEQ ID NO: 26954 - DNA, 1400 bp, Zea Mays
ataactgtgccctagtcgtcccaccaactgataagcagaatcgatctcctcccatcacctccatcacaacctctcgacggcagcttcatccccacctcaatcggcggcagcctagggcttcatcccccacccccaattccatgtcatgtggatctgaatcagcccactcccaaatctccaatccactcgccggcttttcctcgtgcccagttcacgacatttgctcggggatctgaccaatgtcgtcttctgctcgtgttcctcgcagccgctcagattggagatcaagtggaaattttctcaatggtcggacagggtcaagttggtggacttgcaccccacataggcatggatgtcgagcctgtactcgaggagtgcctgcatctgggattatcaaacacagtcaatttgtaggagagaggacgccatacatcaaagatgactgaagaagaggaagatgaagaatacctcgaagaggaagaagatgcccttgctggtgcaggggggaacacatttagtttcacaaccttcatgtgagccctttgttgactatttgttactaccttgacatatgctatttccttgctttaataactacctcaagttgacggaagaattacttgttaaatagatgtttttctttgttaccataaaattatttcaacgctatttatgaacctaggtaaattgagtcttgcactggctttgaaagtgaataagtgattcgggtgaggtgcaaactaaaacaatattattaagtatactgattcgggtgaggtgcaaattgaaccaacattatcccataaggccataactgatttttatatttatgttctataactaagatgaccaggaaccctgaaatgaatgctgacctattttgcccaataactactactcggtaaatggcatggtgtgtttgcctttgttgggagtggctatagtaataatctgaccaacatttcctgtagatgaattttggtagtggagtagatctgtgcactgatgtgtggttctgttgttgcaagctcttaacccctccgatcccggtgcgtggcggattagactccgatggggaagtctctggcgaggtggatcaagttcgtgctcttcgggaagaagtcgtcgtccaggtccagctccaccaaggccaataatttatcgataagaatgttgttacgatttcaagtgtggctcaagatatgcatctccagctatggagaaagagctcacgttctctgagagctctctagtgatctcggagcttgtgcttgttagcgcccataacaacgagaccatgcgggaggtggcaaagggtgaaaattctagcatgcaataagtgctagtgactgatgtcagtcaagacttagagaagcaggcagtgtggggctgatacgtcc

SEQ ID NO: 26955 - DNA, 1518 bp, Zea Mays
atggtagtttaatcccctactagtctcggagagtcgctccgaggaatgggagtcgtgccccaccggcggcagcagcaccggtgacgccggcacgcctaaatgcgtcgtcccctcgcctctgcggccctccgcctccgcttcttctcttccacctcccctgcccgccttctctcgccctgcccattccttctatcccgccgtgacgacgacggcggccgcgaggcctcctcgtcgccgctgcccccgctcccgccttctggctcggctttctccccacgcccgctcctcttctctgcatcagctgccgcgggcctcttcagcctccatggcgggtggtggaggcaggctcttcctcctgcagcgtcgcggcccctcggctccgtctctgacgcagctcccgtccggctcaccatctcccgcagttattctctgcgtgtggccaagggcaagaagaaagcacattttgacgatgaacacagctatggttattctaaggaaagatttgtatggtctctcatatctgcagttggaatattttgcttgggttccggtgctacaattgtgcatggagttcaaaatttatggaattctcatcctccagagaatattcactgggctgcattagtgattggtgggtccttcctaattgaaggtgcttcactgcttgttgctataaaggctgttaggaaaggtgcagaagcagagggaatgagtatctgggactatatctggcgtggtcatgatccaacttccgttgctgttatgactgaagatggtgctgctgttacaggccttgctattgctgcagcatctttggtagctgttcaaatgacaggaaatgctatgtatgatccaattggctcaatcattgttggcaatttactggggatggttgctatttttctcattcagaggaataggcatgctttaattggccgggccattgatgatcatgacatgcaacgagtccttgaatttctgaagtctgatccggttgtagatgctctttatgattgcaaaagtgaggtgattgggccaggtttttttagattcaaggctgaaattgatttcaatggagttgttctggtacaaaattatttggaaaggactggacgtgggagttgggcaaaacagttccgggaagctgcaatgtccaaggatgatacggaattgctaagggtcatggccaactacggggaggatgtagttgaagctctgggatatgaagtggatcggctggagtctgagatccaaaagcttgtgcctgggattaaacatgttgacatcgaggcacacaatcccgaaggacttgctcttagagcagaagttttgtagattacctgtgtacattgcatttgattaacactgttgctggtcgctgccagtttgatttgggtccaccaccattcgataagattgtcttccattggcaatgtaagaatcagatggctgttgttgcgtagcgaggcggtttttttatttggaagaagacgtggtcgcgcctgacatggaaggctt

SEQ ID NO: 26956 - DNA, 2325 bp, Zea Mays
caagctcttagtacgtggcttctgtttttttttgtaacgtatgaattgaaaagcctgtttgtcccttgttgttgcatgttcggtggcatgagtggaggcaagtctatataatgcatgatgtgcatgctgtaattggcgagctttcagaatcaggcagcttcattggacatgtgaatcagttactagggtcatgccccattgaagtatttaatcttgtgaaacaaagtatactgcaagctgttgaacctttaaaggaacggttgcctgcaataatcaatgttatgattggaatcatagttaagaagtctaacgaggacttgaagcacctgaaaggaataacagcgacatataggatgacgagtaaacttccagtcaggcattctccatatgtatcagggattttacatccgttgaaggtgtttcttgaaggggaccgaatacgctatctatcagaagatgataaaactaagttgtgtcgtgggtctacagataagattactgcaatttactatgacttggtctctgaagttgtcactgtggcaaggaaaaccgagtcttcgttgcaaagactgcgccaaggtgcacaaaggcgagtaggagctagtacagatgcctcagataacatcatatctgatacagacaagatctgtatgcagctatttcttgatattcaggagtacgcacgaaaccttcgtgcgataggaatagacgcgagagagattgattcctacagagctctatggcagtgtgttgccccaaaagacagacaagagaacattcagttttgatgtaaagaacactgtcagtacatatagagttgtctgcccgtagatctctcaaacatgtaggcgtatctgatgttgtccttttcggtttgaagtacttattatggatgcatacgtagagtagatagagagctggattttggtacacattttattgttaggatggatggtcacctccagatataatccagaactggagaacgtgtaccagtatatgattaaattttcatgtgaaatactaggatactgttgaaaatcgtgtgtcctcaagttgtcacgagcgtgaatcttagctctggctagttgtgaaattgattggtctctactgcagggttccctgcatgtctacatgatgttcatgtgtttgttcttaagccctgaccccattggcattacctcttgttactctcgtgcacaacagaacgtgtaattccagatggtggattactgtttttggttgctaaaattgatagctcgtaataaaataaaataaaaatcccagcgatttcaggattcttgtgagggaggatgttgatttaaggattctattctatggagaaacaaaccgcatgttgcaaaaacagctcaaactactgaacctcagcttctcaaagtcaagttctggcacgtcctgctaccacacagcatcacaacagggagaacacgatgggactacagctcatgtgaaaatgatacgatcggcactggttcatccaaatcttcaacggcacctatcagctgctgaaccagcagaagcatcagcaaccatgcaaggaagcatcagttcctgaaccaactgaagcatgagcaagcctgcaaggaagcagcagaacagtgaattcaacacggtcctataagaaaaggcgtttctttcaccatggtcaaattctagaataaaacaatggatagtcatagctacaatagcactaaaattttactgctaacaaagggtctatcatcagtatactaaacattgttgtgttccagttaagaacacactgctgaagtaagcatggggcaatgaaggctaatgccctgtttgtttggcttccaccgactaaattttagtatctatcacatcaaatgtttgaatgctagttagaagcattaaattacaaaactaattactaaagacgaatatattaaatctaattagttcatgattcgctcacatgatgcttaataaatttgtctagtatttagttgtgtaattagttttataaatacactacttgtaaaaggcattcaaacatccaaaccaaacagccctttataaaaccagcaatcatcggattaagtgattctgcagtgctctgaaaccaatggcagccattcatcaggatgtcaaaaatgcaagaaagataaaattgtataagaaacacctgcaaataaatgctttaggccaagaaaatagtttgaaccagcattatggcaacaagtctggagttgactcactgaagattcgtatttgcggccttggttggagcggctataaccaccacctgcgttgccgctggtgatgacaggagcatcgccggac

SEQ ID NO: 26957 - DNA, 985 bp, Zea Mays
ttggtttcgtttgtgttctcctccttttcccggagccatggctggacctgctgttctcaatgagcgtatcctttcttccatgtcccagaaacatgttgctgctcacccatggcatgatttggagataggaccaggggctcctgaattcttcaattgtgtggttgagattcctagaggcagcaaggttaagtacgagttggacaaggcatctggtctgatcaaggtggaccgtgttctttattcctctgttgtttacccacataactatggcttcattccacgcacactctgtgaggataacgaccccctggatgtcctcatactgatgcaggaacaagttgtccctgggtgtttcctgcgagctcgtgctattgggctcatgcctatgatcgatcagggcgagaaagatgataagattatagcagtctgtgctgatgaccctgaattccgtcactacacggacatcacggacctcccaccgcatcgccttcaagagatccgccgcttttttgaagattataaaaagaatgaaaacaaagaggtcgcagtgaatgagttcctgccagcgaaagatgccatcaacgcaatcaagtactcgatggacctgtatggctcatacgtcatcgaaagcctgaggaagtgatctccagctgcttgattgtggttgtggatgctacaccattttctcaacagctcatccagagtaccgtagtacagacttaacacgaacgaactgtaatcgtgaccaagggatgctattaccttctgctcatgttgaaacaatcagcagtgcctttctttccattatatgccatgtcgaatcaaggcaacttggccctgaaatctttgtggtcaagttaaaccagcactttgacagaacaaggattgctggatgcctggattactgttacataaatgaccattactgaacttcatttcttgctcttatcttttggtgagatgcccagttctcatccgatgcata

SEQ ID NO: 26958 - DNA, 2010 bp, Zea Mays
actaaatattgattgatgagggaagaccggaaggtacttagcgcagatgataatgctaatatgattgagctccactcgcacttgatgaaacctgactattgcagctctggacagggaaaatgtagtgagagcagcaatacagaatcttctgatgatgttgggcaacaggagttggatgaacttttggatgacgatgactatcaattttatgatacaaggcagagtttcagtgattcagcaggactttcttgcttgaacatgaaatgttcaaattctggcaaggatacctttctttatggtgataaatttgtgaaaccaaaagctggtacaggtgacagtgagtgcctgccaccgtttttcaagcgtcgcacgaagttgcctgatccagttgagaaggaaaaaagtgttagtctttggtcaatgatcaaggataatgtcggaagagatcttacacaagtatgtcttccagtttactttaacgaaccattatcatctcttcaaaaatgctttgaggacttggagtattcttatttgttggatcgtgcatatgaatgtggcctaaaggttagtcatcatccaatggtcatggcttgtcattgtgaaggaaaagggtggaaattttggggagacagcaatgtaaagagcaagttctgggggcaaacaatccagctggatcctgttggtgtgttatctgtagaatttgatgatggagaaattttccaatggagtaaggttacaacaacaattaataacgttatcattggtcaaatttattgtaatcactatggaacgatgagtataactgggaacaggggatattcatgcaagctgattttcaaacggcaatctttcgttgagcgcaaccctcggcaggttgaaggattggttaaggacggtgatggttcgacggtggcaagcctaatgggaaagtgggatgagaggatgtactgcagcgcatcagggcagaatgtgattctgttgtgggagaaaaatgaagcttcgactaatcccactcgctataacctctcatcgttcgcaataactctgaacgagttgactccagaactcaaggagagccttccaccaacggattcaagactcagaccagatcagcgacatgtagagaacggggagtatagtaaggccaatgctgagaagctgcgactggagaggaggcaacggatgtcacggaagatgcaggacaatggttggaaaccaagatggttccgaagggatgatgacacattccgctatgtgggaggttactgggaggcacgacagcagcggaaatgggacggatgtcatgatatatttggtgaattcgtgtgactcaacagtgaggctgctcggaccttttatatatatatatatataataataataatgataatgataataataatctctggtctcccatgataatattaatatgtatgtgcagtgtgactgaacagtgaacacatatatctcgcggattgctgttgtctgagttgtttgtgcgtcgttttaggctcggtcgtttcacttaaaactagatcaattttttttcttcttaattgaaatacaaaaaaattgttaccgctattatatacgcataattgattggaattgttgacattattggagcgtgtatgtatgtatgtatgtgtatcttcatgtagtagtatatatgtgtctaatacaacaagtagctagatagtcgaactggacaattgggctgtacactttgtcgggctgccgtggtccgccacccgcgtcttgccggactcgttggtaacgcgcatggactgtatcaatttggtttgtatgttctaccaatttccatcacatattttgctgtgcattcataattacaccgacatacatatacatataccgtcagctctaaatttcgagtgttaagtttcaaatagttggttttattacggtaaaaaatagataggagataaatattttgttcgttcaaataaatcaggaaacgaaatatgcttcttacatcctaaattacaa

SEQ ID NO: 26959 - DNA, 1191 bp, Zea Mays
aatacgggcacaacagtaccacgcgacgtcaaatacgggcacaactcgtgaacgacggcggcgcctagcggcgacatcgtccccctcgactcctcctccatccccgatgcggcgcgccagcctgcagattagcttattacctccatgggtaaaagaaagcggtcgttgtgtcaacaagataaccataatgattctctagccagcaaaataatgagaactagaatcccagatcttcctgaggacatttggtctcatgtacattccctaatgccaatgcgtgatgctggccgtgctgcttgcctatctcgtgcctttttacgttcctggagacgtcatcctaatcttatctttaataaggatacgattggcatgaaaaaaaattcatatggagagaatttccaccacaaaattagccgcattctcaggaatcactctggcattagtttgaaaacattcaagcttgactacagtggcatgtgtgggttcgatggaactatatcttgacagttggcttcaggctgctcttaatccagggattgaagaactcaccctctggttgttccatacaaggagaatatatgaattcccatgctcacttttatctgatggggttcgaaattcacttcggtaccttaaacttcgttgttgtgctctccgtcccacagttgaacttgcccccatgagaagcctaacaagtttacatttgtcctttgtgagcattaaatgggatgggttaaagcgcctcctttccaactcccttgctctggaggaattagagctagtatgttgtgacaagatcgtttgcctcaagataccttctgccctgcagcgtctcaacagccttaatatttttggatgctcggccctcaaagtgctagagagcaaagctccaaatctctctagtctttctcttttacattttggaggcaggctagtcttctcacgtgtgaaaacattgcaaatgaagaaactaatcactgaaagtaccgtctatgatgctcgtaccaggctgccatccactatgcccaatcttgaaactcttgtcataaactcatttgattgggtatgtatgtatgtgtgtgtgtgtgtgtgtgtgtgtatatatatatatatatatatatatatatatatatatatatatatatatatatatatatatatatatatatatactatttaaagatagatgtt

SEQ ID NO: 26960 - DNA, 1166 bp, Zea Mays
tgagcaccaccacagaaagttgcccttgaatatcttgtacccaccggttgtcaacaagagcctctctgacagtcagttttcacttgccgctttgtcacggatgcaaaggccaaagacatgaggtgccagcaccttgatggaactgccattgagccacctacctgtccaaaatttggtgttaaccccgttgcccacctctgtctccactgcataatcaaacaaggcctaagtacaacccttaatcgagatcccaaaatctgcccaggcctcgtactaagagtgatcaaacaaccagggtacatggcctcaagtctggaaagatgctgaaagaatttcgaggtcattcttcatatgtaaattatgccatcttcactactgacggtagccgtgtcattacagcttccagtgattgtactgttaaggtctgggatactaaaacaacagattgcttgcatactttcaagccaccacctcctttgaggggaggagatgcatctgttaattctgtccatttatttccaaaaaatactgatcacattgttgtctgcaataagacttcatcaatattcatcatgactttacaaggacaggttgtgaagagtttctcatcaggtaagcgagaagggggagattttgttgcagcttcagtttcaccaaaaggagaatggatatattgtgttggtgaagacatgaacatgtattgctttagctaccaatctggtaaactggagcatctgatgaaggtgcatgagaaggatgtcataggcattacgcaccatcctcacaggaacttagtagccaccattgctgaggattgtatgatgaagatatggaagccttgactttttttctttttaaaaaaaccttgaaccgatgattaaataggatgtattttgttttgtaatttagataactggtaggcgctacagctatggactcgttggtgcttatgttgccccatgtcttactaccattgtatcctgtactagatttagggacctttcaatggtgtaaacacagcttactacgactcctcgctacaagttcattatggttaatttggttatagcacgctggatgctgattgtgtccgcaggcatatagcagtcgaaaattagcagttactataataattgaagacaacccagtttgcatttcaggtttgc

SEQ ID NO: 26961 - DNA, 2581 bp, Zea Mays
cagcctctgcatattatgcggatcctcttggagatgaagctaggcgggggcagttcaggtttcagtgcaagatccacaaatgatgaattggcattaattccattagaaccctcaacatcatcattttctattgctggagggcctacattttcaaatggtttttcatctgggattggttctagtttttcgcaagataatagctttagtcctttattaagggatggagaagatggttacaatagtctcagcaatggaactaaagatgacactcacggattgagtggattacataacttgggtaatacatgcttcatgaatagtgccatacaatccttggttcatacacctccattggtacagtactttttggaggactatacttgtgaaataaacaaggaaaatccactaggcctccagggggaacttgcaatagcatttggagagctacttagaaaactttggtcgtctggtcgaacttctattgctccacgggcatttaaatcgaaactttctcgatttgccccccagttcagtggatataatcagcatgattctcaggagctacttgcgtttctgttggatggtctgcatgaagatctgaaccgtgtaaaagagaaaccatatattgaggcaaaagatgcagatggccgcccagatgatgaatttgctgaagaatgctggaattaccataaagctcgaaatgactccataattgttgataagtttcaaggtcaatacaagtccacattggtgtgcccagtttgtaacaaaatctctgttacctttgatccatttatgtatttgtcgctaccattgccatcaacagtttactcggatgattactgtaactgtattcagtggtacgggagatgttcttccaatgccttacactgtgactgtacagaaaaatggaaactgccgtgatcttactaaagcccttgctgatgtctgctgcttaaaaaattctgagacattgttgcttgcagaggtatacgaacgtcggatctaccgctacctaacaaatccaattgagggacttcatatcataaaagatgaagatatacttgttgcatacaggctccctgttggtcatgaaaaacttttgaggttggagattctgcattcgagggcagacagagcaaaagcacatagccctgatgtgtctgctgtcaagttaaatggcaatgggccaagtttggacggtattgtcctgaccgataatggcaccaccagtgaggagggtctctctacatcaagatcaagggaggacgataatgcagctgacaatgagcttttaccgtttcagctttcattgactgatgaaaaaggtagtacaagaaatgctatagacatggattctaatcgtgttctaggactagttattagggttttgatggattggggtgagaaagagcatgggatgtacaatattgatcacatggatgtacttcctgaagtcttcaagcctggttttatgtcaaagaagacccgtcaagaagcagtcaatttattttcatgcttggatgcttttctgaaggaggagcctctagggccagatgatatgtggtactgtcctgggtgcaaggaacacaggcaagctagcaagaaactggacttgtggaggttgcctgagatattggtagttcatttgaaaaggttctcgtacagccggtatatgaagaataagcttgatacatttgtgaactttccgatccatgacctcaatatgagcaagtatgtgaagcctacatcaagaggtgaccagcaccccgtgtatgaactctatgcagtgataaatcattatggcggtctcggtggtggacactactctgcatatgcgaagctagttgaagaggacaattggtatcattttgatgacagtcatgtttcctctgttaatgaggatgagatcaggcgatctgcagcatatgttcttttctaccgacgagttggaggttcaagtacagcggcaaacggtggtccagttgacattgaaatggttgattcgctagagacatagttccccagatcaaagcctgagtataacatgtggatcgagatatggagatcagaagagttatggaatttgcatgtctgctccggaatggaatatttgtgtatgaagcctttgacattttgaggcatggcagacaactgaggtcgaaatagcgtggtagcttggatctgcacatctatatgattgagggcctggtgtttaggattataatctgcccagattatataacctatcttattttgaactaagtgttagttcaaaataagttagattatataatatggacaaattatattcccaatcaaacaggctatgattggacttactgatacccatttgagtagaactgatcttgacaggtatccgagaaaacgatgaccttaattgaaaattttgctgatacgctgatgcagcacttagggtctactattgttattggtgtagccaagggattgcaactgggaaaaatggtgtaaaaacgctgcatatttttttttgcctaagctacagctgtgctacagcaaattttgattacggttgtttttttaaaatgcccaatcatca

SEQ ID NO: 26962 - DNA, 1970 bp, Zea Mays
agggcaccggaccgtgctattcctcttctccctcggtcccttctcaccgggggcatcacacaacacctccggacctcccctcccggtcgacgcctcgacggtccgctccctcccaaaaacccacagcccgctccgacgctccctcccaaaacccacagcccgctccggcgctccctcacaaaaacctaccacctgccactttcactccaccacacacccacacccccgcgccatggcctctcctcccccgacctccctctcctccccccacctcatccatctccgcctccaacccctacccagcgtcccgccgctccacctcactaccctccccttcctgcgctccctcccgctccacctccactcgctccgcctcaaccgaccccacctccctcccctaccgctcgcctcttccggcagcggaagcgacatcaccggaagcggcggcgaggacgaccttcctccctcgggcgggggcggcggagggggaggaggcgagggcgatggtgagggcgagggcgacggcagcgagggcgactcggtcaacaggagggaggccctgtttgttctggcgcaactcggacggaagctcgagagcctgccggccgacctcgccgcggccgtggagggcggccgcatcccgggcgagatcgtgcggcggttcgtggacctcgaggcctcgccggtgttcaggtggcttctgcagttcggtggcttcaaggagcgcctcctcgccgacgacctcttcctcaccaaggtcgccatagagtgcggcgttggcatcttcactaagagtatgagaaaaggagggagaactttgtcaaagagcttgactttgtgattgcagatgtggtcatggcaatagttgcagattttatgcttgtatggcttcctgctccaaccgtgtctttacagccaccactagcgatgaattctggagccattgctaagttcttctacaactgcccagataatgccttccaggttgctttgtctgggacgtcatactcacttttgcagagagtaggagcaattttgaggaatggtgcaaagctttttgctgtcggaactagtgcctctctgattggcactggtgtgaccaatgcactgataaaagcaaggcaggctgccagcaaggattttgccggtgaagttgagaatattccaattttatcaactagcgttgcatatggtgtgtacatggcagtttccagtaacctcaggtaccaggttttagctggagtgattgaacagcggatgctcgagccactactgcaccagcacaaactagtattgagtgcagcatgttttgcagttcggacagggaatacgtttttgggttccctactgtggatcgactatgccaggtggataggcgtacagtaggctcaagcatgggtacacaaatgcagttgctcggagttccagcaatatgggttcttcgtgattttatattaccacgcttcctccaactggcaagtactcgtttgcttcatgggagactcttaggacagattttgatatcattctttaaacaatgccttgaggaaagcgtgatttatcgaaattgttcccgcaagcaagagagtgaatttgttttgagggcttaaggttgtgttgtgcgtgttggattggattgattaaaattcgtagtttcgtacagttttgtcattgtttgtgcaagttcctgtgatttggttatcgtggtcgagcaccatttttgctggccatgcctacaccaaagtttggcattactggcaaacatatccgggtgttgtcacgagaagaaaaccattctaacaagtgggcttaaaagtgaaagtgagcccaaatacaaacaaaaccaacgaaaggagttggtagaccgagtgcaaacagcaaaaaatagtaaaagtagatcacagcacgtcaaaaaaaacagagggccggcaatgccttacgagctgtaaatattcgcaacgagaaattca

SEQ ID NO: 26963 - DNA, 2375 bp, Zea Mays
aacgacggtggaaccctggtctcctccctcttcacccgcacctgcactgcagcacacgcgccgccgaagcgctctgcccacctcgctcccctccagtggccgccggcgcggctcagcggtccatcctcctgacgccacctgcaacggcgccaggcggtgatccattccaactcgcggtcatctcaagtgggtgcggcaaccatgcccaaggttaagaatccccacgttttcatggacatatcaatcagtggaggcagcgccgagaggatcacatttgagctactcgcaaatgtagttccaaagacagcggagaacttcagagcactctgtactggtgaaagtggacttggggcatctacacagaaaccactctattataagggaacacatattcatcgcatagttaaagggtttgttgttcagggtggtgatttttcaagaggagatggaaaaggtggagagagcatttatggtggaaaatttccagatgaaaacttcagattactgcacaatcagcctggtgttctgtccatggcaaattccggcccagacaccaatgggtcacagttttttattacattcaaggctctacctcatcttgatggcaaacatgtggtctttgggaaggtggtcagtggaatagctttgcttaaaaagcttgaagcagttggtagtgaaactggaaatccttcttatcaagtgaaaattgtagactgtggtgaagtttccaacacaaattctccggatctgctaaagggagagaaagatagtggctctgattcagaatcagattcatcaatggatactagctcatccagtgatcataggcgtaagagaagaaaaggatctaagaaggataagcgcaagcccacaaagagaaagggtaaacatacaaggagtaagagaaagagtagaggatccaaaaggcgatctagacggagccatgggagttcaagtgatgattcagtaagctcaaagacagataacagcagttctgacagtgaaaagggtggccatcataccaagcgttccttgccgaaagataaagagagtaccaaaatgacaatttcagaacaaggaagaacttttcaagaagcggacaaagacgaacaaacagttactaccatcaatcgatcacaatcacatgatggaagtaaaccctcaaacaaagatggcaacagggctgatgaaagatctggaaattacaattcagaagataggaatggtccaggtggaagctccaggaacaatcccattcaggttgatgtaaatttaacgaaaccagtaaatgtagatggcaacactggtggtgataatgcagaggctggcatgtctagaactggtgaaggaaggcaccttccaagcaatgattctgtgtccaccaatggtaaagatttaggtgtgggttctgcagacaatgggcaacctcaacgaatcaggaaaggacgtggttttactcagaagtatgggtatgcacgccgatacaggacgccatctcccgagcgtccccctgttcgaccccgctacgatggagggagagatgatagatggaacaatttcaataggtatgaaagaaatggtccttacagtagacgctcgccagtaaggagataccatggctcgccaagagccaatagcccatccaggtacccaagaagagaacgaatgaggagtaggtcacgcagcccagtgaggcgccatgaccgtggagggtatcaccgccccagcccaagacgtagccgcagccctgcagaaccgagacagaatgtgaatgataggcctcgatcaggtcatggcggaggcgatcctgaccacagccctcctgccaacaggtccagatcgaagagccgggaccccttgggacccagatctcctgatgctgccccagccaagagggagagctccagatacaaccgcaggcgcagcagcagctcaaggtccagcagccctgatggaaacaaaggcctggtttcgtactgagaagtaacggcacaacagtttgcaggctccatggaccatgtttcttgctagtttagcatcatgtactcttttgtaatggattctgaacttgaactgctttcgatgcaggtgtagatttatatgttctgttagatttgaatgtttcttatgccagatatttatagaactactgagtagagcaggggaaaggctcgagcctcgtgaactggcttgagcttgctaaggcttggagaggctcgcgagtttgtaagcctgaatcgagactacttttatgactcgctcaaacgccgagccctgagcgaacttgagtcgactcgggagtctgcctaataatattgtgctacgttgttatattattatgtttttaatttattttcttattttttatggattca

SEQ ID NO: 26964 - DNA, 2145 bp, Zea Mays
cctcttttggccgatctctcttccgttccgttccgctctgccgcagccaattgcttctgctgtgtccttttcctcccagcgagcaccttaccttacctctctctcctcgttgttgtgttgttgattgatcctggaagccgcagctccacaagctcccaaaaagcaacaacctttacctcgttgttcattgtatcttcctttcttccctgcttctggctccgccgccgccgcatctcttctgaagctgaacccgcgacagctaaccgccattgtttgcaggggagacaggagcgagcgagagagagagagagagagagagagagagagctcgcgacaaggttttgcccgcaccatatcgtcctctccccgcaagctccaaaagccaggtccagggactaaatagagcaaaggaagcctttcatcatcgtcgtcatacactaatcgaacgggagaatcggagggagggacatacatcacgtttttgtgctcctccgagtccgtccttctccaagatcccccattttccttctcgtttccaacctcctcctccttcctgaccgaccgatggcgatggtgtgacgccgccgcccgtccccgacaccgctgcgacctcagcatttccacaccgtctcggtctgggtctggtcttcgtctccgcctgcgccttcgttttgatccttaagctgagcttcccttccccgagcgccacctccgcccgtcctaccatggcgctggcttcaatgtgatacgcggaggtgcggtcggtcggtcgtgactcgtgaggaataggaagagggtaggagaggagaagaagagccagcgccggcgggaggggagatggcgggcggcgagggggagatgcggtcgctggcgctcacgcccacgtggtccgtcgccaccgtgctcaccctcctcgtcgcgggctcgctcctcatcgagcgctccatccaccgcctcagcaattggctgaagaaaactcatcggaatccactttacaaagcaatggagaagatgaaagaagaaatgatgctgcttgggttcatatctctgcttctggctgcgacgtcaagaatcatctcggggatctgcatcgactccaagtactacaacagcagattctccccgtgcaccaaagaagaggtccaagaatcgataaatgcagagcatgccattgctcacgcgcgcaagcatctactggaggtcatcctgcaccattcaccgaggagaaatctgaaaactagttaccataaccatgaaggctgccgtgagggatatgagtcatttgtttcgcatgaaggtttggagcagctgcaccggtttatatttgtaatggctgtgactcatgtgacttatagctgcctgacgatgttactagcaatactcaagatccataaatggagaaaatgggaggatgaagcattcagggataatcatgaatcattttctcagatcgcatatgagtcagcaactagaaggcaaccagcacttaccaaatcctattcattccgctcttggagccaaaataatgtggtcatgtggcttgtttgctttattgcgcaatttggtcagtctgttgttcgagcagactatcttatcctccgcaagggttttataatgacccacaatcttccgccaacatatgatttccacaattacatgatacgctcaatggaagaggagtttgagaagattgtcggagtgagtggactgttgtggggcttcgttgttgcttttatgttatttaatgtagacggatccaacctgtacttttggatagcaattcttcctgtaactcttgttcttctggtgggtgcaaagctgcagcatgtgattgcgactctaacagcagagggcgcaaagatgagcacctacgggccaaggatacagccaagggatgatctcttttggttcaagaaaccagagtttctcctttggttgatacacttcgttctctttcagaatgccttcgagttggcttcgttcttctggttctggtggcaatttggttatgattcatgcttcatcaaaaaccaccttttggtatattgccgccttatactggggtttgctggacagttcctgtgcagttacagtacattacctgtatatgcgctggtcactcagaaatgcatcagtacatacaag

SEQ ID NO: 26965 - DNA, 221 bp, Zea Mays
aatcagtgcacttttggactaaaatgcaaaaaccatgataataaagcatcttaagtcatatgatccacaatcatgaaggtttgcaatccaaaacttgagatttgggcttatttgcaaaagagccacacttgaactcttttggttaagtcgaaaaccagtgatattggccacactttgaagccctatattccccaatttatgaggattttgttctatgtcac

SEQ ID NO: 26966 - DNA, 1496 bp, Zea Mays
ctgatattgtgatatgcggttcacaaaaagctatttagaaaatgtcctagctgagagtcctttcattctctgatgaatgagatccttgctctaaacagtagtttttaacttatagcaccctgcacataattggcaagttccttatttttcaaccaatgaaacagtgtgccttaattggctccattttagttaagtgtggattatgccaagtcattagttggtgatcaatagagacatggtgccatttgctctcttgaaaaaaaactgaatttcagttactgtaactgaacatgtaccctaataaaggagcataagatagtttccttcatcaagcctcctacagaagtattcaactgtttaggaaatagtcttcttaccacactctagttaagtaaataaactaggaggctagaaaaaactattttcaggattcagatttatatttaattacttgaaatgtatatagcacatatcatatggcactgcttttattcacagtcatgcccactgcacagtggttctttcccacagttgcttctttctcttgccaccctaatactctaccatcaatttgtccttgctccctcttgccttgcagtagcttttggtgtgctgaatccaacaccagctcctcctccctttgttatgtatcctgagatctccatggagggaacgcaagctcaggacacagttattacagtcacacaatatactgtacctattctatagtgaagctctgaatttcatttctttttaaatatttatacttcggctgtttgtattattgtagctaccatgaaaacagttgcttaatgcatctctagatcatttctattagttcaaaaatcaattatacaggcttttggttctgtggttggtcttcattagaaaaatctagttacagaagaatggtcactggattaatctaaattttgaacccaaaacctggctctaactaaataaaaatcgtgcttgcaaaacatttgattgacaacctgttcagtggagtgcagttaagctgagctcaaggtcacatatgtatgccctcttaaaagtgcacttctgacatttgtgagaaaaaaagaaatagatacaaaaatctgtagattttttttggcaatatgtgctacactgcttgttccaaaaaagacaaataacttgtttcatatttgtgggggcaaatcaaattatttctcctgtctttcgtgtaactcgcgtatggtctagtttttccacaaaaattatctgtgttgacatacttgttcatggtctacatgtgtttatttgttttttagaaattttggaagttcacaaagtgcatgtttcaaatatttgtgccgcattgtgttgtattaatgtcctcgactcctctgttaataagggttatgtttgacttgtcattagcataaatgtatccttcgataaaaaaacctaatctatagttttcaggcaccatgttactcatgtctccattcccggggatggatctaagtaaa

SEQ ID NO: 26967 - DNA, 1375 bp, Zea Mays
gggttcgttgcttccccagcacagtggtgttttctgcggttggtgtgggatccatggagatttcctgcctctggaaatgaaatacacatgtgtagaatcaaacaacagtagatttttatgaaatttaggattgttcatggagctgaatatggatacatgcaggtggcctttttatagaggaaggaatgagtattaattaagttctaattagttgcgagtagtgttttgtcctatagaactagggagttttgcttcatggtaggtgttcctaggctgcaaattttgtctgatcttgcattgagaatatgatgggtgaagtctgtgacacgtcgcgtcgcgccgtcggtcgaagccagctcaatagtgaggttgaggcctcacaactttctgcaaaactacatgtcaagtgctccaccttgtcagaattttaaagaaacattttgttgtttcaccttgacttcttattgacatggcctattggagagagatctctgtgtgtttctggtttctaattggacatagacatgccagtgaggagcagtttagccggttcttgcattatgaagtggatgcaattagaaaggcgtgtgccagcttggaagagggctaccttcctctagttacattcatagtggtgcaaaagcgccatcacacactgttttgtcctgaagatcatcgttcacacagacaaccagatcgacgtggaaatattttgcaagccactctggcattcaggatgaactagatgcaaaacctgaagagctggaaggagaagagttggaatctaagcttctagagcctgttgcagctctttcggtgcatccagtgcatgtcccaggaaacaagcaactagcttgccctacttcacagaaagttatagctaaatacgatgagctggctgcactacaagctgaaatggcattgtgatcaggacactttggagacaatagttcttatggcgcagtcaggctagcaggctgccatctgagtttgaaattaccgattgctgccatccttgtgatccagacaaggaaaatgttcttgctatttaagttatgaggtggagtgatggctcttatcttgaagatcaggatcactggcggttgggttactccttgattcttacatggtattttaatggatttctagcaatgattttttgcatcttttaaaaaacatagaagatccttaggaatcatatctgcttttaatatgacgtcatttaaacttgaattaggcgccccattcctatcagttcacttctagatatgacaggtagttgatatgtattgcttcgatccgaatttatgagttgaagatatggtttaagcattcgatgaaagtgaactcgaatatccaatattccttaccaacg

SEQ ID NO: 26968 - DNA, 632 bp, Zea Mays
cctggcatcatgtctatatttgtgtctgccatcgtcgtcaagttccttttgtggttgcctcgcctgcgtgtgtgtgggagtgagaatagagctatggttcaagataaaaatgaagttcgaaagcaacgctcgtcagggaccccatcgtcgacaactttggttcttcgtcgccggatccgtgtttcggatagcagcaaccttgctgtcatcaagtggaactcacagggcgcttgccaggagctcgacagaaggcctgaacaagaatcgtcaacgttggcttggaattctagttgaatcggtacgttaattgactacctgatatggaggaccaaagctgagtcgaccacaagagaatggaaagtgtgagcttctccgagagataatgctgatgaacgaactggaagatggacaaactgaacgagtgccaagccaaaggatggtcgtcaagtgatcgacgtctaacaacactaacttagtgttattcaggcaagccctggtgcatttgccacctccttgctgttttaaaatcttttatcaccttgtttgatgcattaggtgataggagttgtgtgctaaacaattgatgcatttctttcctttgaaaattgattacccttccttgataccctttt

SEQ ID NO: 26969 - DNA, 831 bp, Zea Mays
ctccaataatcatctactgctgcagcctgcagctggttggtccgtccgaatccgatagcactactttcctagctagctaggcgatcgatcggtgtttctttgctaccggagtacatacatcgatctctacgtatcgatgtgcacgatccaagtgaagagagatcccggcgcagcaccgaggggacgcggtgagcagcctggtgtacgaggccaacgcgcgcgtcagggacccggtgtacggctgcgtgggcgccatctcgtcgctgcaggagcaggtggaggcgctgcaggcgcagctggcgctggcgcaggccgagatggtcaggctcaggatgaccaacgactacatcgtgcaccgcctcaaggcggccagcagggccggcggcgggggcagcagctacgccggctcgccctcgtccatgtcctcgcccaagacggcggagccggaggcgcactgcaaggccacgccggagctgctggacatggtcgtggaccagcccggcatggacgacgcccacttctggtcgtcctactagcctagggccgggatggaggccgctgacaaccgagcgcttctcttctgatctattagtcgtgtggtcgatcaggtgctgttttttgagtcacagatggtgtcatcaggtatatggtgtgcgcgcgctgtaacagcgtcacactaggaggaatggaaggcgagcgtacgtagaaggccttcttctcctataccttctaccagtatgtccagggcttgatttttttggctgtccttccatgagaaggtggaacatggttacaggtattggtgtgcatctactgcctagttaaaacagg

SEQ ID NO: 26970 - DNA, 1042 bp, Zea Mays
accaagccgactccgcccaggttctaaaattgtttttgcaaatggatctcaagacccatggcgccacgcttctaagcagaaatcatcagacgaattgccatcatacctaattgagtgcaagaactgcggacactgcagtgatctctctggatgccctcaagctccttcaaacattgaaggtgattcatccaagtgctcacctcccgaagctctgaacaaagtaaggaaggagattgtcgatcacattgacctgtggctatcagaatgccaagagcaaggacatgacaaggagccatggctgggaagcagatggagcatagctgctatttgatcaatctgtgaagctataagcatgtgctgctagagtaaccaaggcaaatatgctttctttttcttgcagcactgtggtttatcgtttcggcaaacaatgtgggctgctgagtaagaggacatatctggtgcacataaaaaattggtgcacatggtgcatatattaaattatcaccactcattttagatctaacgtctttagttgatcattcaatttacaaataacaccttccaggcttccaccactacacaccaccacgttggagggtgcttttagcaaaatataccaaacaactagaaacgttagatctaaaatgagtggtgatgatttaatatgtgcagcatgtgcaccaatcttccatgtgcattagatatgttctcgctgagtaatccacctgtggcgaataaataaagcagtcagttctcagtctgtcatgatttcagggcctgtttggaatgcgggagtttttatttttcctattcctactctccttttttttcttctgtaaaattgaacagctctttacaaaatccctgcgtgattcctacgaattcctgcgtttcaaatatgccctcaaaatgtgagcgatgtacacacggatggcaagtttgtcgatatacatatatgcatctgtcgcatgccctttagcatgagaaacgattgcgatgtttctctgcccttggtgctaattttctgaataaaatctgaaag

SEQ ID NO: 26971 - DNA, 2307 bp, Zea Mays
tcccaagtttacgacccgacgtccgagggggagaggttcctctgacgtactgcagggggcagtagggtcactgcacgcgggccctgtcgcacgcgggggccacgcggcagtgccctcttcccacgtcagaggatctcgttcccgtccgaggacccccgcttctccttctccttgctcggacccctacagacaatcacacatatacacacacacgcagcaggtacccgcgctcgtgctcttaccgcgccgggatgggcgcgaaggggatggcgacggcggcggggacggcggtgttgctatacctggtgctgtcgggccggctctgcggggacgccgccggcgacggcggcaacctggatgaccagctgatatcgtcggctgtttcggcggcggctgaggcgcggaggcggaggaaggaggacgcccgggcgcggcgggagcagcggcgggcgtcgcgcaccaagtggcggtggcccgagcgcgccccggacgggtggggcgaggcggccgccttggccgcgcgcaccgtgcgcttcacctgggcggagacgctcggcaagtgggccctaggggaggtctccttcggtatcaagcactacatgcgccagcagggcaatctgcagcatgagtatgctggaagtgattctgtactactggatgggcctgaggtaaggcaggagctgatttcgctgctcagatatctgaagcaatgcatgtatttctcgaagaagccatacaacgtgtttttggagtatggtggttatggccagaatgatgttcttataaagaaatctaaggcgaggatcttgaagcctgccttcacaattgtctgtgacagaagtagccaatgctttctcctcttcattaggggggctatcagtgttaaggagcggttgacagcagcaactggcgcagaggttccatttcatcacgttgtggtccaggaaggtcaagtctccaacctagtgttgggttacgctcactgtggaatggttgtagcagctcgatggattgcaaaacaagccattccttgcctgagtaaagcaatcgagcaattcccagaatatgaggttaagatcattggacattcaatgggagctgggattgcaacaatactaacatacatccttcgcgagaatgagaagctggcatcatccacttgtattgcatttgggccagctgcttgcatgacatgggacttggctgagtcgggtaaagactttgttacctccatcgttaacagaaatgacctagtgccatcacttggcctagtttctgctgccaagcttcgggcagaggttatgtcatcgtcttgggcacatgaccttcgcaaacaaattcagcagactagattcttaggttttgtgaaccgttctgtgagtttcataaggtctcatgtgccctttgtctctgatccaagatcgaaggttgtggatgttgatatgatgcaatctcagagtcctgaggctgggagtaagccttcagcagatacccatgctgtggtgaagaaacgccctgcactggcttgctggtcatgtgtggctgcacccaaacagagtatggaatcgtcaatacaaattgagggcacgaaagttcaaaccgacactggtgtccaaactgagaaaactaccgaagcggcaactgctgcgctagtctcaatccatcttggtgaactaaaccttcaagaaccagataacagagaggaaaagggatcagcattgacagaaacagatgaagacgccatggagcttctggagtccttgaccgacgagaagcagttgccatcatcgtcaagctctggtcaagagccacaccagctgtaccccccagggaaaatactccacatggttggattgccagcagcggaagaggcaaccacgagtcagcaaggagcccaggaggaggtcatcgccctatatgagacaccccgacatttgtacagtaagattcgcctggcgaggtccatgataggagaacattacatgcccaagtacatcaagacaatggagcagttgatagacaagcttgcagaggacatcgacgaccagctggactccttgtagcatcaaaagtgtgtacaggataattattgtacagatcatgaaaaggaaagtcattctttcagattgcttgtgcgtaattgtagttggtttaagttttgtgatggcgatctagaagatgtacaacactgccagttgggctctggtctgtttattcttggtcattccactttggcaggcacctcaagaaaagctcaaagagctgcgcctggagactagggatggtagtctagctttcgtagccggg

SEQ ID NO: 26972 - DNA, 1890 bp, Zea Mays
ccaataaatacatggtaggatcccaatgctatatgctactcgactacatactgctgagtacatcagtactcagatagcccaagtcggaccacactgcttgcacagtagaagatgataggcgatgaactggattccgatgtggttgtacgctacttcagaggcaagagcatcctgatcactggatcaaccggtttcctggggaaagtgctcgtggagaagatactgagggttcagccggacgtgaagaagctcttcctcctcgttcgagccgccgatgacgagtctgccaagcagagggtcgagaccgaggaaaggagatctttcaggttctgaaagaaaagcacggtaacgggttcgaaggtttcgtccaagaaaaaatctgccctctgccaggagacgtcatgcacgagaacttgggcctaggcgctgccaaactgagacaagtgtgcaaggaaatagacatcgttgtaaacggagctgcaactacgaatttctacgaaagatacgatgtggctttcgacacaaatgtcatgggagccaagcacatatgcgagttcgcgaagaggtgcagcaaactcaagatgctgctgcatgtttcaacagcttatgtagctggtgaacaggaaggggtggtgctggagaagccattccgtttgggcgaaaccctgagggaaggcacgcacctggacatcgagtccgaactaaacctgataaaagagacgaggagagaactgaaggccagccgttgttcagaaaaggctgagaggagaagcatgaaggagcttggcctcaagagggcaagggagttcgggtggcccaacacctatgtgttcaccaaggcaatgggggagatgctgctgggcgcccacctccggggagacgtgccggtcgtcatcgtccggcctagtatcataaccagcatcctcaaggagccattgcctggatggatggaagggatcaggacgattgactcgttcatcatcggctacgccaagcaggctctgtccatcttcttagttgacctcgacctgataatggacgtgattcccggggacatggtggtgaacgccatgatggtggccatggcggcgcactcggaggagcgggggcagcagactagcatctaccacctgacgtcgtcggtgcggcacccggcgccctacgccgtcctcgcggagtgcggccgccgctacttcctccacaacccactcaggtccgggggcaagaacagcgagcccgtgcggcctagcaggatgcgcttcttccgcaccctccccgggttccgcgcctacatggccatcaagttcaggcttccccttgagatccttcgcctgctcaacattgtcctgtgcggtgctctctcccggcgccacgacgagctcagccgcaagtacagatacgtcatgcatatcgcagagctgtacgcgccttactccttgttcaaaggatgcttcgatgactccaacacggagaggctgagggcggcgatggcgaacaggagcagcggatatgacttcggtttcgatcccttgtgcgtagactgggacgactatttctacagggttcacatccccggtgttgtcaagtacctgtgtggttactaggttaatacatatttaagatccggagagagccaaatgtatctcgcatgttttaatacacaaatatgtcgctgtagtttgcagattattaatttccctagcattcttgttcagtggtacaggtttctaagaatggtacttgttttcctttaatcttctgccactgaaaggtgtcttactctttacatatgtcaggagcttgcatttggatgcatatatgcaatgcgaccatatggggtcaacacaaaaaaaaaaccctctaagcatggcctcgtacttgtacttgtac

SEQ ID NO: 26973 - DNA, 2944 bp, Zea Mays
cgtcaatctcttatcgatgcgcacaagctgaaaaaataatggaggctcgctctcactaagctccctgtttgctaaatcgcaactaatccgatgcaaaatatttgtagaagaagagagaatagagggttcaacgcagaggcagaacaacagctgccccaccaagcgccgtcctgtcggagatggcagctgcggctccggcggcgtgcaaggggaaacgaaagcggcacctctccgaggacgacgtctggctcctcctccacaggtaccatccagggacgatcctgacggcgctgcaggaggtggcgcagcacgcggatggccggcgcatagactggagggcggtggtggcgaagtcggccacggggatcacctccgcccgcgagtaccagatgctctggcgccacttcgcctatcatcacgacgtagacgagagcgtcgacgccgatgaccagcctctgtgacctagaactggagcttgaacccgatcccaacctgaccaaggaagctttatgtgaggcctctgcattagccaaggcgctaatatctggatcttcacaagcctctggtcatcgtattaacttggatactcatgttctgaacacccgaaatgaaaagatagtgcgggttccatctgagaaacagcttgctcaaagtcatcgtgtaacaaatgttgcaggtcctgtttccaattcaaaacagttagcccatataggaccctctgctggtcttttggatccaaatggaccttcaaaaaagaggaaaaagccaaaagcatggtctaaagaggaagatgcagacctggcagctggtgtgcagaagtatggtgaaggaaattgggaggatattttgcataaatgtaacttcgataatacaagaacgcctgatcagttatctcagagatgggcgctgaagcgtccaggaggatcaaccaagcctgctagcactaaacacgcctctgttggcttagaggaaagatcagcagccctcaaggcactttcattggctgtcggacctatgcgtggatcatctgcactgagatcaggagcttatccacaaagcattcagcataagtctacagtgtttgctcctaagatgccagaactaagatctgcagtaaccccttcaccggcaccagcagtgccagtcccagttgctatgcctctgcgtgtggcagctcaagtacaggctccgcctcatcaagggcatcaagctcctgcccatgctgcaccaccaaaattgttaaatgcttcaaataagacacggaagaagcaagcagctcagccaaatcccaccatcagtccttcctcaatacaagcagctgcgattgctgctggtgggcgacttgccacagcctcaaccgccgcaaattttttaaaagtcgcacaatctaagaatgctgtgcacataagatctctaggagcaacatctttgaaaccttccgcaagctttaaggcatcgattgtggttgagcatggaacacaacctgggggctcccagcacctagaacctctaaatgctagtgcagttcatgatgtttcaggagttgctgcagttaatcaatcagggccacttgctggggcatgttcagagactaagaaggcattgagtaccgcactagcacctgtcccatgcgacagcgaggaaaaggaggatgactcggaattttgtgtgattacgatagatgatctgttccctgaagatgcaaagcagccagaaactgtggataccaaggcaaagcaaccacaaaccacgggtctgaaggcaaatcagccagaaaacgcagatcccaaggtaatgcaacaagaaaccatggatcccaaatcaaagcagtcagatacagtagaggttgagatagttgatccgaaagataaagacatgctagagtttgatcaatatgttgcttctcaaggagggcacttaaacacggatgatctgaataaaagcaagtgtaccaacagtgtttcccaagcccaaggtcttgttggcagccagcaaaaactgattcctgcggatgggaaaggtagccctgtaactgtggttgggaaaggcaagcctgtaactgctggagtggcagcaactgggaggaagactaaattccctgtctcacatttggcagcagggaccccacgtggcattgttgacacagtcaacgccaacgccccaaataaaacgctagtaaggagggcagccatccctgcccctgtccctgctggttgccaagttaggaaggatgccatgaactcaaaaggtaaccaaatgacccctggcaatgccggttctggagtaccagccagcagtcagactagcgtggctgcacaagctgccagcaaagcaaatctaccatccagcagcagccaggccaagcccaataacatggtggtgaatggtggtaacaggctagtggttaatccaccgtccagcagccaagctagtgcggccgtgaacgacgctaacagggctgcgacaccacagtccagcaaccctgtcaacggtgccaacaacagagaggttaatccaccacccagcagccaggctagcacagccgtgaatggtgctgctaacaaggggaatgtgccagcagcagccaggcccccttaatacagtaaattttgtaatgattcccgtaggacttgtgtgcgtggaagaaatgtgtatagggcattaggcagaggtcatgtcattcttttcgccttgcatttgcagtttgcacccgtgaactggagaccactaggttggaatggttttttggctgctatctcctgctggccagttcccttgtgatgtaaatttttgatgcttgtgtttgtttacttgcgcccgagatgatggtgccaactttgtgcctgtctggacagatcattcgcatctcttaggggccgttcgtttccattggaataaacccggtttcgttccaactcatcaaaatttatataaattagagaag

SEQ ID NO: 26974 - DNA, 1363 bp, Zea Mays
accaaaccgccgctcgcgtcggtcacgccaggcctgacgcgagcacatcgcaatcctagccaccaaaacaatgcccggcggcaagcgccgccgcgcacgcaaccccaccgccggcgggcctcagcgtagcgccggcgcaggtcgtcgtcgtcccgtccccgagctcccgtcttttgtctcccccgcttctgtcgccgccgccttctcccccgcctcgggcggccgcagccgcgggcggtgcgcccggcgttgcggcgcctactccgatggcgagtcctcccacgccgtcccctttagctatccttccctccgctcctgctccgcttatccggagcgtgatcaggcgcaggcactggaggtgaccatcgacaccgcaccctgcgccgacccagccgcttccgtcccgatgtactcgtacggccccgccgtgctcggtgagaccgggcttgtgctgagtgcggacgaggaggaggcctgtgatagagggctgcatctcgggttaggattccgggatggaggacacgatgagatggagctcaaattgaaagagctgacagaggaagatgtctccttcaagacgcccaagcggaagcaggagcagagggcgaaggccaacccaggatttttgttgattgggggagtcaggatttacacggaggacatctcatcatcagaatcggatcggatgagcagctctgatgtggatttagagcccaactcaggtgatggggagagatttgagaatgatgatggtgacagtgacgaggaagataggcaaggcgaggagagagattcaatatctgatagcgagtcattaggatcggaatcagatgaagatttgagcaccggggattcttcttcagttgacaatgaggttgttgctgattacatggagggtattggtgggagtgacgagctgttgagcagtaagtggatcactagtatgaatttgggtgatgcagatactatagagcagatgtatacaaatgacaatgatgggtttgtgaagaaggggaaggaaaagcttgagggttatgcactaatgactgcatccgagcagtatgggatgaagaggcggaactcccttgagcagcggaagggaaaaggaatggtttgtgacagggatttgtcaagcatgcaagtgatggaccaggaagatatgttcatggtgaacaatgtctggatgccaaacaggtcaagaaaggggatgaagacaggatcatcatcctctcagctctcacagtcgtggcctaaagatgataggaaaagcaaaaactatcagagcaggccaggccttgctcagccaaaggtcagcaaaatacacatttccttgctgcggggcctaaccaagcaagttttcctc

SEQ ID NO: 26975 - DNA, 882 bp, Zea Mays
cggaattattaccgtctgtttgtcctcgtctccctccgctgtccgattgtgcgctgtcgcagcctctgccctctcccagcccgctcctccatctccggtgagacgcgaattgaatcgcatcgaatccatgggcagctcctcgaataccaacacgagcggcggggccagcgacaaggaggagaagaagaaggaggacaagatcaaaggcaaggactcgtcggggccatccttcaaggagaacgaaagggtcctcgcctaccacggccccctcctctacgaggccaaggttcaaaggatcgaaaaccatgaagatgaatggcgctactttgtccattatctcggttggaataagaactgggatgaatgggttgcaaatgaccgcttgttggaattgacggaggaaaacgtgcgcaaacaacaagagcttgataagaatcaggtagttgacaaaacaatgaagtctggacggtcaacacagcataaaccaaaagtctccaatgcggatgcaaaagctgataaagatgacactaagagtctcatttcagtgaaggggaagaaacgtaaaagtcagcttgggactgagattcaggacaaggaaaaaagatcatcacatagtctactagtgttgcagtttcctttgccactgaagaagcaacttgtggatgattgggagtttgttacgcagatgggcccaagtggcaagctcattagctcattcagaaaaagactttgcaactccattctcattcagaaggaagactttataactccatgtattccaattatttttaatggaaattcagcaatctgtcaacccttgtggtagtcacttgaatattacagacatttgctgaattggcagttaaataagaaatgccgtcc

SEQ ID NO: 26976 - DNA, 861 bp, Zea Mays
gttgataccctgattatgcgatcaaatccaaggaagaatgtgaccatttgatttcactggcaaagcctcatatgaagaagtcaacagtagttgattcagcaactggaggcagcaaggacagcagggtgcggacaagttcaggaatgtttcttagaagagggcaggacaaaattattcggacaattgagaaaaggatagcagattacaccttcatacctgtagggtgagggtcttcaagttctccactatgaagttgggcagaagtatgaacctcactttgattacttccatgatgattacaacaccaagaatggaggccagcgtatagcaactcttcttatgtatctgtatgtgttacactgttggtattgtatgataagtgccattggtgacccaattgcccagttgacgttttctatggcaattgttatttactagttcggatgttgaagatggtggcgagactgtgttcccttcgtcgacaacaaacagcagctcgtcaccattttataatgagctgtctgaatgtgcaaagggtggtctatctgttaaaccaaagatgggagatgcgcttctgttctggagcatgaagcctgatgggtccctagatcccacaagcctgcatggtggatgcccagttataaaaggcaacaaatggtcatcgacgaagtggatgcgtgttcatgagtacaaagtttagatacaaaaagacacagacctgaggtacgacattttgcttagaaaccaaaatactccttttttagtttgcctactgcaaaagtaatgctgggcctctaccttgcaccaacaatatccccggcatacattgatatgctcgccgtcagcttgaagatacatttc

SEQ ID NO: 26977 - DNA, 1785 bp, Zea Mays
ctgccgccctattgattttttatgcgcgcatggtacttatctccctggctgcgcgcgcgtctccttctctctgcgcgctgctctttcttccccagccgatccttctttccaggcttccagcgtcgtgtgcccatctcctctcctccctgtgtcgcgcgcagctcccctgctcgcttggcgtcttcctccctgcgtccgctgcttgcttcccctgcttctccttcccgtctcccatggacgcgcgtgccctagctcctgctttcctcgccgacgcgcgccaatcccctgcgcgcggtacttctcctctgctccttcggccgaccgcgcgcttgcttctctgtgcccatgcgcgcgcgaagctccctgcgccgcggctcgatcccttcctcccgcgcgcgctctgcctctccctcagcccgtcgcgccctgccggttctctgctcggccatggaagtcgcggttcccagctccatctgctcgcgacgcacgcccagcctcttcccaagctcgagttcctctgcttcttccccaaccgcgccggtcggatctccctgatacctcgctctctgtctggccgtggaactcacccagctcggaccacgaagctctctggcgctcttccatggctggcgcttggctccagctcggccgcgcgccctggcatttgccatgaccaccgcgccgtggagtcctgcgcgctcggctctgctcgctccctgtgctcgcgcccagccgaagttccctgtgcgcgcgccctggtgtccgttcgttgctgcgcgcgcgtgctcgccggctgtgcagctcgcccatggtgcccatctctctgttcgcctctacgcgcagccatgtgctccttcgtgtcgtgctccctggagctcgcctagttccctctactcgctcgcgtccagtcgtcggacctcgcctccatccctatggtgctcggggccctccctgctccgcgtcgtgacgaggattgggggccggctgtccggtctcatgaattgcctcgttgtggatggacggctggatgggggcaggcaaatccggatccgttgcgctactcgcaaagcgcgtgggggcctcgccggccatcctgcttcctagttccttgtgtgcgctccgcttgccgtcattctccacgtgtcggcagttcacttggtgtcagctcgcgtcgccctctccctcactggattcgtgtcctcgccagcttgctccagactcgatctcgtcgtcgttccgtgcgtcgtcaagaaatcccaagcgtcgggtgaagacgaagttagcagcgtgatattcaccaagtgctcgacgcaagggctgaaccagaattcttgccgtattcgcggatagcgcgtcagatttagtatggtacatgaattaaccacgtgatgcggagaatcagagctgagtcaaccacaagatgctggaaagcgtgagcttctccgagagatgatgctgatgaacgaacctgaagatggataatctgacgaatgctggaacaaaggctgatcgtcaagtgatcgacgtctaacaacactaacctagtgttatccaggcaagccccggtgcatgcaaccccttccttatatttttaaataatttttacacactttaagtctagcgaaatgtgcattaggtttataggagttgcttggaaaccctttgatgcattgcctaccttgaagtccatccctttatagatacttctgatgaagtatcaaaatatgatttacaaaaatgcttagggtgtgtttggtttgacttttggctttggcttttgcccct

SEQ ID NO: 26978 - DNA, 3393 bp, Zea Mays
tgttgctgaagttcacaaggaaataactgattgataaattaaggagctttcagttgagtatacatttactaacaatgtgtatattagaatttacaaaaagctacaatgaggagtctaccagtgcaagaaacaaaccctaaaaagatattttgagaaaccgggtgatgatgtctgtaacacgatgatggctgccatgaagtccgatttaattgttggctaacacggcttgtagaaacgcccgatgaattcatctggacccgacaccctatcagcaggcaattcttttattgttgcccaaacctcttcttctgttactgttatgtccttgtccatctccaaaagatcaactctttgcctatgaaaaccatgtgaatatagctgtagtatgcgtgcttcggtgtaaccatgtcaataagctgcagtatgtgcactttttatttaaccatatgaatgtacatgtagtacttgtgtgtgatcgattttcatctaattgccctcctgttactgggatctccctgttgtcaaatttggtacctgcatcttgcttaggcatgtttatcttgttttcatgcacacaagtgtgtgtctttacatatgacaaaggcagcatctgaatacccctcagtggtaattggcattaatttttattgtgcaagcctgaacctgtagtcttgcagtatgtgttttctttgaaatttagagagttgccatggtaatttaactaactgccatcaccaatgtctgtcaatgatataaagtactgatcaatatccagtgttcagcatacagaaacctatctcttctctactatataaagcaccattttctacggattcgaaccatggttgttggttctaaactcacattcacattcacctaaccaacataacatacatgtctttatattttatactttatactcaaacataaataaaaaccgtagcaacatacacactttgctaatatgcctatatatgaatcacaggcacgcttgccatgcttatcgattgtcgtgtgttttcttttgttgtgatcgattgcatcatgagcgttggattttgcttatcaggctgaaaggaaatttgtttcaagagactgataactttctcttgccgcacagatcagagcagctgcaattaacggcctccaaagaaacagaagtaatctcgaatcattattctgctacgacaaatctgtccccgagcaggacattggagaaccatctggtctaaatctggaaaagaagaatgtcggggacaagcctccctgctcaagctgtgaagctaaaggtgccttgctgtgtgcaacgtgcgctggttcaggcttgtacgtcgactcgatactagagagccagggaatcatcgtgaaagtcagatgcctaggttgcggtggaactgggaacatcatgtgctccaaatgtggaggccgtgggcatacataacatgaacgctaaagcttgcaccttgcagatcaaaggagttgactctatggagaattttctctgtgttacatgttacggtgtgctgagctagctgctgtagctacatcgagacatgctttagaaggctaagttaatgaactatcctcttttactttttttttgttccccacttcccctcattccgtgcttaaaagcatgatgcgtcatgggatttcatgtgatgttgtaatcgtaaaggtgtaatggtatgtgaaagacacacttcgtacatggaggagaatgagagattaaattcagttgtgctagtactcctgtgcattaaatttttactcaaacgctctgcttcacagtgcttgtggatatgggctttcgctctcctccacaaatcacaatgctcgtgcatacggaatttcctgacggaccacgcagccgcaggagcagtccgccgccacacatagcgctcgacaaaatactcgtggctgataagctcattgttgactcgactcgttttcaattttatcgcgagctaaactaccatcttagctcggtttgttaaggagccagctcgttagctcgaactagcaactatttgttagaaaagcaaagcctacacttgtattggatgaactaataaatgatgagctttgttaatttgatgttggattcatgcgatatgtgaaactataagtattattacactttttttagttttaaattatctaggattaactagaaattgattatattgttttaataatatgtatattgttttttaccgtggctcgcgacctaaagaagctagctcaagattgaactgagccgagctggctcgatatgcagccctagccacataattcattagcttgcacaaacctcatgggcatgtgttacagttttttttcctgaagattttttctgagaatctgactgtaaagagaatcttagtatcataaaaaaagattacatgtggaggaacatgaataaatttatagagtttaggatctttaatgtgactgattcctactattacgatgactcgatcgatcatgcgttcacgttaatttttgacggttttcaataaaagcgattctcacaaaagtgcttgaaaatctaggtgtttgatagttcgcaatatcttctagtagttaaaagctgaaaaagttaaaagaaacggcccgctcgtgcgccgccgctgcccgtgcaaccgtccaccaccgcgacgcaagctgctcccacttatagatgtccaaacgggcggcacggcccgacccaactcggcccggcccgtttgagcccgacacggttaagcccgaccacttaaccgtaccgtgtcgtgccgcccgacgggctcatacctcttcctgagcacggcacggtggaggcccgaccgtgccgggcggcccgaatagcacgacccatttagtagcccgtgccggctcgagcccgcaaaacacaaaactatatttagcaaaaaaaaccctaaaaccgacaacacaaaaaacctaaaacttacagcacaaaaaccctaaaacaaagaactgtccacataatcaaatttgctccactcggtaagaaaatttagcaaagaagaaccgatgcaactcacctacaggcgcggtgctcgcccggcgccgtcggaaccgctccagcacgccgcgcagcaccacatcgagggtgtcctccatgccgtcgccgaacccatcggacgatgacgcgtacaccagccgcgggatcatcttcaccacgcgctcctgcatccgttgcacccgccgctcactgagccccttaagaacataggaggagggaggaggtgccgagtgtgcaccgtgccgtcgtagggaggagggagccaggagcgagagggaggaagagtgggagagtgggttagggattgcattaggagcagacgcggcagccctcggggacttgtgggctagcggcgggggtgggtg

SEQ ID NO: 26979 - DNA, 2900 bp, Zea Mays
cttcaccaagcgtgagtgtattgggcttaggccgtcggctgggtctgcctggcccattgcaatctcgagaagcaactccgtcgcgccgcactcaatcgcctccgattctgcggagactcagcatcggaatggcggcggcggctcgtgccgggttccggcggctcttctccgtctcggccttcgctgcaccgcctcctcctgccgcgcgccccgcggcgaacccttgcaacaacctcttcgtctcaggtacgtcataataggaaaatgtattcatcagctgcaccacaaatttcataccaatgattagagagaagtgggataatggtcatcatctgccacctactggtttcagacttccaacctaggctggttttagactttcctttccaacctatatccatagtagctattgaccggtcgatatcgatcactgttagtccgctccacgacacaatctttacactacaaccactttattgttatatcattttttacatacttttatgtgacataaaacatgaaattttattaaaatacaaatacataaaatcacagtttaccaacgggctctcgctgaatttcgtatttttaaaatttgaaaatatgtacatcaaatcttattgaaaaaaccaaaaatcgctggggaacaccgaaaatcacccagaaaatggtgaaaaccgctcgggatcttgtgaaaaccgctagagacaaccgaaattccattcgggatttggcaaaaattgacgaaaaccgtttggttttccgttcttgaatggtagcgagaaaagagaaaaaacgaaatgttgaactcggtctccaactcttgtacgacctagtgccccgacgacgcgggtggattgagcttcctcctcgtgacggcgcaagaaagaaggggctatcgggtctgttttgatctattaggatctaagagcaactccaatagttacttaaattttagctctctaaatcatagatttaagaagttgctaaatggcttttgaagtaaaaaatgtgagttctccaatagttctctaaatataggttgtaattttgttttgtatctatccacataaaaaataagtcacaaaaactatataatgcagtaaacatttttgtttagcgagttgttaaatggttgctaaatgtagagagaaaatgaggttagatgacaacttgttaaatttagaaagttcatttagagaactgttggagaatagtttttatattaactacctaaattattgatttaggaagtcttttatagaactactggagttgctctaatagaaacttgaacagagatcagacccttaaaggatatactttaaaagtttatggacaggttgaaacaagtagccaagtttgaggacgggaattgtaatttacccatccaaatttattgacgtatcgaaactccggcggccagatcttgagaagacaaataccgccagctctgtcatgcttatcactcgacatctcctcaccatactcttctatagaagaagcggtaaggaaggcctcaaaacatggaatttttgcatcgctgaatatgaacggaggcgagtaggcgtcaggcatgcgaggtagccgcatgcgctgcctcgacaaggggtcgcacacggctagctccggcaacaagcccaatgccctgaatgtaaaccccagaggtgcgcacttgaggagggcacgatcgtcacggaggtcacaaatctcccaaccaaggccagatgcagtgcgacactatgcaagaggaacccctcgctgtggttcttatgctgcgtgcttcattaattgcacatgttatgctgagcgctttattagttgcaagcggtggatgtttgcgataggattaggtatgggagaagctgtttgcttttgtctgagatctgcgagccagtagttacttcaaattttggtagacctgatgaactaaaactgatactaatcgatttgctctgtctgaacccactctgaacgagagaagtaccacacaagttcacaagtatttggtaaacttggaagtaggacacatctcaaatgccagcgattactgctggtttgagtaattcactttcctatgtagaaggtggtgctaaaaaattgttgcaggattcggtgcatttgtagctccctacaattttccttctctggcaatagttcatctggttatctgtgtcaaatagtcagtctcttcatcgaaggagaaaggcagagatttggaaaaattcaagggttaaataaacgcacaacgtccgagggacttaaggaagcattttctaaatttggtcaggttattgaagcaagagtaatcactgataggatatctggatactccagaggatttggctttgtcaaatatgcgactgtacaagaagctggtgaggccataaaaggcatggatggaaagttccttgacagttgggttattttcgctgagacgccacacaaccatcacaacaaggagcaccagcttatgattgaagttgccatacacggtcgatgacatacactgtatttttctgccgagtgtaatagtggatgttgattgccggccaaacatttgcagagagaatgtagcttgatgtgctccttgaacttcctttgttgtggttaacattggacttactgcaacctcatgcgcgtggcccataactttcgtctttcatttacaggtcactacattttttttgaccactgtgttggaaggaggttacactgcagcagaaatgcaatgtgttggaaggaggcccacctcctccttcggccaaaaacagtataaaataaatatgtcgaattatacaagaaaaaaaattgacccctcaaataaaattctaaataaaatcttatgtacgccactcagtcgtaccaggccgggaacccgagtcttggtccgccgcttc

SEQ ID NO: 26980 - DNA, 1662 bp, Zea Mays
cttcttccagctacgagtctacgaccagttcggcagcacggcgagcatcccgtccgaccatccgctcgctcctcagagctagcctccaaactcgcaattatataactaccgtcccttgcaactttccagaccttttgcccccctgcttcctccgcctgcaccctctcacgagcgcccgcccgcccagatctagggttccatccgcgggcaagatgagcagcccccatggcggcctcgacgaccagatcgagcggctcatgcagtgcaagccgctcgctgagcccgaggtaagggctctgtgtgagaaggcaaaggagattctgatggaggaaagcaatgttcagcctgtaaagagtcctgttactatatgcggtgatattcatggacaatttcatgatcttgctgaactcttccgaattggtggaaagatacgaactacctgtttatgggagattatgttgaccgtggttactactctgtcgaaactgtcacacttttggtgtctttaaaagttcgatatcctcagaggatcaccattctcagaggaaaccatgaaagccgacagattactcaagtttatgggttctatgacgaatgcttaaggaagtatggaaacgcaaatgtctggaaaacatttacagatctatttgattacttccccttgactgcattggtcgagtcagaaatattttgtttgcatggtggattatcgccatccattgagaccctcgacaacatccgcaacttcgaccgtgtccaagaagttcctcatgaaggtccaatgtgtgatcttctgtggtctgatccagatgatcgatgtggttggggtatttctccacgtggtgctgggtatacctttggacaggatatatcagagcagttcaaccataccaatagcctaaggcttattgctagagctcaccaattggttatggagggtttcaattgggctcatgagcaaaaggtcgtgactatatttagtgcacctaattattgctaccgctgtgggaacatggcatcaatcctagaagtggatgattgcagggaacatactttcatccagttcgagccagccccgagaaggggagagccagatgtaacccgtaggacacctgactattttctgtgatgcaaaagtgacgtggatctgcagcaaaggtttgatagataggcgcagtttcctggttgcagatatatatatatctatatatattggctggagttcctccgcgtgctattcttatattatttctcgcccatggcgctcttggctgtcgccggctgctttgctgcatcgtggttcaagtgtataccctactacagctggaaggactggatcgtgctcttacctgtctctaactggttgattggcttagggtgggctgcggtggtgtgtgtgtgtgtgggggggttcaagcatcaggcagccatctgtattatgggaggaaagtgttcccgttgtattcattttgttcccctttcttcctcatctgattttcttctcttttttttatttcttccttctctgtgattcttgtagagttcagcacttgtatggttctatgttgggccattagttttttttaactctctttctctgactgcctcgatttgccgtatagaattacatttctaagcgcaactagccaacctgtaaaataa

SEQ ID NO: 26981 - DNA, 1029 bp, Zea Mays
aagtggatttttcatatccttgtgatgtgatgtctcatattccatgtcattttggttgcatattgtgtcattttgggtggtagcagtgctttaattctttattatgagttcattaccagtttggcatgtgaacagatagatcggtcacacgtcattttgttcacggtccccttagtatatagtaccttaaattgccattcacctggatgcctctgatgctccatgtttgttcttttctttgagtacccgacaaaactagtggtgctggtgagcgacacgccaaagccgcgaggtccgaacgccaaccggaagaggaacggccggaaacagaagctgttccccaagcactacgttacatccgaagatgatacggccggttcctagcatcagcagcacggtagcagtttgaccgttggctttggtgatgtcagcagtagggagggcacatcatgtcgcctctgccagctgctgtgatctgaagaggcgtttagctcatcatatgcctttagtcttttgagaggtctttagggttgaaaggtacttcgaaaaccgaaccagcgtctacaggcctaagagggatttccattgaaactcgtcgatgatactacagttttctttccccatctgtgccggttgtgttgtactaccactaccagtgacagtgagtgacttctaagctattcatttttttaactggagaagttgataccatgataattaaaaaaaattgggtgtgtattgaactattaccaagaaaatagtacttggattgtgatgttctgaacattatgttttgtaggcaatcgtgacttgaaagcggtcgaggtatatcttgttattttgtttccctccgatttttcaatatccgattgattttgttttgaagcaaatagagagcatgtccgtgagaatagtcatgaagcaaatagagaacatgtccgtgagaattgtcggttaatataatttttagtttttaatttgtacatgccactcttgagaaagatctctctcaagcttgtccatgtgcgt

SEQ ID NO: 26982 - DNA, 3671 bp, Zea Mays
ccaccgcctatatccgcgttccccccgggcgatcgatcgatcgcggctaacctcgccgccgcccccatcgaggcagccatggcggagatggccgaacggtccgtcgcgggcgagctgccggaggagccgcggccgccgcacggggaggaggacgacgaggaggaagaggagggggacgtgtgccggatctgccgcaaccgcggcgacgaggaccacccgctgcgctacccgtgcgcctgcagcggaagcatcaaattcgtgcaccaggactgcctcctccagtggctcgaccatagcaactcgcgccagtgcgaggtctgtaaacatgcattctccttctcacccgtgtacgctgataatgctccgacaagactccctttccaggaactgattgttggtgttggaatgaaagcatgccatgtgtttcaattcatccttcggcttgcctttgttctctcagtttggctcatgattatcccattcattacctattggatttggcggttaacattggtgagaagtattggtgaagcgcaaaggctgttcctcagtcacatcagtgctcagttgattcttagcgattgccttcatgggttccttctctcagctatcattgtccttatatttcttggagccacctcattacgggactacataaggcatttgcgtgaacttggtggacatgatgctgagagggatgatggaggtcgtgaaaggcatggtgctcgggctgtcaggaggctagctggtcctaataatagggttcctgcagatggaaatattgatgaattagcagaagcccaaggaatcggtgctggtgaacttttgaggagaaatgcggaaaatgttgctgctcgattagaacgacttgaggctcaggtggagcagatgcttgatggtctggatgatgctgatggagcagaggacgttccttttgatgaacttgttggttttggccagcaatgctatattcctcattgttgtgatctttgttccattctcattgggaaggattgttctgtactacctatcatggtttttctcttcggcttctactcctatgctggcaaaaatgatgcccttcacagaaacagctatttctatagctaatgatacattaaagagcgcacttaatgttgtgaagaatttttcttctgacagtaataatgaaggtgttatcgggcatgtgattgaggttgtaactcaatccttgaagataaatgccactggtctgagtgtaattcaagtcactgggaagagcagtctgatgaaaggaacagcaattggctcatcttatctttcggatctgacaactcttgctgttggatacatgttcatcttctgtcttgtacttttgtacatcggatcactggctttacttcgatatgccaggggagaacgtttcaccatcggaagactctatggtatagctactatattagaggcaatcccttctctgtgcaggcagttctttgctggaatgaagcatattatgactatggtcaaagttgcattccttctggtcattgagcttggtgtatttcctctaatgtgtggttggtggcttgatgtttgcactctaaagatgctgggcacaacaattgcgcagaggattgaattctttacagtgtcacccttagcgagctcatctatccattggctagttgggattgtgtatatgctccaaataagcatatttgtcagccttcttcgaggggttctgcgcaatggagttctttattttctgcgggaccctgctgatccaaattacaatccatttagggatttgattgacgatcctgtgcataagcatgcccgacgagttcttttgtcagttgcagtgtatggaagtttgattgtgatgttggtcttcttacctgtaaaactggccatgagagtagctccttcaatttttcctctggacatcaccatatttgatccatttactgagattccagttgatgtccttctgttccaaatatgcatcccatttgctattgagcatttcaagcctcgtgcaaccattaaatctcttctgcatcattggtttgctgtggttggttggggccttggcttaaccgatttcttgctgccaaaacctgaagaaaacggtgggcaggaaaactggaatggcagggcagaaaggagagacaggggacatggtgggcaggaaatggttgccccacaggttgaacaacttatgatacaacatgttgccgcagaacataatgacaggggaaatgcaaatgaagccaatgatgtcactgaagaatctgatgtagatgatcagggagactctgagtatggctttgtgcttcgcatcgtgctcctgcttgtactggcatggatgacactactaatattcaatgctggaatgatagttattcctatctcgcttggccgtcttgtttttgagggtgttccgcgcctgccaatcacacatggcattaagtgcaatgatctgttctcctttagcattgggtgctatattctctagagtgttgcagctgggaccagatatgccattgattacatcagatcacgacagctgggatttctggttcaacagatctgcaagtggtgctcaattgttttgaagagctcttttctcttgtcaatatggatctttgttattcctgtgctgattggacttctttttgagctgctggtcattgtacccatgagggtgcctattgatgagagccctgtcttcttattgtaccaggattgggcactggggttaatattcttgaaaatatggactagactggttatgttggatcagatggcacctttggttgatgaaagctggaggtcaaagtttgagagagttagagacgatggcttctcccgtttaaggggtctgtgggtcctccatgaaattataatgccgattctcaccaaactccttaccgctctctgtgtcccatacgtccttgcaaggggcatcttcccggtgctgggttacccactcatcgtgaactcagcagtgtatcgctttgcctggcttggatgcctgatcttcagcgcactcttcttttgtggaaagaggttccatgtctggttcaccaacctccacaactccatcagggatgaccgctatctgattggccgaaggctgcacaactttggtgaggacacacccgagccgagtgaatctggagcaactatagggtcagatgaccaggaccaagctcttgtcctgcgagatcaggaagaggaagtggggttgaggatgaggcgcaataatatgcgtgcaaaccaacaacccaggctggctttttaagaaggagatagttttggatatagagctcataaccatggtataagctttggcctgcagcttctgcttgtgctttgtaatgggcgttgtagagggggtttatgtggttgcgataggaaagagtctaaggactgttctacgacaagtctgggagaaagctaaagtggttagtgattataagaactggtggcaactccctttcctgtggtagtcttggctgactgtaaatatcgtttgacagacactaccaggccaactcagtttgttgtttcttgtaatgactaatgaattaagttgaactgttgggtagatataaggtactaggttgtatgacttccaccacttccaccattttttttgtcatctttgtttcttggcaaccgcagta

SEQ ID NO: 26983 - DNA, 2368 bp, Zea Mays
ccaacacctctgcctcgcaccagtaccacaacgccacgacacgccggcgaggtggacgagcggcggcgatggcgggcggcgaccgggagcgagacgcggacgaggagacgaggaatcagatgatgcagaaccttttcggggaccagtcggaggacgaggacgatgcggacgacgacgacgtcgccgagatggtcgatgaggacgacggccaccagccgcagtcgcccccgcagtcgcccccgcagcgccaccaggagctggacgacgatgcctacgacgatgaggaggaggacgcccgcagccacgcgcccgcccgcgcaagcggataccactccgaggaagtggatggtgaggcagagaatggaggggaaggggaaggcgaaagtgaagggcaagttgtaatcgaagaggaaagtgaaggtgaagctcatggtgccgatcttgatcaaggagaaagtgatggggacaaagtccagagctccccagaaagagaactcgatgaccagaggatggaacctgatgcaagaggaatggacagtgaagatgaaggctaccagcagaggacagtatctggcagaagaaggggagttattgcctccgaatcggagggatctgaagatagttactatgctgctggagctcaagaagacgaggaacctcgccaaacaaggaaacaaagctctccgttggaggaagaaagagatcatgaagtagttcgtgatgtgtttggtgatagcgatgaagatgaaccagctccatatcgtgttcgccatgaaatcgatgaagattctcataggtctcacatggaggatgaaggccattatgagaaggacatgcaaccagatgacgttgtggctgacgaagatatgcgatatgaatctgatgataatcgtgaactgaaaccaaaagagaaaccagtcggtccaccactagacttggtggttccatttaagcaaccaccagctcgacctgacaaaatgaatgtgatcaaggtatcaaacattatggggattgaccctaaaccctttgatccaaaaacatatgtggaagaagatgtttttgttacagatgaatctgggactaagaaaaggatacggctagaggacaatattgtgcggtggagaaccattaggaatgcagatggcactacatcttgtgaaagcaatgcacgctttgtaaaatggaaggatgggactatgcagcttctgattggcaatgaggttcttgatatatctgtacatgaggcgcatcatgaccagtcccatctgtttttgaggcatgggaagggaattctacaatcacaaggaaggcttttgcacaaaatgcgatttatgccatcctccctgtcttcaaagtcgcatcgcttattaactgctctggttgattctcagaataagaaaactgttaagatgcaaaaatggtttgagactaaggatcctgagaaagcgaaaatggaaaaagaaaggagaaaaagtgaaccgcaagtacacacagcctgcccgtccaaggcggcagctttctccagggttcttggaagacgctctagatgaggatgatgagcctggctatgattctcggcgaatgccaggccgtaggcgttttgaggatgaattggaggctgaagcactagctgagaggcgtatcattaacgcgaagaagtcaaatatgagcagaaatgttccccacaaaccaccgtaccctcctgcccgtccaccgagacgtcaagcggatgaatactcggggagtgagagggaggagtcagagtacgaaacggatggcgaggatattgaacattcactgcctcgtggaagaagggaggacgagctggatgaggaggaagaatacgaggaagatgttgaagaagaagaagcgcctctgtcggatgaagaaatggaggcaccgaaacgtaagagagaatcagggggtggtgggcaaaggcgcgaggagctggtgtctgaggaggacgacgaggaccacgacgattctccgccaaggaagcagccggctgtttcgcatcgtagaaaggctgtcgtgtttgatgacagcgacgaggactaaaatttgtaaaaccgtatgacgacctgacatgatacgcttgctttttctccccatttgtttaagagaatgattagttatttttcgtcatgctggtgtaatatggttgcaattctacctacagaggtgagattgtacatgctttaatgatgcgtgggctacagtgaaaggaaacgcaagcatgaaacgatttttttttctttttggttagaaaggaacagcgaaacatgaagaaatcgataattggattggagcacgttcataatagaaccacaataacgtactggaaataaaaaaaaaaactgaatgctgg

SEQ ID NO: 26984 - DNA, 1605 bp, Zea Mays
atgcctaaaaaggctcggatggaaagcccagcatttagcactagcagcccacaaccatccgccaacgcatcaaacggcccaacccaaactttcctgtttgtccgtgtccccagaaatcctaaactttccacgcgatttgcacacagcactctccgcgcgcaccaccgccaaaaacctcaaaacccaacgcgctcctcgatccgcattgcctcttctccaccaataggaatcgagtctttcccatccaacggttcatcccacgcctcgcgcccctcacgcggatcgtgccccatccaacgcctcccacttcaccttgcaactctatattactcctcgccccacagtccgcatctccatccaacccatcagtacccaaccttcccctacaccagaaaaatccccagttctttggtccgcgtcagagaggcggcggcgatgtctgggcgcggcaagggcggcaagggtctgggcaagggcggcccggcgatccggaggctggctaggaggggtggcgtgaagcgcatctcggggctcatctacgaggagacccgcggcgtgctcaagatctttctcgagaacaccgtgaccgccatggacgtcgtctacgcgctcaagcgccagggccgcaccctctacggcttcggaggctaggctaggcgcctcttcgtagtcggggactggttaggggacatgtctctgtgtgatgctttctgaggtagtattgctgcaatagctgtgtaatccatcgcttctgcaatgaagcgctttgaagcatgctacgtatgttgtgtctgtgggtgattgtatttctggtagtaacagtgattcttcctgaattttggataatacaagctcattcgcagtagtttctgatgtaatcatgtcttatcgtttgagagatgaattgcttttggcagcctttgctggtattctcatgctttttttatgcattaggatattagaggtctgttgagttcgcaattatttagttttttctatcttttatttaaatttggtcgacttagcttacgtaaaatttgagcagcagacaggccctagatgcatcaattgcgtgaataatgttctttcttccagtgttggctacttaccaagcctctctatttcgtttccttcgagttgcatttcagttttcaaaggcctaggagtaatttgaaacatagaaaactgaaatgcaactcgtaaaaagtgctgaatcacagcggagcggtcgtgcaatttgttgtcaaaatacgtgagaacaacgctccccagactgcatatcaagactttggaagcgggacaaattgtctcgaatcttttgaaacgaaattgtctcatcaagccacgttttgttctgtctgttacactaattttgttttggaaaggttcagttccggctgtactgtttgttgagaacttgttctcaaatgctatgaattagaacaaggcaatataaaatgttaaatatcaatgtccttcgtccgtcgaagcattatctccacaaagatttaatgtatttcggacgaaggtcacgagcataatattaaagataatacagggtaatgtaaaacgtaaaacattaaagataaatatattggaaataaa

SEQ ID NO: 26985 - DNA, 880 bp, Zea Mays
cttgtccattccatggctccggccagcaaagagccggattcttcctatcccctaccaaaccccaccaccacgagcggctgccgcgcgggagaccaggacgcatggtgactgcctcctccttcactgccatcttcttcagaagtgccttcgtcgcctgcttcgcggagccaaagtgcagatccagctgcaaaggaaggcaccattaacgccaccacctgtggctgcaacagccacaactgctgctggtggagggacactagccacaataacgtgcatcgccagagaggaaggggttgccacgctctagaagggcatcatccttggcccccactgtcagttcctctatgatggcctccacatcggcctgtgaaggctttcttcgtcagaggtgctgttgtgggtgatgtcagtttactaagcaagattcttgctgcgcttgccacaggtgtgatagctattgttgtggcaaatccaactgatctcgttaatgttaggttgcaagttgatggaaaggctaacactgtcaagaggagttattctagagcccttaatgtatatgctataataatcagacatgttactttaaccatcatgggcagtcactgcattgctgatagtgaggagcagaaagttcatgttattgctgatgagagaccccttgaattgcttgctaaagcatatgctatcaactcttttgacatagatcctcagaacccctctgatgttgttttcacgttagaatgggaatcagtcggtgtcctaccttgtggcgagaagaaagataatttttactaccgagggacttcagaattttaggctcattcatacattcactacaatgccttcgaactcatgaacatttatctctggctctattgtg

SEQ ID NO: 26986 - DNA, 1563 bp, Zea Mays
cgaaaaccttgtggctcctatggcgcctggggtatgcctcaactccttggcgacggctcaaaaaccatgcgatggagaaacgttcatatcagcagatgatctgcgaataaacctttggaatttagaaattagcaatcagagctttaacattgttgatgtgaaacctgcaaacatggaggatctaactgaggtgatcacttgtgcggagttccatccaactcactgtaatacactagcatatagtagctcaaagggtactattcggcttattgatctgcgacagtcagcactgtgtgacaaccatgctaaactatttgaggagcatgaagcacctggatcaagatccttttttacagagataatagcatcagtttcagatataaaatttgcaagggatggaagacacattcttagtcgtgattatatgacactcaagttgtgggatctaaacatggattcaggcccagttgcaacttttcaggttcatgaatacttacgtcctaagctttgtgatttatacgagaacgattcaatttttgacaaatttgagtgctgcctcagcggcgatggactccatgttgcaactggttcttatagtaatttgtttcgtgtttttggttgttctcctgaaagcgtggaggcatcaacgttggaagccagcagaaatcccatgaggcgacaggttgctgatccagcaaggcctgcacggactctgaccggtgctgtgaggagaggtggagagaacacaagcgttgacgccagcggaaactcttgcgacctctcaacaaagctgctccatcttgcgtggcacccaactgagaactccatcgcgtgcgctgccgcaaacagcttgtacatgtactacgcataggggaacgtgctagagagaactggtacagtagtgctttttttttgcttgtttgcttgcttgaagtgaaaggcgtggtctttcacacgttcaaggatccaggcgcaggaaactgttgtcggttcgatggctggggagcccccgaaaagcggcagtcggtgattccacaagatcagtcctggcacaagctgacttcctcctcgggattttccttggtggatgtgaagctgaagcatgtgttactggtttattattaccgaagctttttggcacccaaggtatgacgacggctgtagctgcctgccttgtagcgaaattggctgcggaaggataaaaggaagcggtaagaagacagacagacaggtcacaggaatacctgctcacgtatcacaaaggctgtaagatttttccccccttctcttttacgacgtgtaatgcaacctagtcagagctaaccatcagttgtcgtgaactctgatagtttctgtcatagatactgtagattttatctatgcagctgctgttgtattcattagattgttcggataagtgtaccagtgggctgtgatttgctggttgtggccgtgatgtggctacgcggaggaattcgaccgaagttaaatctctttctatttaaaattaaatataaaaggatgtaacccaacaagaaggcctcgcaggttccactcttctaa

SEQ ID NO: 26987 - DNA, 813 bp, Zea Mays
agaggatttgctgactagaataaaatataatataaaaattcatgagtggacagcctaatatcgctgcaacggcggcgccgccgataaaacggccagccgggcagcggagacgcggagtggggcgcgacggcgcgtaacctgtggggtttcaggttttgtccctgcgtggcagcgacccagccccatcgagcatcgaggcatggaaccgggagccaaatcggaagcaaagcaaggtgaggcaggatctggcgcgggggaaagcggcagcggcaaggtgtatcatgagaggcagaggctgcaattctgtctcctccatgctctcaacaaccttatgcaggaaaaggaatgtttcacccgtgctgagttggacggcatcgctggaaatcttgttctcaatgatccaaacaagggccagtggactcctctaccattcatttttaaacctcaccacaatgttataactgggaactatgatgtgaatgttctcatcacagcattagaagctagaaacaagaaggtggtttggcatgatcgtcgtaaaggggcatcatcggttgatctgaatgcagaaacattggtaggcctggtgatcaatgtacctatcaggaggttcagggggctttggactggcaggcattgggtggcaattcgacgcattgatggcatctggtttaatttggacagtgatctttctgaacccaagcagtttaaggaccaagaaaacgtgattgggttccttgacagtgtgctcagccaaggtggagaactcatggttgtgctgcaaggtatccctccagcacgagcagcaacgac

SEQ ID NO: 26988 - DNA, 1201 bp, Zea Mays
cagcgagggccgagcgcccgcccgagtcccgagagggctttggtttcgtcgtcaatcgtcatccattcccaacccaaacactctccgtccgtccctcctctcctgttccctccccgagtcgatatctcaccgtcgtgcgagtaaaacaaagcctcgccgccacggcgccacgcgagcaaagacctagcgcgagcaagcaagggaggcagagaccttagtgcgtcgcgcaacgcggctcggcccgacggcatggagagcctcgtcctcgcctcctcctgctccccgtccccacggctgccgctactctccccctccgcccgcttccgccggctgcccggctccatgccacaggcgccggcgtccaccagcggtgccacgcggaaaggtctcaggaggcacatgctcttcgtcgccgccgccaccgcgactccttccggatccaggaacgttttcaaggaattgagagcaaaaggctttgcaagcatgtcatcttcgactgccaatgagaatatgtctactgaaactggcaccctgcctcccatgcctcccccatcatcatacattggttcgcctgttttctggattggagttggtgtagcattgtctgtggcgtttaccacggtttcttccatgctaaagaaatatgccatggaacaagcatttaagtcaatgatgacccaagcaccaccaaactcatttggctccaactcgcctttcccatttggcatgccaccacaggcatctcctactgcaccaagcagtttttcgtacttggaaccaaggaaaggtacctccccacaggtgtcaactgttgatgtctcagctaccgaagtggatgccgctggaacatcgaaagaggtggatgtgactgagacaccaaaaccttctaagaattttgcatttgttgatgtttctcccgaagatttgcagcaaaaggacctccaatcttcactggagatggtagatgtaaaacatgatagtacagaaagtgaaagtaaggaggatactgaggaaaaggctcccagaaatggagcgacttttaagctgaatgaagatgctgctcgtgggccaactgaatccagtcaatcaggacctatgctatctgttgagacaattgagaagatgatggaagatccagctgtgcagaagatggtttatccgtcacaactcacaaggcaaaaaggaacaagagcaggcggcc

SEQ ID NO: 26989 - DNA, 495 bp, Zea Mays
gtcggttgcaacggccaagtctgccagatgagggtctgtaacagcctcgggctataagtcgtgctccaagccctctggttaacacctctgcgctcccaactcgagaccaaggaaaaagagaagggggacgagtgcggctgtgggcgggattctgttcgaccgccgattcgaccccggggaagcctctggttaacacctctgcgcacccaactcgagaccgaggaaaaagagaagggaaagcatagggtggcggggaaggtatcgcctcggaaggactcaaatcaacggcaattcctcgccggacattgctttccgtcgtgaagtcgctccgctctgtggacaggctcgtcatcaagccaatcgcgaatttcaacctcgctgacggagagtgcgtgctcattcccgagcaaggagctgtccaaaaggaagcccaggagccaactcccgagcctgccaccgaggatctcctcgcagcctcagcttttgaaggcaagc

SEQ ID NO: 26990 - DNA, 1216 bp, Zea Mays
caaattcccttctccctcacgtctctttctctccccaagccgccgcctccctgccgttccgtggagcaccaggccagtgccgttccgatggtcattccaagccagtgccattctcctttggccgtccctgctccagccgtgagctcacccaggccacggcctcgtcgaaccgcacagcccctgcgctccttccccagccgcgcttagccctatcctccctgctcgatctccttcgagccgtaacggctccctggcgtgtccggctccctgcccctctccatggcgtcgcccagctctagctcgccccccctctgatctgtgcgcaggggtttcttccatggcgagctcccctgcaaacttcatctagccgccggccgagtttctttggtggtcgcttacccccagcatcggccagagcttgctgtcattccccaacaaacatgtggttgtaggtgagagatttcagaagtctgttggacgaagaaaagagaagtgaaatttgtgcagcgcccgtcaggtgttaggtttaatagatattgtgtctaccgtgtgagggaatcgtgccagcttcctttgggtttgggactgggagctccatcgctctatgatgggtcggcagttttagtgtctcacacgcagtggccacgggatttttcaagtcacttggtcgtggaagggcttcttattgcagtcatagtgttccagctctccaggaagagctacaaaccaccaaagaagccactcactgaaaaggagattgatgagctatgtgatgagtgggagccagagctgctatgccctccaatcaaggagggggccacaatagatgctccaacattggaaagtgccgttggaccacatacgattgttgattgttgatggtaaagaagttgtgaactttgcatcagcatgaggtctggagtctagacacagcattgcaaactgaggtttaatcatcttagcaactacggtacgtgaccctgagcgcgtgattgttgcgaaacaacgaccacctcggtctacaccttaaagataaaatgctttttgacttcccatgctttctggcattcaggcagcttgcattgccagtgatttgaaaattaaaaggtacacaagcttttatcagagaggtcgtgccaattaagacagtacacttaccatataatgttgggtttgaaataaaatgctaacttaccttataaaattcgatttggca

SEQ ID NO: 26991 - DNA, 830 bp, Zea Mays
tccctttcccagacacactcatgggcaataagggtgaaactacaactatgatcaaattaacagcaaacctgagcagtgcctttttcccacggttcagtccggatgggaagtatcttgtcttcatctcagcgaagagtgctgtagatagtggggcacacaatgctacaaattcattgcatagaatcgaatggtgtacagatggaaaactggatgggagccttggagttgctgacgtggtgcccattgtgctgtgccccaaagataactgttttcctgggctatactgctttggcttgcttagggatccatggcttaccgatggacaaactatgattatatcttctgtctggggaagtagggaagtaatactttctgtaaatgttgtgagctgtgaactttcaagagtgagtccccaggactcagattattcatggaatgttcttgcagttgataagaacaacattcttgcagtttccagcagccttattacactccctcagatgtactatgggattaaggtttctcagactgaaagcaattgggagtggcagggagtttcaactcctttcccaaagccatctgataagatcagctccgtactagcagagcataagttcagcatactcaaaatcccaattagcaacccttctgacgaacttgccaatggctatgtaacttttcttgaagctagtacattgccaacattgtaagcgagtactcgctctgcagatttttgtgaggcacccaaacatttctatatttagaatatataatatttgacctgcaatttggtcaacaatgcatatatttggttagtagttgcacagaag

SEQ ID NO: 26992 - DNA, 2549 bp, Zea Mays
acaaaacccaaacccgttccacccgcaaggactctcttctgggaagagtgggacggatcgagctcgaccccacagaggtccgtccagaccctcctctccggcatagaaaggagacgaacgctctttggggtaatggcgccggcgtgggagcgtgccaggcgcgcgctcaccgccaggttctgcatgcgctttgcggcgaggcgcgtggtcgtcgaggacgcgccacgtgggatggtcgacatagaggcgccttttccggtggcggtggcggaggcggagcagcagcaagagcagccggaggacgagagggagatgttgctggccgcggtgtcctccgaaccggtgtccgagcagctggcgtcgtcgaggtctgggagccggagttcagcgatatgtgcaatttgcctcagcgccatgaggtccggccgcggccaagcactgttcactgctgaatgctcccacaagttccacttcaactgcatctcctcaaacgtgcagcacggcaacaaaatctgcccaatctgccgtgcagtatggaagcagctgccttttcaggggcctctggctgcatctgctgcccatgggtcagcgagagtaaacccagcgatttggccccagatgagcatgctgtcggtgaatccgctggacgagctcccagtctttggcaatccggagccagctgttttcaatgacgatgagcagatacttcttcagcctgaaacagcagttggcggcgaggagggtgacgaggttccccctttgcttgagatcacgacatacaatgaattcccagccacccaggagtccgtggcgcaggaggaattcgccatcttgatccatctcaaggctccgcatgtgccgtcgtgggtaagcacccgagcgccgctggatctggtgactgtgctcgacgtgagcgggagcatgtcgggccacaagcttgcgctcctgaagcgcgccatgaggttcgtgatcgaaaaccttgaccccagcgaccggctctccgtcgtcgccttctcctcgtcggcctggaggctgttcccgctccagaggatgaccgcctccggacagcagcagtcgctgcaggctgtcaactccctcgccgccgatggcggcaccaacatcgccgaggggctgcggaaggctgccagggtggtggaggacaggcaggccaggaacccggtgtgcagcatcatgctcctctccgacggcgtggactcccacaacctcccgccgcgggacggctcggcgccggactacgggccgctcgtcccgcgctccatccttcccgggagcgagcaccacgtgccgatccatgcctttggcttcggcatggaccacgactccagggcgatgcacgccgtcgcccagatgtccagcggcaccttctccttcatcgacatggcggggtcgatccaggacgccttcgcgcagtgcatcggcggcctcctcagcgtggtggcgcaggagacgcggctcggcgtcgactgcgccgacgatggcgtgctgctcacgtccatcaagtcgggcggctacgccagcggggtggacggcgacgggcgcggcgggttcgtcgacgtcggccgactctacgccgacgaggggagggacttcctcgtcaccgtgcgcgtcccgcagtcacgcggggacattgcgctcatccgcccgagctgtacctaccgcgacgcggtcaccatggagatggtgcgggtgggaggcgacccggtgacgctgctccgcgcggcgaaccctgcgaacgcggggatgtccctgcgtgtggagcgcgagtggcaccgcgtccacgccaccgaggacatagccgcggcgcagaccgccgcggaggagtacgactacgcgcgcgcggcttcgatcctggaggcccgccgcctgctgctggagtcgtgcgcgtcgctgtcctcggaccagcaaacgcaggcgctggtggccgagctgcgggagatgcaggagcgcgtgctgaacgcggagctgtacgaggggtctggccgcgcctacctcctgtccgggctgagctcccactcgtggcagcgtgccacggctcgtggcgactcgactgagctcacgggcctcgtccacagctaccagacgccgttcatgatcgacatgctcaacaggtcgcaggcgctccagccggaggtagcggaggcgctgagccggtccccgacgatcgcgtcgtcgcgcagctcggccccaactcccgcccctgcctcctccggctcgccgtggacgcgacgcgggcttcggtcgttcaggccggcaaagtctttcaccgggctgtcattgtgagtgcaggactgcaggttcgctgattccattcacaatgcatgcaaactggcatcttgcagtagcagtagctaggaggagcgcggaagaaaactatcaccattgatccgtttcttcgatactctattgtcgtagagaggatttggtattactggtttgtactgctgtttgtccgtggattaatcctgagacatgttgtttgaccatcgattcgggtgtttttgttctataaacgtttgtgctgtttgtcg

SEQ ID NO: 26993 - DNA, 3287 bp, Zea Mays
ccgcaatcgacttgcgtttctgcacactttcgtgtgccgcgtgcgcctccagctccatgtgacgtcggataccgcgttccgttccacttcccacctgtattttacaaccccctagttcttgcctctccttttgttgtctgctactagtagagtactggtactggtcgcgatttttccgctaaagaaaagcaccggatccattttcctctcgggggagcggattgggtagttgcctgcttattgactagttcttggcgtggcggctaactattgtgaattttgttttagtctgtcctgttggcttcttccttccgcttctcctttctggccgccgaaggcaaaccacgcggcttgttcttattgaatccatcaaggacgcaggaaagataggatcttcggctccgattctcggagcaacagcgcgaccgcagcgggttttggtgcttcctttctttagggttgtgtccttgcagaagttgctctgtggaatggggacctgtgggaggagagttctgggggtatggtttttcttctggttcttgttgacacttgagcagtgcacatccctgaatcgtgaaggtgctgctctgctgagatttaaggcggcgatcgaggcagacccatatggtgctttgttggactggaatcaagagagtttgagcccctgtacttggtttggtgtggaatgctccgatgatggactagtcatgtctctgagcttagcaaatcttggtctaaagggcgttttgtctccagagcttggaaagcttatgcaaatgaaatctctaattttgcacaacaactcattctatggtaccatacctagagaaataggagacctgcaggatctaaaaatgttggatctgggatataataatttcagtggatcaattccatcagagctacaacacatattatcgctagaatttctatttcttgaaggtaacagactttctgggcgttcaccagttggagtacaccaactcactaggatatgtgaacatgaaaatcaagtacctaccactaccacaaggattgttacaatcaaaatcagaagactgttaatgagcaaacaaaaagattttaaaatggtcaatattacggggcatccaataagatttccattgaattctccggcagcaccatctccttctgatcccattccaccccctcccgcaccaccatctccttctgaacccattccacccccttctgcaccaccaagccaagagaacaagagcaaaagttctgcaacactatatgcatcgattggagcagttattgttttttttatggtggcctcgtcagcactatgtttcttttactactgccgcaagaagactagcactgttgtacctttgtctgcaaacagttcaagcaggcaattgcagaccactaccatggaaggttgcttgatgtgctaatattttgctatgcatatttgttcaatgattttttttcctgaaaacctggcacgagctctgcctctcaattaaggaaggaaagaggtttatgtacaggttcgcctgaaggcctgaaatgccccaaagtgctcacacagaaaacaggaaacacacaatcccctccctttggggattagactaaatagccaaatcgggttactaaagaccctagttcgcacatttgctcaatgctcacattgctgtagtgctttgcattcctgtagtttgcatatgctttaggtgtacgctgcaatactgcttgcttcaatgcacaaatagaacctgtgttcctcttctaacccctgtttatgcagggataactttattcagacgatctgagcttgaaacagcctgtgaaggtttcagcaacataattgacacactacctggatttacactgtttaaaggaactctcccatgtggagcagaaatagctgtggcgtctacatcggtggcttatgcaggaggttggtccgctatagatgaagcacattacatgaataaggttggagctttgtcaaaggtaaaccataagaatcttttgaaccttgtgggttattgtgaagacgaaaaaccattcattcggatgatggtgttcgagtatgcttcaaatggatcactatttgagcgcttgcatgttaaagaagcggagcatctgaattggcagtcacgcctacggatagctatgggagtactgtactgcctgcagtatatgcaccagcagaacactcctgtaaccctaaagaatctaaacagttcatacatatacttgactgaggacgatgccgcaaaggtttcagacatcagcttcagcgttgacaagagagaagatgatgagtatgatgctcctgatgagtatagcacagtgtataagtttgctttgctactgcttgagaccatctccggaaggcgtccatattctgaagacgatggcctccttgttctatgggcacgcagatatctcacctgcgctagcccggtgatgggtatgattgatccaacgctaaattcagtccccgaggagcatgccagagcattatcagagctgattcggttgtgcctaagtgaggaccgaaggcagaggccgacaatggcagaggtcaccaagaggatgcaagagatcactgggatcactcaagatcaggcgattccgaggaacagcgcactttggtgggcagaacttgaaatcatgacatcatgaagcctgtcgactgtgcaactgacttgccccgactctacagctcagtccatcttctatgagaaccgtaggaaattgtacagtttacccttttttaatacaaagatacacagctcttctgtgtcgagaaaaaaaaatgtgtacagtttagtatttttaagcggggcataagttgtacagcagtacaggtatacccagggtcacaattcttccgttctttttttaaccaaatatttattttgttatttgttccggggtcaattctttcattctttttgtagccaaatatttatttcattatttgttctatggaaagcaaaacaatctgagaaagcctgcaaagtatttaggcagggcataagttgtacaggtatgcccgggcacacaattcttttgttttttaaccaagtatttacttcattatttgttcttggaaagcaaagaaatccaagaaagcctgtgaagtacaaggatatgccatttgtgctgtgaacagaaaacaactggaacctactgtagctattaactgaaacagtcgcagccacagcaagctcaaacgaccagcattgctggatccattttattgaaatggcaatcgctggtttgtcttttttttttcttatata

SEQ ID NO: 26994 - DNA, 1713 bp, Zea Mays
acacggtgtacaaaggtcccttggtcaagtgtaaagaaagaacaccgataaaacgccgtcgaactactccggacgggaagcacctccaatcccctcgcccccacggaccctcgccgccggggaagcgccgctcgctcaggaggacagccatggcgccggagccggaggatgatattatgaacgagaagaatccccgcccgctcgacgaggacgacatcgcgctcctcaaaacctatgggcttgggccgtactcgactagcattaagaaggtcgagaaggagatcaaggaaatggccaagaaaatcaatgacctttgtggtataaaggagtctgatacagggttggctccacctagccagtgggatttggtttcagataaacagatgatgcaagaagaacaaccgttacaagtggcaaggtgtacaaagatcataagccctaatacggatgatgccaaatatgttataaattttgttgttggactgggggataaagtgtctccaactgacatcgaggaagggatgagggtcggtgttgatcgcaacaagtaccagattcaaatccctcttccaccaaaaattgacccaagtgttaccatgatgaccgtggaggaaaagccagatgtgacgtacaatgatgttggtggctgcaaggagcagattgagaaaatgcgtgaagttgttgaacttcctatgcttcacccagaaaagtttgtcaagcttggtattgatcctccaaaaggcgtcctttgctatggcccacctggcactggcaagacacttcttgcaagagctgtagcaaatcggactgatgcttgtttcatccgtgtaattggaagtgagttagttcagaagtatgtcggcgaaggtgctcggatggtcagggaacttttccagatggcccgctcaaagaaagcgtgcattgtattcttcgatgaagttgatgctattggtggtgctcgttttgatgatggggtgggtggcgacaatgaggtgcagcgtacaatgttggaaatagtaaaccagcttgatgggtttgatgcaagagggaacatcaaagttctcatggccactaataggcctgatacattggatcctgcacttctgcgtcctggtcgtctggacagaaaggtagaattcgggctacctgacctggagggccgtacccaaatctttaagatccatacacgcaccatgaactgcgagcgagatattcgtttcgagcttctggcacggctctgccccaactctactggagcggatataaggagcgtctgcacagaagccgggatgtatgccattcgtgcccgcaggaaaacggtgacagagaaggattttctcgatgctgtcaataaggtcatcaagggctaccagaaattcagtgcaacacccaagtatatggtgtacaactagagagtgtcttcatggaatatgttgattttagaactccgggatcttttcggtgattgtgtcatcgtgaggttctatgcaaggattgttgtttgttttgaaatctggatccccagggattgcatcctgtaccacatgtttttaagacaaggttatccgcttggtggttcactgtacctgtggcaattgttgccgacaccgaactgaacataaagtcagaaacaggctacagtgagtgttgaaaaggaagaaatacagtgggtgcctgtttaaatatagcgttgtattactgactgaaaaagaa

SEQ ID NO: 26995 - DNA, 1977 bp, Zea Mays
cagaccagtctcccgctgacccatcctgctcagtgctcacttccacgcgggccccagcccgccacgagtccccgctcccacctgctcctcgccgccgttagcgcgccccgagccccgacagcctttctccttctagggtttctctctgtttcgtcctcatcgaatcggagtttcgcatggagtcatcgcggtctcggaagcggacgcgccaggcgcatgactgtgccgccgcgccgccaccagagcgagaagtggtagcgaggggtggcgcgtcgccaccatggagggaggatgaccgtgatggacacttcgtattcgaccttggcgagaacttgacccgccgatataaaatcttgagcaaaatgggagaaggtacatttgggcgtgttttggaatgctgggaccgtgaaacacatgaatatgttgccataaaagttgttcgcagtatccgcaagtaccgtgatgctgcaatgattgagatagatgtgctcaatcgccttgcagaaaatgaaaagtacagatctctttgtgttcaaattcagagatggtttgactatcgtaatcatatatgcattatgtgttggttgtttataatatttatcttattggccctcccagtacattgtatggaatgagagacttgtctatagaaattatgataaatcgcctgtagtatagtctttttgttcttcgctcgtgaaggttccctcatatggtcacaaattaaaaatattctttattcaatggatatcaatgattttgtcaggtttttgagaagcttgggccaagcttgtatgattttctaaagagaaatagataccaacctttccctgtggaacttgtgcgggagtttggacggcaactgttggaatctgtagcatatatgcatgagttgcggcttatccacactgatctgaagccagaaaacatactacttgtctcttctgagtatataaaagttccaagtacaaagaagaattcgcaaggtgaaatgcatttcaagtgcttgccgaagtccagtgccataaagctgatagattttggcagtaccgcctttgataatcggaaccataactcgattgtttctacgaggcattatagggcacctgaaataatattaggtttaggctggagttttccatgtgatatttggagtgttggctgtattcttgttgagctatgctctggggaagcattgtttcagacacacgagaatctggaacacctagcaatgatggagagggttttgggacctctaccagaggatatgatacggaaagcaagctcttcagctcagaaatattttaggagagcaacacgattaaattggcctgaaggtgctgtttcaagagaaagcatcagagctgtgaggaaactggatcgactaaaggacttggtatcgaggaacgctgaccattcaaaggtggcactggtggacttgctatacggtctcctacggttcgagccatcggaacgcctgacagcagaagaagctctggaccatccattcttcaggaacccaacatgacttgttgagcaggcttgactcatgtaactctactgaaggtggtggtaggaagcaggcagagccgtccccattgcaaagctgaaggcatcttgttcctctataccagagagtttgtgtaaggcctgtcaatggggcttcttgtggtgataaaactgatggctttagtcacccaatgtcatgtacactagcatttttcctagggagcttagttcgccagacggcgcttgtatgttgttaaccgggatacactatgagctgtgccccgatgccctggtgctataatccaatcgcaaatgatgaaatcaagcatagcgtgcgtccgtatagtttatgattgaattgtaccttggaatgattgccctacattcgttcattcctacctagcgttgttacttcgatggttctggggtgctgttgataggtgcacacggcttgggatttgttgcatc

SEQ ID NO: 26996 - DNA, 2197 bp, Zea Mays
ataggaggggttgacacgatcaatttccttgtcaatagttcagctgtcacatttttcttggagtctgtcaatgcctcaagctgctggaagacttttagaaagaaagatcctcacttgttttggactccatgtgctgctcactgtttggacctcatgcttgaggacattgggaaaattggagagttcaagaaatgcatttcccatgctcgccaagtgacaaccttcatatatatgcatggcaagcttcttgatgctacgagggagaagatatggggtgatttagtgagacctgcagttacaaaatttgttacatctttccttactctccagtccatatataagcataagcaatctttgagatgcctctttgttagtgatgactggactaggtccaagctatcaagcatagaagcaggaaagaaggtcacagagatacttctttctacaaacttttggaactcagtccaagattgtattcgagcatcacaaccactcatcgtgttgccagaggttgccgctgccatggatatggcaaaagcaaagatcacttcgggttttgaaggtagagaggcaatgaagaggaagttgcttgccattattaatcggaggtggcaagatcaaatggaggtgaagttgtatggggctgcattgtttttaaatccaaataagttctttgaacttcaaaaaaaggatccaacaaaaagggaggttggtaagctgagggcaacattcaatgaggtgctatggaagatggttgaagattatgaccttcaagctataatcagtaaacaagctgatgagtggaagaagaccaaagttgacatgaatatgtatagaaaggcagctgcactttgggttgaactgcgtgttgaactcctatcagccattgaatattatgcagaagataaagtcaattcagctcaaatttggcggctatactgggcaagtcatcagcgtttctttaggcatatgtgtatgtctgcaaaggtacctgctgtcgtgagattggcaaaagaagccttagcagaagaaaaatgtgtggtgattggtcttcagagcactggagaagctcgaacagaggaagctgttgctaaatatggcattgaattggaagatttcgtttctggtcctagagagcttcttcttaagctggtagaagataattatcctttgcctccaaagcctgattgttttgagcaaggtgaagaaaaagtccaggagtttcagcacaagcggcattatggatctgacatgtccttaaaaggacgagttagtaaacttggaaaaaaggaagacgtgagtgaagatgggggtgatgagtatcctccacattcagatcatgaatcaacagaatctgatgaggacttctatatgtgtcagatttgcaacactgaagaggagaaaaactcattgttttgttgctgtatttgtgcttcacgggttcaccctggttgcctcactccaccttcgactgacatcgtgaatgatgattggtcatgttatggttgcaaggagaaagtaaaaagctacttaaaagaaagagatgcttacttgactgaactctcaaagaggtatgatgctgcattggacagaaagtcaaaaattcttgacataatccgttccttggatttacctagtaatcctttagatgatatcatcgatcagcttggtggtcctgacaatgttgcagaaataactggacgacgtggtatgctaataagagcatcagatggaaaaggtgttatttaccaggcgcgaaacacgaaagaagttgcattggacatgatcaatatgcatgaaaagcagcaattcatggatggagaaaagaatgttgccataatatcagaagcaggatcagctggcgtttctctacatgctgatcgaagggcaaaaaatcagaggagaagagtgcacataacactagagcttccttggagtgcagaccgtgcgattcagcagtttgggagaacccatcgttctaatcaaacttctgcacctgaatataggcttcttttcacaaaccttggtggtgaaaagcgatttgcatcaatcgtggcaaagagactggagtctcttggagctttaacgcaaggagatcgaagggctggaccatcacttagcgccttcaactatgacagtaattatggaaagaaagccctgacaatgatgtacagaggaataatggaacaggttacca

SEQ ID NO: 26997 - DNA, 3105 bp, Zea Mays
gggcccaccacccgaacttcttcgcagaacaccagacagaccccacgccgggcccgttccagtggaccattgggctcaagaacagcccgacgtgggatgggagtgtcctcaaacccatccgggatccggccatcccgcacgcctcgtcctcactcctcagtcctcacccccgacacaggtctcgctggtagcttgccctcgtctgcgccacgcctcctctagcccacctcctgctcctcccccactcgcacagtgctcaatgccgcacaaaccctagtgcccccactccctgtctcgcgtggcagccatgggaaactgttgccgctcgccggccgccgcggcgcgggaagacgtcaagtcgtcgcacttcccggcctccgccggcgggaagaagaagccccaccaggcgcggaacggcggcgggggcggcgccggggagaagaagcggctgtctgtgctcggggaggaggggtgcgacgttggcgccgggatcgaagagaagtacgcgctggaccgggagctcgggcgcggcgagttcggcgtgacgtacctgtgcatggaccgtggcacgcgggagctgctggcctgcaagtcgatctccaagcggaagctgcggacgcccgtcgacgtggaggacgtgcggcgggaggtggccatcatgcggcacctgcccaagagccccaccatcgtgtccctgcgggaggcgtgcgaggacgacggcgccgtgcacctcgtcatggagctctgcgagggaggggagctgttcgaccgcatcgtcgccaggggccattacacggaacgcgcggcggccgcggtcacgcgcaccatcctcgaggtcgtgcagctctgccatcgccacggcgtcatccaccgggacctcaagcccgagaacttcctcttcgccaacaagaaggagaactcgccgctcaaggccatcgacttcggcctctccatcttcttcaagcccggcgaaaagttttcggaaattgtgggaagcccatactacatggctcctgaagtcttgaagaggaactatggacctgaaatagacatatggagcgctggtgttatcttgtatattttgttatgtggtgttcctccattttgggctgagactgaacaaggagttgcacaagctattcttcggggaaatgtagattttaagcgagaaccctggcccaatgtttcagataatgctaaagatcttgttcggcagatgcttcaacctgatccaaagctcaggctaacagcaaagcaagttcttggtaggttgtatctgtatatcgaacttattaactcagtgcttcattatatggcacattgcatcagatctgttcacttgaaaggatcaacaccagtgttacctagacaccatgtcctttttttgccaagtcagatacccaacacctatgtttggatacttggattccaagtgccatttggagggtcgcaaaaaaaatctggcaaatcggaccccctcacccgaatcggacactgataccacacagatgtccatgtaacatggatcaaacatagttttgaagtgtagttggtgcaacttcttcaggatctactctgtatccttgttggagaagttgatgcaactatagttcgggccactttttttagcttccaagcgtgtttactacttgcttaggtaatctgagggtacagtcacgtaattctatgattgtgaaagtgactagtgacaaaaaaattgatggatcaaagttgaagtaaaaagtggaagtaaatgctcttctgttgctcatacttctagacagtctctggagtcagatgtgttttcttactgcacctcatggcaactctagttagcagttaattgcagatgtattcattctcaaaaggaaaagctggtaaaagaagcttgttgtttatctaaaaaaagagatgattggtattgttttagcaattgagagaataccattctctgcacttctatacatacagatcacttggatgaatcatgtaccacaaagtctgtttgattttttgctattttatgcttcaaatattcgagctacatgcttttatttatcaggatatcggattgtaaccaagagctatttaagttttcacactgtgtacatcatagataatgttcaaagtccttatcgaattacctagcatcccattgccccctcccctctttgggggttcaggtaggtactctaaagtcccccctccccctcttctttgtttctgttatctcagagcatccctggcttcaaaatgctaagaaagctccaaacgttcctcttggagacattgtaaagtcaaggctgaaacagttttcaaggatgaacagattcaaaagaagagctctaagggttattgctgatcacttgtcggctgaagaggttcaggacataaaggagatgttcaaggtgatggatactgataatgatggtatagtttcttatgaagagttaaagagcgggatcgcaaattttggttctcatcttgcagaatcagaagtgcaaatgcttatcgaagctgtggatacaaatggtagaggagcactagattacggtgaatttttggctgtctcgctccatttacaaaggatggcaaatgacgagcaccttcggcgggccttcctatttttcgacaaggatggcaacggtttcatcgagcccgaggagcttcaggaagccctgatggaggacgggggagctgataccatggacgtggtcaatgacatattgcaagaagttgacacagacaaggatgggaaaattagctacgacgaatttgtagcgatgatgaaaactggcacggactggaggaaggcatcgcggcactattcaagagggcgcttcaatagccttagcataaagctgataaaagacgggtctgtaaagctgggtagcggccttttccagtgtcgctggggagcatctgctgaaggattgcacacctgcacgcctgctcatctcctccggtgtagtacctgacgctcaaaatgttgtaaaaatgttttggtgttgacctcaaatataatgcaatttgctcgctggtaccgtgtgctgtcaccctatactcatttgcacctacaaatcggtgaagagtaactatgacagt

SEQ ID NO: 26998 - DNA, 1949 bp, Zea Mays
attagacagaattactggagatagtctcatgcttatgcgtagacagattcgcacacgacgcacgaaaccagtgaacgtaggagggtgggtcttctcttcccccttcgcttcctcgtgcagctccgaccacgggctcgtccctgcctcggacgtcgctgcacggttacctccccatcggagctactgacctggggaagcgttcgtcgtcggagcatgctgatgaaaacaggagtggcgctgcaattggggaggaattgtcgcagggtgagcgggagtccttagtggagcagaatggtcagggtggcgacgtgaattcaagccaaacgtctgcagcttcaggaaagatggatgacaacgagccggatccagcttcttccagtgataccacaacgattccggacgaggatacatctaatgaatctcaaaaggctgagcaagataattgtgatctatatcgtggagagtgggttactgattcttctgggccactatacacaaacaactcctgccctatcatcacacagatgcagaattgccagggaaatgggcgaccggacaaggactatgaaaattggagatggaagccagaacagtgtaacctcccacgcttcgatgcaaggaagttcttggagttgatgagaggcaagacacttgcgttcgttggggattcagttgctcggaatcagatggagtccctcctttgcattctgtggtagatgtcccacaaaaccgaggcaacaaaaggatgcacaagtggctcttcaaatcaactaaaacaactatcgcccgcgtctggtcttcttggttagtgcacaggtcaactgaagctgtggggattgctcctaagggtattgataaagtttttctggatattcctgatgagaccttcatggagttcctcccaaggtttgatgtactcgtcctttcctctggccactggtttgctaaacgatcagcctatatcctgaacgagaatgttgttggagggcagctttggtggcctcgtaaagcaggaaaaatgcaggtcaacaatgtggatgcctttggtatctctgtcgagacttgcctaactgctgtggtgaataacccaaattttacaggcctagcaattgtgcgcacatggtcacctgatcattatgaaggcggagcatggaacaccggtggatcatgcaccggaaaggtcaagcccttgaatgaagtggtgaggaacggatttaccgatgcgatgcatgaaaagcaggttgcaggcttcaggaaggcagtgaagaatgcaggggaacacggttctaggttgaaattgatggatatcactgaaccctttgccttcagggctgacggtcatcctggcccgtacagaagtcctgacccaaacaagaagacacagagagggccagatggaaaacctccacctcaggattgtttgcactggtgcatgccaggaccagtagacacatggaatgagatgttgctagaaaccattcgaagagagttcgagacagatagaacctgaggatagaaagtgctggctacttcgccatcatgtattcatgttatacattctgcgctgcgaactccatagggatgtatcgctgcacttagtagcatgttgtgtttaccatagataggaaggaacaaagcttcggatacgtaagattcactgtattttctctgacacgattcttggacatcattttcttgccaaattttgtgggcctgaatcccaaaaagtgtcaactgatatttgcattctgtccttgtactagtcaacctggtttggtgtaatagaataaaatgtaacaaccggaaagatgagaattgtttgccgaaaaatcgtctgtagctgttttttttttgtgtgtttttgtacaaaaaaggtgtactgctcttcttgtgccatacatgcagatattctagaaattgcagatgcggtttatgttttggggcgtggt

SEQ ID NO: 26999 - DNA, 1314 bp, Zea Mays
ctcaaaccaaacagcctattagaacatggcctagttccacgttccgggaactcgttcccaaatgaggaacaggagcattgtggaacatcgctccaaacccagtgtgaacatgacccagatcaaaggaatatatgctggagatggcatggttatccattttacaagggcagctggacatgagattggaacaggaacattcttggactggttcctttatagctcctctccggcagcaactgagggtcctccctgccagaaatgtgggcacctagtcaagtccgatggggtcatcacctcttgcctcgattgcttcttagatgggggcagcctgtacctctttgactacgctgtgtcgcctgctttcttcctcgccaaagcacggggaggaacgtgcaccctggctgcctctgaccccagtgacgttgtgatccaccgtgcacggtacctcctggacaatgggtttggcatgtactccctgttcaagaacaactgcgaggacttcgccatatactgcaagactgggctgcttgtggagaccgctttcagtgttggccgtagcgggcaacttgcgtctctgactgctgccttcagcgccgtggcctcgtcccccttgcgtttcctgacaaccagtgctggtggcctggcaattgtgaccagcggcatgtactgtgtcgggcggtatgtgtcggatattggtgtccggcgtgatgttgtcaaggtccctgtcgaaaggcttgtggagcagaatgttacttggattcctcagtgtgtggctacagagacagatatcgcggcaggagcaccgcagcagcagttggaggttccttgtgcggttgccgaggaagcatccgttatacagcccgcggcaccgtgatccattgctgaaatgtcatcatgtaccaggtgttggcatgagacaggacaactggaactacgtacttgtgtggaagtacatgtaatgatgtatctggtggtgttatgcaatccattgctgctgctgctaatgttgcaagcaatgatgatgatgatggatgtggttccatgaccgctattattacagaattgagaagacctgtatttgcccttgatgattaatgatttctgttatacagttgcttatggatgcatctgattgtgcattttccgagtcgccatacattagcaatcttgacacgctcttcactcagtccaaaaccacaacttatatctagattaaagtaagcatcacgagcaattctcttggaatagcgcaaaatgaactgattctagacgttgcagtgtacgccccttcagggcttgttcggttctacatcc

SEQ ID NO: 27000 - DNA, 3172 bp, Zea Mays
ggcgaggcctacatagcgaggcacgcctcctgcagtcctcctcctcgtctagtcatctctcctccccctctcatcagacatcagagcccttcttcctccgcctccccttcacccccatctcgccatacgcttatcgcccatcccctgatcaccagccgccgccgccaccgcctcgatcccgtccgatccaatccggttttttccttgataatgcgcgtggcaaccttgtcagttcaatccgtccgtgaagaacttatccttattttcgtttgcatcgcatcgcttctgcgtttgggggaaaaagggccgcgtccttgatgtctactatcgcgaccccgccgccgccatcggcggcgcaagagaaggccgccagccggaataagcgaaagtaccgtgccgagacaccatccacggagttgggcccattcgggctggagtacccactgacgacggactgcgtgggattcgagtttatgtcgcccgagaaggttgccatggcagccgcggtagccgccgctgagggtgtcagccttgacctcctccagaactcgtgcgaaaactgcaaggatctccaccctactgcggaggacttgttggagtgccagcgatatgtgaattggggtgacccaaatgagatgcagctggaggagatccttctcaagagtctggacaccacctttgacaatagtgtgagtctgatcaccacaatgggctactctgaggcggccgcacgtgctgctattatgcggacagctgcgcaatacgactggagggagagccttgctgggtttggagaggcggcggttgaggttctcaagacggaaggggacatgttgccaagggagggtgcctctgttgaagacatgaggaagattgaggaggctgtgcttggcagtatggttacgttggtaactgaggctcagccattcaacaccccaggcgatgtaatgtattgcttgcttatgtcggatatgaatgtggcaaatgcatgtgccatggactataacagtttctccctcccagctgtgtctgctcaagttattgcccaaccagtcgcgggaaactacgaacccggttcaggttcaaatttgtcagtttctattaccaacccgcagactggcgttactttccgtggaaaacttaccccagtgccacctggctcgtatggtgctataaaagctgattcatcaacggcacaagcaagcccgaatgtatcaaataccgaaccctcggtatcggacaagactcagtgtgtcatcccgaatattgagccaaaaaaacaccatgttcctatatgtgatcattcagaggaccaaccatttgttgctgctgcgacacaatctgtgaaaaatgacaagtcgtccccaagcaagagggggggctctaagagggactcctttcatcggcagaagttgacgaactatgataaaagttcccgagcattgggttccaaaggctctcttaggtctggcaagcaaagctcttcagccagtgcagtattggagaggaagtgcaggtcattttccgattctactactagcaacttgaagggctcatcaagagttgctaaagggtttgctgcaagcatatctggatcagaagtatcagttgacctttcctttactggtaccctttccccttctccatcatttgatgccaaggtagttagtaactcaaactcagcacctgctgctagcacagatctttcattggcattgtcctcaagtgatagtttaacaccatctttgagtcatgattccaatactgaggtagtggactctagtagcaaaattaatttttcatatgatgaagaacagaaggtctggatcccacaagataaaaaggatgaaattgtcttgattcttgtccagaggcagaaagaactgcaagcacatacacgtgactggacagactgggctcaacagaaagtgatgcaggtcgcacaccgacttgcaaaggagaaggatgaacttcagtcactcaggaaagagaaggaagaggcagaccgtctgcaagaagagaggcatcatttggaagagagtactcggaaaaagcttctagagatggagtctgcaatttctagggcaaatgctcagttggagaaggcagaagcttctgctcgcagacgtgaggttgagaatgcacaacttacgttacagatggaagctgcaaagcgacatgcagcagagtcagcaacaaacatttcagagcttgtaaagaaggatgagaacagtcgcaaaaggtctcagcgttggcaatctgacagagccctgttacaagaggatcttgcagcacaaaagagcaggttatctcgggtccaagaacaccttcagcatgctaaagagctaaaggatcaagtgcaggcaagatggaaacaagaggaagctggaaagattgaggtaattgcccttgtaacctcaaagaagaaagagagggagcaaattgagacctccatgaggtcagaagagaatttactgcatcttaaagcagcgaatgacacagaaagatacaagagtgagatccgtgctcttgagcagcgtattgcacagatgaaggtttctttggactcttcaaaggttgctgcccccaagtggggtgctgacaataaaacatatgcattgcatctttctgaagggagaaagaacagcagtgcccaaattttgtccaacatagcagtaccccaagatcccagttttgatgatatacagcgtgaccgggagtgcgtcatgtgcttgagtgaggagatgtccgtggtgttcctcccttgcgcccaccaggtggtctgtgccaaatgcagcgacctccatgagaagcaagggatgaaggaatgcccttcatgccggacccccatccagcgcagggtgcgcgcccgccccgcagtgtggtgcaggagaacggacgagctcgttgacggccccaacgcgtcccacatctcggcgctggcgctggaccggtgggagtcgcggctggaggacatcttcgccggccgcccgtacgacatgctcgacgccgtgaagggtcatatctagaagcagcagcatacagtaggaaggaaggaaggaaggaaggagtagcacctagcgacgcacatctgaatcccgaggcagatgtttgtgtctagttcccttgacaaaaagaaacgttttgtgtctagctgagaaggaaatttctg

SEQ ID NO: 27001 - DNA, 1817 bp, Zea Mays
aatctcctccctgctcgctctcccgttcagacacagcgcgtcttagcttctgggagaagcggccgaggaatctgtcatggacatgtcactggagatacatgatccacccaaaagcctcctgcattgggagtgttgaggcacaagcacaacacacgcaggccagccgcagtgatgcacaagccgcctcgccgccggtcactataaaaacagacgcctcggggcctcaaaccatcatcaactgatcaaacagacaaccctatactgctacaacacacacacagacacatgcataatggttggtacatggtaaaactatagcaatctaaggtcgatcgctcgtctagctacaccactatcaccagtaccacctccatggtttcttgactgatagatagacggacgagaatgaagaagctagctagctactagatatatcatcagtagagtgttcagttgttgatgatggcctcctccttgcccctggtcaccactgggctgcgccatcctccgcagcagcagtcgccgagggtggtcctgcagagcgaggacccgaccgagtggtgcgcgtgggcgcaccaggggcaccgcctgtgggtggccatgccggactccttctgggtgtacacgtacaaggtggaccggtgcccgttccggggcaaccacgtgtggacgacgtgcccgtacgcgcactggggggagcgcgcgcgccgccgcgaccccagccgctacgcgtacgccgccgcgacgtgcccggactacgccgactccaagcgccggaaccgcctggccgggtccaccgcgccccccacctgcgcgcgcggcctccgctgcggcttcgcgcacggcgtcttcgagacgtggctgcaccccaccaggttccgcacccgcatgtgcgaggccggcgccgggtgcagccgccgggtctgcttcttcgcgcactgcctcgcgcagcgcaggcgcgaggacgacctggtcctgccgctcgtcgtcttccccgccatcaccatgccgcccccgctaccgctaccgctgccgctgccgccgctggccttcgttgtcccgaacaacccgctgccgcccgtaccacccgccctcccctgcccccgctcggtctcggtcgtcgcccatcaggttgatcgcgtcacgcaggccatgcagcagggccgcagcgtgcgcctgcttacgcgcgccgatgccgatgccgcttcgtcgtcgtcgtcgtatttttcctcctcccgtgcccctgctagtaatgctgctgtggccacggcgccgggcgacgacgaggatatcgacatcgtcgccattgtcaccggctgctgcctcgcctccgaggaagaatctaaggctgccggcggcggcgactacccgcacttggacctcaacctcatcatggacatcgtgaggatgaactagatagctacaaattaaagatatacctgccagtgcatggcgtccatgcgtgcgcttggatggttcggcgccgcgacaggtggaggaggcgccgccgaaaggagggacgggacgccagccgcagcagcaagcatcatcgcctcgtgcccctagctagctagtatacactggcacggcagtatcgtataatacatattattatactagtataatgtaaggtgtcatgtcctttattttgaacttaactggattagtaccagatggagttttggacatgtattgtggtgttggatccgtctagctatatatgtgatggatctatatatgtgtctgtagctatttgtgggcttgtatgaattttgtggaatgatgaataatatgtgaattaacaaatatgtttacgt

SEQ ID NO: 27002 - DNA, 587 bp, Zea Mays
aacccgccactttgcccactctcctcttccttctttgctacccatttcgtcgcagtagtcggcagtcgaaaccctagtcccctcgctttccttccactcgccgtcgcggcgccgatagagccagagctgaaaggcgtaggaaaagctggtggaggaggggatggaccggatcgtaggcagcaagtacaagctgggtcgcaagatcggaagcggttccttcggggagatctacctcgcgacgcacgtcgacacctacgagatcgtcgccgtcaagattgaaagcagcaaaaccaatcatccacagttgctatatgaggccaaactgtacaatgctcttcaaggagggactggtatcgcaaacataaaatggtgcggcattgacggcgatgaaaacattcttgttattgatttactcggaccaagccttgaagatctgtttgtttattgtggccggagattctcactgaagacggtcttgatgctagcggaccagatggtttatgtaattgacttcgggcttgcaaagagatatcgtgattcagccaccaaccgccatataccttatagttaacataattgtttttaca

SEQ ID NO: 27003 - DNA, 2310 bp, Zea Mays
ttcccgtaccacccgcttcttccaactccaactctccaaggcgctgtgctggctgctggcctgctgctaccgactgccgcaactgctccgcatcccggccttgattagcagcagttacgcccgcgcaggacagcggccttgattagcgaagtattcctttgccctacctctctccctaccccgttccgacgcggcggccgttgagcacctgcccggaagctatagcttcggccatggcccaagatgccggcgacggcggtggggaactcccgccgcccgtaaagaagaagtcaccggcggaggaggaggccgagaagaggaggaagaagcttacacctgggagcttaatgaagggcattatacggtctgggagcggtgatgccacccctgcagagggcgatcaggttatacttcattgcactactcggacaattgatggtatcgttgtaaattctacaagaagggagcatggaggtaaaggaatcccactcagatttgttttagggaagagcaagatgatcctaggctttgctgaaggcttcccaacaatgctgaagggtgaaattgctatgttcaaaatgcagcctaaaattcactacgctgaggacgattgtccagttgcaactccagatggctttccgaaggatgatgaacttcaatttgagattgaaatgttggatttctttaaagccaaggttgtggcagatgatttaggggttgtaaagaagatagttgaagaagggaagggatgggaaacacctagagagccatatgaaataacagcacggataactgcaagaacagcagatggaaaagaaattattccgagtaaagaagaggcatatttcttcactattggtaaatctgaggtacctaaagggcttgagatgggcatcggaacaatgtcacacaaggaaaaggcaattatttttgtcagtagtacttatttgacgaagtcctcactaatgccacagcttgaaggccttgaagaagttcatttttacattgaactggttcagtttatccaggtgagagacatgcttggtgatggtcgactaataaaacgacgtgtatttgatggaaaaggtgaatttccaatggactgccctcttcatgatagcctattaagagtgcattataagggcatgctccttgatgaaccaaagtcagttttttatgatacacgtgccgataatgatggtgaaccgttggaattctgttctggagaaggcttggtaccagagggttttgaaatgtgtgttcggctaatgcttcctggtgaaaaatctattgtcacctgcccaccagattttgcatatgataagttcccaaggccagcaaatgttcctgaaggagctcatgttcagtgggaaattgaactacttggattcgaaatgcccaaggattggactggcttaacttttgaagaaatcatggatgaggcggacaaaataaagaacacgggtaacagactgtttaaagaaggaaaattcgaacttgcaaaggcgaaatatgataaggtgcttagggaatataaccacgtgcatcctcatgatgatgaagagggaaaaatctttgctaattcaagaagttccctacatctaaatgtagccttttgctaccagaagatgggcgaatacagaaaatccattgaaacatgcaataaggtgctggacgcaaatcccgtgcatgtgaaagctctttaccgccgaggaacgtccttcatgttacttggggacttcaacgatgcaaggaatgattttgagaaggacgctacagctgccctccttaaacttaagcagaaggaacaggaagccgaaaagaaggcgaggaagcagttcaaaggactctttgacaagaagccaggagagatatccgaagttggtgtagaatcagacggtggaaaggatgcaggtgatgcaagagtcaatggtggtgaggcaacgagtgctgatagaggtgtaaacacaaatgacagtccgaccagcgaatcagagtacgccttcgaggaagagaggcccgggcttcttggcagcttgtggccctctgcgaggatgatcttctcgtctcttggcatgaacaggtgcgcgatactctgaggtgtccagtgtgtactgcggagacatccaaaatcatggcagtgaagaggaactgccccgaggtttctggtatttattagagtaagtttggatgtatggaaaatgaacagtgtgcaagatgtaaatgagaaacaatatgcagggaattttaatagctatctaggattcattatcttccacggcataaaataatttcccaggtttcttctag

SEQ ID NO: 27004 - DNA, 1085 bp, Zea Mays
tggtttcttaggcatgtcatcaagttataaacttttccccaaaaaatgtttatgtacattactttgcaattgctaacctgttgtgcatttgattttgcaatcgtaaccatcgcgctatccaaatatacctccaatcaacaggatcgagctacgcaaattgctcctacattctcacatacacttaggggtgacaatgggctctaaattttaaactataatatttaaggttctgatcggattaggatcaggctctatttctattcatttttgaactagatttttatttagggagctaagaaattatgaagaaacatttggatcgcgatccattaccacccctttatacactccattctgatttgcacaacatataacttctatctggaacaggtatgctttctccggtaagcaaaatataacatgccttttccatattcacaacaaaaatacacaggttcattttttttccatcgtgtcccctaactgggaaaaaataagaaaagatatgtgaacaccaaaaggggatgcaactgcgaactgtgagaaattttccacatactacgctcacattgtctggggcaatgggatatcatactcatacagtaatactgctgcctgtcgatcttaacaaatttcattcaagaactagggcatgctaatgttcaaaagagttgtcagcgattcatgacacctggtagcactacaaccagcaatgtatggatgaattgaaggaagtaaagaaggcagacaatcttacagaaactttacagaaactctgcatcttgaaactgccatgattgacaaagaagctggatgcatcatgtgcattggtgtcttcttatcaccatgcattaatgtgaagcaagttcatttgttgactaagaatggatgaacacaaatcagtggagttcgttgcactagagatggaggttggagaggtgtggtaggtgtcaatatggctttgatacaattttgccctacaatctttgtacggaacaagaaaaatgacattgtacgtggatactatattgtaattcaataattttttctaaataataaatatatttgtttatagtttgtgtatg

SEQ ID NO: 27005 - DNA, 2397 bp, Zea Mays
agcccttgacatttatcaccaagggacaaagcacactaactgctttatactctgggacataaatactaggatcttacatcgtttctggacaacactacagggatcttgtgaagacataggatggttgcaaagaactcgggcatcacttcgttcagttgatgggacaggtcacttcaaggagattttgcatgagataaggttttggatatgaacatgatgatgctaggatgaccaatataaatttgtttaaggaatttactgccctaagcagggtaagtgtttcctgaactacaattgttttttttggctttttgcagatctgcacatctgaatttcctattatcctgttgggctgcctcttttttggagtgactgtagcaaccacttctaattcattttcaattgtattgaactggatgttgaccttcctagcataattagctctattttttaaaaaaatagttcattatgtatgtttctattttttatggtaccgcctatgtttatataaatttagcctagcactgcttgaataacaagtgattgaatgaggctcatatgcaaccattaaatcaatatttatgaaccaatgtttgttaaagtaataaaacatttacaaggaccatcgatgacctcaagaagctggtggtggcgtagatgggaacgcaccccgagaagatttgcatctagaggtggtgaccccacctctgtcctcaaccgccacctcgtacctcgtcttcggcgccgccggctcctgccccccttggcacgccttcggggtcctcgctggcggcaagcacctccgtcccggaggcatctgccgctgcagcatagaccaccgcgtcctcgctcagcagcaccgatgtcgatgatggcaacaaggaggacggctccgcgagcacccccgagatctgctgctgccactcccacgcagctcttgcttgtgagatctgtgtgcaggttgatgtcctcgtggcgccacgccgacctcaccgccaccaagcgcgccacccatgtcctcaccgacctcgccaaaaactataagaataggtgtagtcactgtcggggtgtacatccaattgagttttgagttggtgtttagctttcccttaccagggacggatcaaagcaccgtaataagtgtcgatatagctctttcaattgcgcctattgttttgtgcgggctatatggatcaaggaaccctctttgcagcagaggtttgttttgtgttctgctgctagtagtcgcatgtcagtttaatcttttgagttctggaagctgttggtcccttaggtgtttgggagatccttttgaatcgaagcacacacactcaggtgctatgacctttggcatttcatagttgcatatttaactggtgtgcgaagagcaccaggatagcacccttgcagcaggaacttacttttggttgcttttctgttgcctgtcatatcccgatatttgtttcctgcaaatttactttgtttaattgtattctattgattttacagcttttgtacttgtacagttacattgtcatctggtttctattgcacgtgtagctgattagttgtagtcactatcttgcaagcatagatattagggaggtattatgtccagtcaagttttgtgttggctatgtgtagcgaattaggattgcttttcctgggatggatcagagcacatgtactgtggcgatatagttgtttcaatagtatagttgccaaattttatgtgtgtgctatatagaccagggaacccacttagaagcagaaaattttctgtgtgcgcgcgaaattttctgtgtgtgctaacaaattgcaggcaaccatcttaacaacaaaagaggctcgtacaatagcagagatgatgctaaaccacttgtgcatgcaaagtatcaaaaaggagaccagacacatgttgatgaaacatctaaaaaggtcctggaatctgaatgcacaaatgtggagaccttatagaaaagggcacaagcacacatgcatcttgctgatcttgatttggcggaggcagacatcaagaaagctctagataaactacagatccagacatgttaatcatatgtactactgaagttggcttaatgaaatcttttgagaataacttgcctatttaacttgtgtcctttttgatggtggcgttgtttgttagctacaaaatcatcaatcaaagattgtaattatatcatatcactgttttctattaatttttaagctgccgtagcaaggcacgggcatcctactagttcccgtatatggtacaaaatgcaacattcgtctcaggatttatgtttctcgactatggtgacaggcctgttttcatccttctttcttcgttgtcttgtattctttttgtcaagttgggcatccaagtatctgcca

SEQ ID NO: 27006 - DNA, 1386 bp, Zea Mays
cgcgcgtcttctgggagcgcgttgcggccggagcaagctcgctagtaggggaatcagatatgccacaggctgcgcgatggtgttgtgggtcttcggctacggctccctcatctggaacctcggcttcgacttcgacgacaaaatcctcggcttcatcaagggctacaaccgcacctttaatctcgcttgtattgaccacagaggcacaacagagcatccggcgaggacctgcacgcttgaaaccgacggcgaggcgacgacgaggccatatgccatggtacaagcctacaaggagaaagtttatccaaaaaacaagttgaactgctgcagcatgagccagaagttggttatgaactaccatataaggttcccttccagagtctcccatgctatatcgtgaattttcccaagcaaagcacctgccaggcgccaatatgccaccggggtagccattaaaatacttaaaatcaactccaaggctcatcgaacgttatccagtgcttcaccgtgtttctgaactccctaaagcagatgttgtcatgttggtcagtttggtgttggtttaatttctacgggtgtcgtatatcagaggtaaacaatattagatgtttatttatttgtttggaggtatcagttttctatgaatgtacaactgtttgctttgtgctttatttagacttctaatttatatcgatatttatgacatgtgtttacctgttttgtaagtcaatcaaaaagtttgactagcaactaatggtgcctatacatgtatttatggagcttcttctggtcatatgtgtagtggatctctcctcctggtaactagctagatcatctattgtttttattttaaatttgaaaatttacttctgatttgcaaaacaaatggatatagttgttcccttcaatcatgtccaaggtcaagaaccattcaggtcataaacccctacgacaggggccacgagggctcatcttcgccactgcccctactcccaccttctgcatgtcctgctcggtgctgttccattccctagcgatgttctccggctaaagacgcttggagtttgtggtgtggtgacacttaatgaatcatacgagaggcttgttcccacatccctatacgaggataaaagaagtaggcgcaatgaggagtcgtgttcattcacaagctctaacagagaaagttggggcagatgttcatctttaggtgcagccagtgatgaattattctcaggcaataataatgataagcagatatgagcccttgggcctccagttcgggcaacaagcatatggcaaagagagtgagggggcatgatattgttttccaattccaaactgtgatgatgtgtagaggcaaaggatccttcagagttcatcactcat

SEQ ID NO: 27007 - DNA, 1612 bp, Zea Mays
agcgccaccagcctcattcgtcctcctcgccccatccgcatccgccgccagcagccgaatgcctcacaggccgacctcccgccccatccgcatccgccacatgccacacatgtccaacaccgccagcctcatccgggagccgtgagcaacctcccactccccaccaacgcgccttcgcctcacctcgcgatgcccgagacctgcaatagtcaccgccttcccctgagcggctgagatgcagctccacgcccgtctgcgtccccccaccgcaagagccacgttgtgcctgccgccagccccgacacctccagatgttgcctctatccatcatccgagcttgccgcccccgcccccaaacccagaccccctgcaatcgcgaggaaggggaggacgctgttgcgcgtcgctaagcatcttcgcgcccctcagtgctgctaaggagccctatctatccctgatggcgccccaaccctttgttgaagttgatcttttgaattatggtgtgatagaaggtgatgaatcatgtaaacatttttctgaactaaaagtcttacctccatggatgatcaaagatggcacgaatcttaaaaaggaacaaagaggagagaaaattgagtcacaaaaacttgaaaaatatgaagccagagatgacaagaaacatgactcgaaatatgatcaaagtgtataggaagaatacataaatgcatattatgaggctttgaggaaaaaattggaagaggaagaagcaaaaaagcagaatgtagcatgaaggcaagatttttgtccctgatgctcaaagggaacgccaagttggtaagaaatacaagcacgatgatgatggtgaaggcattgaataggaagagcatcaacctacagttgtagcatttaactcaaaagtttcccttgaaattcaagttgattttgagaagtatgaagggatgattgagttcatggagaaggtggtaatacaattgattctatggagctcactggaggagcactaccttttgttagttgcctgcaagaatgtctttggaatccgatctgcttcatggtgcatcttatcctcgattgagtacatggaagaaggttgtgtcaacatggattgtgtcactctcatcgaggactaccataacaagattgaatttgaactcaataagatctatgatggaatcctcaagctctttgcttcccaccttcccccctcactaacagttccaaagtccaaggtcttctacctcaagatgaagggtgattactacagttcaattcatgtgtatcaggtaccttgcggagtttgaaacttgatataggagaaaagatgcagccaagaataccatggtggcacacaaaattgctcggttaatttgcttatccttaaattcacggttctcgtattaaatttgctggctaggacattaacctttttatatgtacaatcgatcatttaattgatgtgtttctaaatgaaccaaacaatgagtggcatgctggcacttgaggggatcagtggcgacaataagaggagggttagcattgccctgcagatactcatgaggcctcgactgctcttcctagacgagcccaccaatggtcttaacagagaacgatc

SEQ ID NO: 27008 - DNA, 3417 bp, Zea Mays
gcaggtaggagatttctatgaagctatcggttttgatgcctgtattctcgtagagcatgcaggcttaaatccttttggaggtttgcgttccgacagtattcctaaagctgggtgtccagtcgtgaatttacggcagacattggatgatttgactcgatgtggttattccgtgtgcatagtcgaggaaattcaaggcccaactcaagcccgtgctcggaaaagtcgatttatttctgggcatgcccatcctggtagtccttatgtatttggtcttgctgaagtagaccatgatgtagagttccctgatccgatgcctgttgttgggatttcacattctgcaaaaggttattgcttgatatctgtgctagagacaatgaaaacttattcagctgaggagggcttaacagaggaggctattgttactaagctccgcatatgtcgttatcaccatctataccttcacaattctttgaagaataattcttcagggacatcacgctggggtgaattcggtgaaggtgggctcttgtggggagagtgcagtgggaagtcctttgagtggtttgacggttcacctattcaagaacttttatgcaaggtacgggaaatatatggccttgatgagaaaacggtttttcgcgatgtcaccgtctcattggaaggcaggccccaacctcttcatcttgggactgctactcaaattggagtcataccaactgagggaataccgagtttgttaagaatggtgcttccttcaaattgtggcgggcttccatcaatgtatattagagatcttcttcttaatcctccatcatttgaggttgcagcagcgatccaagaggcttgcaggcttatgggcaacataacctgctccattcctgaatttacatgcatatcagcagcaaagcttgtgaaactacttgagtcgaaagaggtcaatcacattgaattttgtagaataaaaaatgtccttgatgagattatgctcatgaacagggatgctgagctttctgcaatcctgcatgaattactggtacctgcttctgtggctactggtttcaaagttgaagctgatatgctaatgaacggatgtagcattatttcacaacgaatagctgaagtgatttctttaggtgttgaaagtgatcaggcaataacttcattggaatatattccaaaggagttcttcaatgatatggagtcatcttggaaggggcgcgtgaaaaggatccatgctgaagaagagtttgcaaatgttgatagggctgctgaggcattatcaattgcggtcattgaagattttatgccaattatttcgagggtgaaatctgtagtgtcctcgaatggaggtttgaaaggagaaatcggttatgcaaaagaacatgaagctgtttggtttaaaggaaagagattcataccaaatgtatgggctaacacacctggtgagcagcaaataaaacaactgaagcctgcaattgattcaaaaggcagaaaggttggggaggaatggtttacaacaagcaaagttgagaatgctttagccaggtaccatgaagcttgtgataatgcaagaaataaagttcttgagctgttgagaggcctttctagtgaattgcaggacaaaattaacatacttgtcttttgctcaacactgctcatcattgcaaaagcactttttggtcatgttagtgaggctcgaagaagaggttggatgcttcctactatatctcccttatcaaaggactgtgttgtggaggaaagttcaagtgcaatggatttagtaggactatttccttactggcttgatgttaatcaaggaaatgcaatattgaatgatgtccacatgcactctttatttgttcttactggcccaaatggtggtggtaaatctagcatgttgcgatcagtctgtgcagctgtgcttcttggaatatgtggcctgatggtaccttcaacttcagctgtaatcccacattttgattccattatgctgcatatgaaagcctatgatagcccagcagatgggaaaagttcatttcagattgaaatgtcggagatacgtgctttagtcagccgagctactgctaggagtcttgttctgattgatgaaatatgtagaggcacagaaactgcaaaaggaacatgtatagctggtagcatcattgaaagacttgataatgttggctgcctaggcatcatatcaactcacctgcatgggattttcgacctgcctctctcacttagcaacactgatttcaaagctatgggaactgaagtggtcgatggatgcattcatccaacatggaaactgattgatggcatatgtagagaaagccttgcttttcaaacagcaaggagggaaggcatgcctgacttgataatcaccagggctgaggagctatatttgagtatgagtacaaataacaagcagggagcatcagtggcgcacaatgagcctcctaatggcagccccagtgtaaatggcttggttgaggagcctgaatctctgaagaacagactagaaatgctgcctggtacctttgagccgctgcggaaggaagttgagagtgctgttactacgatgtgtaagaaaatactgtcggacctttacaacaaaagtagcatcccagaactggtcgaggtggtctgcgttgctgtaggtgctagagagcaaccaccgccttccactgttggcagatctagcatctacgtgattatcagaagcgacaacaggctctatgttggacagacggacgatcttctggggcgcttgaacgcccacagatcgaaggaaggcatgcgggacgctacggtattatacgtcttggtccctggcaagagcgttgcctgccagctggaaacccttctcataaaccagctcccttcgaggggcttcaagctcatcaacaaggcagacgggaagcacaggaacttcggtatatctcgaatctctggcgaggcagttgctactggacggaactagtcagctgaaggtctttttgctattggatattcaataggaggcgggagctaactgacaccatgccgccctagttttgttgaactgatagtggtgctagccttgtgcatagtaggggccaggggagtaataatatttcccttgtctaaggaagtaattaaggatgtaggagcgcagagcaaatgattagcaaaacgatcacgttcgcagtgcggcaggcattgtgcagctgattcgtttgttcaatcagtgctctcgctcagtgacctgacagcgtgatcactaaacctagtagctgggcgcgcctttctaggccagaacagaacattggcgtgaattagattccagtgcggcagggtgttccctaagtacatgttttcagttcagcggcacttggaatatttttatgagaaaaagctgcgtcttttagcttggat

SEQ ID NO: 27009 - DNA, 2892 bp, Zea Mays
ttttactagcaatggaaaggagaggagcaaaagagggagccaaaacatagcaaggaaaaggaaaaagaaaatgatcctctctccccagcacttgcgacaggtactagcaggctagcggctgcctcccttgtccccaccggccgccaccaccaccaccacggcaccaccacaccgacccccttcccctcccctctccctgtcgtgcggtgcctcctccgcccaaatccccaaatccgcgcctccgatccgccgccgtccacgatctgccgcagccgttgacccgctaaaaatggcctccgggccgccctcgccatccggcaaaccctactcgcgcaaatctcacgccagctccaaggctcccagcgtcccttccttcgacgcccacaacggccagctcctacccaccgtcaccttttcgctgccctccacgaccaccgcccgccgggagctgcgccgccgcctctcttccgagctctcccaggtgcgcgccgccgtcaagcgcctgaactccctcccggctcccgccccctcctcggcgctctctgccaccgacccctccacgccgcatccgccgtacccgccggcgtccaagcacaagtctaagaagggcggcggagtcccgcagccgcacctctcggcggaggcgcggcgcaagctctacgcgcccgtgttcaagacctgcgccgctctgctctccaggctgatgaagcacaagcacagctgggtgttcaacaagcccgtagatgcgagcgcgcttggcctgcacgactaccatacaatcatcaccaaacccatggacctcggcacagtcaagtcaaagctaggtgccgggcagtacaagtcaccacgggaatttgcaggtgatgtgcgtctgacgttccagaacgccatgacgtacaaccccaagggccaggacgtgcacttcatggccgagcagctgcttaacatgttcgaggagaagtggccggagattgaggctgagatagctcagctatcaccacagcctcctacaccatcctcagcagcacccaaaaagccaaagccaaaggagatagataattctaggccgttagagaggtctgattcgacagttcatgctgccgggatagaagctaccccgaagacacacactggcagaccccaagttttaaagaagcccaaggcaagggagcccaataagagggatatgacattctgggagaagcagcggcttagcaataacctccaggatttgccaccagagaagctagacaatgttgttcagatcataaagaagaggaacttgtcactcagccagcacgacgatgagattgaggttgatatcgatagctttgatgttgaaacattatgggagctcgatagattcgtgacaaactataggaagagtataactaagaataagcggaaggctgagctttctgcggtaaggccggatgaagctgatcctgatcaggagccggagaaggtagaacatgtgaggcagggcaaggcggatcaggatcaaattcctgcagtacaagaaccgattccagaaccagaaacagttgatgttgatccacctaaggaaagtgcagcagatgataatgagagatgtgtgggtgaatcatcacctggtcatttggaagatcagaagggagagaatgctggtagatcaagtagttctggaagctctagcagtgactcgggttcatcctctagtgatacggacacagatagttcatcagcagatggttctgatgctgggcaatcacccagaacgtagcatctataagccagatgttgatgggggcactggaaaccataacaccttagttcaagaaaggattctagcatgaatttatggggtgacgcagaaggagattaccacgcacaaggagatgggggtgccgctcaacgcgtacatgctgcacaacctggcgcacgtcgagctcaacgccatcgacctcgcatgggacaccgtcgtgcggttcgcgccgctcagggatacgctgggggacggcttcttcgcggatttcgcgcgtgtggccgatgacgagagccgacattttcgctggtactcgcagcggctaggggagcttgggttcagttatggtgatatgcctgttcacaatcttctgtggagggagtgtgcaaagtcctcaagtgacgtttctgcacgattggcagtgattcctttggtccaggaagccagaggtctcgatgctggaccaaggttagtccaaaggttatctggttttggggaccatcgatctgcagacattgtggcaagagtagcagaggaagagcttgcacatgtttctgtaggtttgtattggtttctcaaagtatgccaaatgatgggtcgtgaaccaggcgatactttcaaagacttgataaaggaatacagtgttgtactgaagggtccatttaactatccggctcgtgatgaagctggtataccccgagaatggtatgacgagaagttcaaacaagaagcagcacaaaaactttcagaggtccatgatagattagcttgtattgttgagatggagaaagagagtgcaagtttgaatgactaagtgccacttgatgtacatgggagattgggtaggcgctctactaattatttaccatatttaaagcagtcttcttaaccctgaaaactacaaaatatctcattagccatattctgttgcctcaatcaaatagataagaagcttgcatatggcagaccaatagcgcccactacttgattcaagccatttgtttccttcttagataattcttatgaatattgtattatctctagaaataaatctagagagggagaatcctgaaagaaaagcccatttgtaccttcactacgggcacatgatccatactaatctcctatcaatgtcattcagttcccct

SEQ ID NO: 27010 - DNA, 4230 bp, Zea Mays
tgtccgtcctccgtcgtctccgccggctcttcttcactcctcttttccgctggagtccccgatctcccccgcatttcccactcccacttctagcctcccccacgcccccatcctcagttcctcaccaccacttgccccgccaattcccaaatctcccaggggcttctccgcttaccacccccgcccgctcgcgatcccatcgcctcgacccgacccgagacttgctcgtcgcggagcgccaccaccacgcctcgccgccggcggcgagtggacaagcctagggcttatctacgggtgatggcggccgcgccggccgccgcaagctcgaccgtctcctagggcggcggttacccgaggctgagctcgtgcgcgcgcgtggggggatccttgtgctcagctcgcgaaaccctaggggcagcaggaggcgaagcttgcagggcggcgatggacgtggactcccgcatggcgacagagtccgactccgactccgacgctcgcggcggcgggtcggggtccgggagcgagacccccacggcgtccgcgtccgcgtccgcgtccccgtccacgtccgcgcccgcgcccgggacgcccacggccgcggccgcgtccccggggctggtggcggggcccaggccggcgccggggtacacggtggtggacgccgcgatggacaagaaggaggacgggccgggatgccggtgcgggcacacgctaacggcagtgccggcagtcggggaggagggctcgccggggtacgtgggcccgcgcctgatactctttggtggtgccaccgcgctcgagggcaactctgccacgccgccctcgccggctgggagcgccgggatccgccttgctggtgccaccgcagatgtccattgttatgatgtgttatcaaataagtggaccaggcttactccacttggtgaacctccttcaccaagagctgcacatgtagccactgctgttggtaccatggtggtcattcagggtggaattggccctgccggcttatctgctgaggaccttcatgttctggatcttacacaacaacgaccgcgatggcatagagtggtggttcaaggtcctggtcctggtccacggtatggacatgtgatggccttggttgggcagcgattcttattgacaattggtggcaatgatggaaaacggcccctggcagatgtatgggcccttgatactgcggctaagccatatgaatggagaaaacttgagccggaaggtgaaggaccaccaccatgcatgtatgcaactgctagtgcccgttctgatggtctccttttgctttgtggtggaagggatgccaatagtgtgcccctatcgagtgcatatgggcttgctaagcatagagatggtcgctgggagtgggcaatggcccctggtgtgtctccatcacccagatatcaacatgcagctgaggggctcttgggggtggtcgcatggtagaagattcctcaagcgttgcagtattggacactgctgctggagtttggtgtgataccaaatcagtagttacaactccaaggacaggaagatatagtgcagatgcagcaggtggtgatgcttctgtagagctcacacggcggtgcaggcatgcagcagccgctgttggtgatttgatatttgtttatggaggtttaaggggaggtgtgctgctagatgacctcctagttgctgaagatcttgctgctgctgaaacaaccagtgcagctaatcatgcagcagcagcagctgcatccacaaatggacaaagagaacctggtagatatgcctacaacgatgaacaatcaggacaaactgttacagtttcaagtcctgatggagctgttgttcttgggactcctgttgctcctccggtcaatggggacatgtatactgatattagtcctgagaatgccattatccagggacagagaaaaatgagcaaaggtgttgattatttggttgaagcatcagctgcagaggctgaggcaatcagtgctactttagctgctgtaaaggctaggcaagttaatggtgagatggagcattcacctgatagggaacagtctccagatgctgcaccaagtaccaagcaaaattcaagcctcataaaaccagatgttgctcttgtcaacaattcaacagcacctcctggtgttcggttgcaccatagagcagttgtggtggctgcagaaactggaggtgccttaggtggcatggttaggcagttgtccattgatcagtttgagaatgaaggtagaagggtcatttatggaacccctgagaatgcaactgcggcaaggaaattattagatcgacaaatgtctattaatagtgtgcccaaaaaggtaattgcttctcttctgaaacctcgtggctggaagccccctgttcgaaggcagttctttcttgactgcaatgagattgcagatctatgtgatagtgctgaaagaatattttcaagtgaacctagtgtcttacagctgaaagctcccattaagatatttggtgatctgcatggtcaatttggtgacctcatgcgcttatttgatgaatatggcgctccttcaacagctggagacattgcttacattgattatcttttcttgggagattatgtcgatcgtggtcagcatagtctggagacaatcagtcttctccttgcactgaaggttgaatatcctcacaatgtacatttaattcgagggaatcatgaagcagcggatatcaatgctctttttgggttccgaatagagtgcatagagagaatgggtgagcgggatggaatctggacctggcaccgtgtgaacaggttatttaattggcttcctttggctgcactaatagaaaagaagataatttgtatgcatggtggtattggtcggtccatcaaccatatagagcaaattgaaaatcttcaaagaccaattaccatggaagcaggctcagttgttctgatggatcttctgtggtctgatccaactgagaatgatagcgtagagggactcaggccgaatgcacggggccctggtcttgttacctttgggcctgatagagttatggagttctgcaacaacaatgacctgcagttgattgtgcgagcacatgagtgtgtgatggatggctttgagcgattcgcccaaggtcacttgatcactcttttctcggcaacgaattactgtggaacggcaaacaacgcaggtgcaattttagttctcggaagggatctggtggttgttccgaaactcatccatcctttgccgcctgctatcacgtcacctgagacctctccggagcatcatattgaggacacatggatgcaggagttgaatgcaaacagaccaccaacaccaaccaggggccgccctcaagcccccaacaatgaccgaggctcccttgcctggatataacaggctggccatattattaaacaattgatttcttgtctcctatcattggcttgaggctaaaattatccatccattctggacacatggaagcactctgctgaaagcacacactggcccaaaacaatgtcgaaagaaaactgttcagggagcgagactaagcggtgctctgaaggcgaaggccagagaagagtcactgtcgacagcgctccccaaatcctttccacaaacaagtagaagagcagaaccaagtgttggtaaaccacaggatcttgcctgggatcgcgcctgtacatactcagacgccagcagatagaggaggggttgtgtatgtgttctttttgtcttagcgtcgaaagggatagcagcgtccattgtactaggtattcatttgctgtagattttgatttgttgcctcatgttgcaaagtatggagtgggaaagttggtttcctcgtgtgacggacggtggtctgtcaggtcttgtataatagcgttgtcggctgtttatgtttgcagcgcgtcagctgttacttagcacaccttacacctccctcatgttgtaattcccatcaccggtgctgatgaatgtgcacaatatattgttgtctgttgtccaaagttttgggtcctggacgggttaggtgatttgatttggtttattggagaagcaatacgttgtttgattttgagctgtatgctgtgcacctttgggatttattttattttgcaaatttgtgtactagcttacagttcagtggtcttgctttcagcaccgtgcaagcctactaccaaactcaggcaaacaacaccgcatagtcatg

SEQ ID NO: 27011 - DNA, 374 bp, Zea Mays
gttccccataaggagaatagggcatcgaaatgaacattgttacctcgtcacctcgtccatcatcttcgtggaggccgacatgcgggcgtgcctcggcgactttggcctctccctcctcctcgcaccgccagacgcgtgcgccacggggggcactcgtgacctcgtgtgctgcaccacgacaggatgaagcccgtgggcgttggcaagaagcggcgagacttggcgctggcggactgggtggtgcccaagatccaggtcggcgagcacagggtggtcgtcgaccgaccggtgctgcctaagatccagtttggcttgctttgcagtagggagaccaaggccagacttctggcgatgttttcctgatggaaagcagg

SEQ ID NO: 27012 - DNA, 2378 bp, Zea Mays
tagtacatacgtatttccgctgcgcatctcagactctcggttacgtaatctttataaaaaactcctaacaaatcatagttgtatctatggttagatcgtaatctaatgaaccagatcttttgtttgcacgctttcaaataagcactgcatagcagtcgttgccgtcggtcccgccacacacccccatgccgcttctccacctctcgctcccgtcgcaccgcctcctcgtcggcggccgaggtcggctgttcttcccgtcgtctccccgtcgtatctgcctatctgtcagggcggctggggatgcggcggtgtcagttgcggcgggggcttacggactccccttccggccggagggagccgctcaccaccgcgagctctccgcggcagtggccgtcgtcgagcgcgcctgctgcctctgcgttgacgtgaagagatcactgttttcacgtcgcagcagtattcttgagaagaatgaccaaagtcctgttacagttgcagatttcggagtgcaggcccttattagtttggagctccagagattgttcccatcgatacctctggtggccgaagaggattcagcttctctaagatcatccaaagctgatgataatagcagtgatatacttgttgagtcgatttttagcgcagttgtagacaaagtgagtaataacggttcacatttaactcaagatgatgtcttgagagcaattgatagaggaggcaaggacgctgtctcatttgattcaaaccctgctacttattgggtgcttgatccaattgatggcaccaaaggtttcttgagagggaatgatgctctgtatgtggtgggtctggcacttgtggtgaatggaaaggtaacagttggagtgatgggatgtccaaattggaccaacgatgacatagtcaacaagaaagatgatagcgttgctgcatgtaatggtcgtggtattcttatggtctcccatattggctgtggcacatggtctaggcgtctgtctgctgatattggtcagttgaatacagctcaggatatttggaaaagatgttttgtggacacttgttcgatcgcacacatggcacactattgcattccagatagccaaacatgggatatgataccgttatctgctacctacgattcaacaacagatgcaactgatcctagaaatgagaatgaaatccttctcctgtccgttttttgtggcaggtttgttgcactctccaatctccattaatggtttgatacttgcacattaattcacgccactagtcagttgatatatgatgctaacaatgattgattttctccaacatatggcattcacggttagcaaaaggcatttaaagcaacgattgatatattctccccatccacaagttagctctggatactagtttgtttgctgtaagactttttcagcattatctgaaacgttaaatgtctttctatattcttgtgctgtcttgctatcatactgtttgtggatttcctacaaaaaaatatctggctgaggttgataatgagtactatctcgaatatttgtcgtccaatagttcatctttgaactaaaacgcgacaaataaaaaagaacggagggagtatattacagccattagtgattaccgattggtcttccgcacatgagttcatgatgatgtgctcttgttgctattctatagcttgtgcaagtatctcacaattgcttccgggagagcctcggtttttgtccttcaagcacggccgacaactcagatcaagtcttgggatcacgctgttggggtgatctgcgtgcaggaggccggtggtcagaccagtgactggagtggagaaccgttggatcttgcagctgacctaacatcgcgcagaatcatctaccctcggggcggtgttctggtgacaaatggtgcgctgcatgacaagcttgtcgaaatgatctcagcaagttacaagtagctgcatagcttcacaggccaacacaccttgtctttttgaatttgaatcattttaccttatctattcgatcttcagtgaaattgtatttgatcttcggtgaaattgtattcgatctgcacattcagtatagaaaccacaagcatgttcacttgttcagatggcttccattgccacaggagttattatacgaatgaaaacacactgtttccttgttgtaccgtgatgaactattgcttaagcaacttcattcagaagcaatacatgcaagggaaggtcgttttccaaatttttttcacaaaactccagaacctttttttttttggcttcccaatgtgtgaatttgttgcgcagccctgatgctctactctcatggtcgtacgacgcccacgcacgcacacctgaatcctgcaaaaaagaaaaaaaa

SEQ ID NO: 27013 - DNA, 1513 bp, Zea Mays
gcttcgctcggctaacctcgcccgcctcccatgccgctgctggcgaggagcacgaccgcggggcctcggcggcgcgccttcgtcctcgctctcctcctgctgcccccgctgtttcttattctgctccaccgcacctcatcgccctcgcttcggcccctccccgcgccccgcaagccctcttcccggtcccagtcctgcgactactccgccggcgagtgggtgcgcgaccccctcgcgggctcctcgctccgctacgacaacacctgcaaggagatcttcaagggatggaactgcatcgccaatggcaagcccaacgcccgcgacctgctcagctggcggtggaggcccgtcgggcccgggtgcgagctcccccgcctcgacccgcgccggttcctggagcacctcagggacaccagtatcggatttgtgggtgattcgttgaaccgcaacatgtttgcctcattagtatgcatgcttaggggagtaagtggtgaggttcgcaaatggcgtcctgcagaggcagaccgtggcttcaccttcctgcgctataacctcactgtggcataccacaggacaaatctcttggtacattatggtggtcagcaaatccaaatggaggtactctagaatctcttgggtataagcatggttacagagttgatgtggatattcctgaccaaacatgggtagaggcatgtagcttccatgatgttcttattttcaacactgggcattggtggtgggcaccctcgaaatttgatccaatacggtcaccaatgctgttctttgagaaggggaggccaattgtgcctcctttactgccacctgctggactggatttggctcttcaaaacatgttaatgtttgcgaacaaagcaatgagaccaaacacagtgaaattcttccgtactcaatctcctagacatttcgaaggtggtgactggaatgaaggtggatcttgccaacgtaaccagcccttgtcgtcagaagaggtggaagaaattttctctttggacaataacagcaccaacgtggaggcacgcttggtaaaccaacacctggtgaaggctcttgaacagcagtctagttttagagttctggacatcactcgcatgagtgaattcagagcggatgctcacccttcaacaactggcggcaaaaagcacgatgattgcatgcattggtgtttgccaggaccaactgacacatggaacgatttgctagcgtccagtcttgaagtggttgagagctagtctgagaataaaactcaagggctcacctgagaaagttacccctagcttcactccccccccccccccccccccccacacccccccatgaatccacttgtagaatcgagttttgctgagagttcgttgtagggctcttcgctgcagcttgttttatatgtggagtggagcatttccccggcttgtattcttgaccctgtatatatttgaccattgtagggtttcactgtataataataggtcgaattcattttaaaaataaa

SEQ ID NO: 27014 - DNA, 4980 bp, Zea Mays
cgcgcaccgcaccgcaccgcgccgcgccgttcagagagggagaggaggggacgcgaggaggaagaagaagcaggcaaacagcagcagaaggcagaagccccgtcccatccccggcagccccctccatccaagtgatttcaagtagccaccgagaagcggagaagcaagcccgaggactggaaacgtaagccaacgccaaaaaagttcttcgtctgcttctacggcaccggggagattgcctttgtacctctggcagatcttgaggaatttactgagaagaaaaagaacgatctgttagatcgagctcttaaagttcaaagaaaatatgttcaacaatttaatgttgctgtggagcagatctgcaaggcttataatgaattgccaaaaacatctgaagccgcaaatgtagcattgcctgatcagagtgaaaagactacagagcacctggtgaggtcacctgatattggtgggactccaggactgggacaaatggaagatgatccccctactgattgctcaagtacttcagggcaagggtcagggaccgaggaggatgtcaaagatggtggtcatgaaataggtgataattctttggcagttcctcaaaagaaagcatctttacaacaggatcctaagcatcccaagacaaagaagtctgctgcatcaaagtctggttttgacatgtacacagaacaggagcattcaccaacatctctgcgggcagaaaggcagattgaagaggtgaaaattgaagaagagagctgtcatctagaaggttttgttttggaacctaacttggaggtggtttgcgcccttgaagtgccaaagaattttaaatccaacaagctgttgaggaatgctgaaagtaaggaaaatgagcatgttggtgttggtagtcctactggaaggattgctgttgaggccgcatctgatgttgtattaaacatgagtgctgaagaagagagcagagaatttaagaagtcaaaaatcatgacaaaacaatcactgactactggttcagagaaaagggataataaaattgtccatggaaagcctgacaagcaattgactggaaaatcatctgcagggttttctctcaatcagaaatctctgacaggtagcgggcagcacaagatggacagtagtgctgatacacgtccggcaaagaaggcaagacttatggacagggctggtgaaacagataagacagttgccaagagtgagacgaagttaaacatcaattatgaaaatcataatgctgtgaaacatgagcaatctactgctgtggaaacatgtaaaaacacaattcttaagactggtatcggtgatgatagggcacggaagtcaggtggtgctgtatcacccatatcaaagcttcattctgagatcatggaaccagcatctggttcttctgtaactcagtctactgttgctgattctcttaaaaagggttccagcaggaaggaggatgtctcacgtgttgataggaaattggttaaacctaagagaagagcgtgtcgttttgatgatgacgaggatgaaggacagcaaacaccacttcatagaacttctgccaaatctctctctacgcatatagtcccaactgagaaaccaggtagtcggggaaattttgcttcgcatgttggcaacgcttctggaaaaaaaccaggccctgccagagaagagaaatcaagaagtgttaggatgtcacctgtgaagcatgagccagttttttcttcaccgagtcaggataaagtgcatgctagacaccagttaatggggagaaatctgatcacagggtcggttgagactcctgtcattggtaacaaaatgagcctggttgatggcaaatcctctgctcaagtaaaaatgccggcatgctctgaggtgaagaaacttcatagtacttctaaaccattgcaagtaacatctgggaaatcccattcccgaaactatcctgcttcagaaaagatcgccttggtgcccaagtcagaagaaacaaaggctaaatctaaaccagctacatctgttgagcataaggtggccaccactttgtcaactgaacggactgggaagcgggaccacctgaaagaggaaagatcaagttctgttgataaagcagcttattctgaacctaaccctgactcggccaagtcaataaaacatcttattgcagctgcccaagcaaggaggaaccttatggcttctgctcttgcaaaatttgatgggtcttcgactgataatagtgctattacctctacatcatatggtttgccaagactaagccctagtcctgtttttcgcattccatccccacctagaattgcttttcctgagagtcctggtcaacgtattctgaaaagcccaatggagcttgataatggtcatggaaagagtcccaaatctaggcaggccagcggttcacctagtggtggttctgatgcagcaattgctcgtgatgctttggagggaatgatagagactttatcaaggacaaaggatagtataggccgtgcaacacgccatgcaattgagtgctctaaatatggcattgctggagaggtcctttctctcacatacgccatctgcatcactgtttcattgttatttcactatccttattgtttctcttccagattgtcgagcttctcatacagaaattggagaacgagcataatttgcatcgcagaattgacctcctttttcttgtggattccataacacaatgttcccattctcatagaggagttgccggggcttcatatgttcccactgttcaagcggcattgcctcgtcttttcggtgctgctgctccacctggagctggtgctcgtgaaaaccggcgccagtgccttaaagttttaagattgtggcttgagagaaagattatgccagaagacatactccgaaagtacatgggtgacattgaggtgccaaatgatgatactagcactagtttaatgttaaagcgaccatcccgttctgaacgttctgtagatgatcctattagggagatggatgacatgcttgttgatgaatatggaagcaatgcaacttttgagctttctggaattttatcatcaaaagtgtttgaagatgatgaagacttccctcaaaacaatgggtcatcatcatttgtttcacggcctgttgaaggtggtgtcatacatgaaactgaagataatattgctccagcatctgttgaggaacacattattagagtagaacatgtagctactgatgctgctatggaagatgctttagagttacttggcaacaaccaacagactcatggagctgtcattattgaacatgactctagtcaaggtccaggttcagagcaggcattgatcgcccagaatgagcttccccctctacctgatggccctccaccacttccatcagattcaccaccacctccacctcctttgcctccttcaccaccacccgctacaccgccaccaccacctccactctctccagcttcaccacttccgccaccacctcccccactaccatctggaccacctcctcagcctgcaccaccacctctgccaacccaggacccacctcttccttctattccgctgcctgtttcttcatctccgttgtcattgggttatcagcctccagcgccagagtacttcatgacgcccaatggtaatcaattggcccagatgacagtaaacacatcaattcaagctattggaaatacaacaaccttcattcctggtggaccagttaatggacaagctgcagttaattttgttacttcaatgccggcagaatttggaaatactagcgtatttatggcgcaagcttctaatggtaattaccagtttcggccaactggtgtaccttttcagcaagggaatttcagtgcctttccatctgcacaaacacctccagttcatccccattctcgtatggcacacatgaatcccatgggccaacaagctgttgcacctccacacaatccttatgctgcacagtcctttccaaacagtcagagccattatccatctgaagaacattggcggatggcatctggtaacttcagtccagatgaccagcataattggatagcaagtggcagatcattaccttgctcagaagggccatttgtgcatgatggatattcaagatcaaacattgacagatcttcaatgaatcctatgaatcatcaacatactgttctgaatcatttgccatctggagcaccactaccaggccatatttctcagatgctaccagccaggtctgatatgcacactcttaattgctggaggccctcttgatagagttgtaaactgaacttcttgtttgtgattttgacatggaaagctcagggcattggaggcaatttgaattgagttcaacaactggtggctgttagtctgagatggagatgcacttgccagggtttaacgatgagatctgtcatagtatgtggaatggacattttacaatgtaactagtcctgacaacagtatccagcagacaatctctcttagtgtgagctcatcttttcacatgacgcaaatgtcctccagttttttagatgttgcttccagtatggatcaggacagcgaactgttcctatgctatggtagtaaatatcttgtgcagatacattaattataaatagaggtctggtagtaaataccaggaactggtatcatcaaggcattttgtcacggtgcctatgctatggttcgcttttttctcttaactgttgtgctcaatttgcgaaattcatttcaaatttcagttagctaatcacatatattctcaacaaccgtattttatgtttggtgtttagactagaattgtgcttagacaacatgtacatcactgagtttagatttaagagcggaagttagttttgattctgttaggacggcgaaatatgtgctgatatttaagagctctagtttattcttgtttccaaagactgctgatagcgttggttttctaagc

SEQ ID NO: 27015 - DNA, 795 bp, Zea Mays
atgtgtcggcagctgcatgaggggtttaagcggcggaagggtttggtgaggatggcctgtaagctgatagcaggatgttacgtcgaggtctcgacggtagcggtggaagttccggtggtggccctgacttctcagggccgaaatgcagatgcgttagcgctttattttggagaagatccagcacgatgtccatttgagcaagtagttacaacactccaaaattttgtgagattgttcacgcgttcccatgaagagaactgtaagcaactggatcttgaaaagaagaaagctctgaaggaagcagaagacaatagtaaacaactggaccttgaaaagaagaaaacccagaaggaagcagaaacagagaaaataaagaagaaatctgacagtgagaaagcttgtaagaaagaactggaaaatgataaatcttctaagaaggattcagcaaatgagaaaggcaagcttaacaatcccatcaaagagctagatatatcacttcaatcacctgcacaaactgccagtgccaaatgacgaccgtaccagatgaactaacagtagcttttccgaaagaggaaaactagttttggctgctcccaacagtgcttccttttgacgaatcatgcaggataaggaagccgaaaactgcacttttaatacgttctcaggggattgtcgaagaaattaacctggcgacaagctgtacagatctgacataataatagccttttcttttgggtaataatagattattcttacaatttttctgtcttcttgattatatgtagctaatgtctg

SEQ ID NO: 27016 - DNA, 798 bp, Zea Mays
tggcgaggtgccccctccccgccccgatgcgccgaagacgtggagcaaatccacctcaatgatgcacgctgacagcgggctcgtcggcactctaggtggagcacgacgtcctttttgaaaatggtttggtcatacacaaacttgtggggtgaaatttcggctttggcctccttctgcgaggtggatttggatagcgcggtgcagaaaaaatggcggcttcagctctccacctctgccgcctccccaagccacggcaggtgtgaagcttcagcagaggcagttgcgcccgatgagccatgcagggtggtctatctcaaagatttttgaaagttgtttcttattatggtctcacgactctgccatataaactggtctgtaagcttgttggtgccaatctcagaaggatgctctggaaccttacatgagaaagagaacagttgaacttcactagggtaagcaccatcaagattacgtggatggcttgaataagtagctggctaccagccctctgtatgtatatacaccctggacgatctgataaaagaagcccacaacaatggtctcgaatcatcactttttctgggaatcgatgcaaccagaaggtggtggcttacctgagggaggtgtgctatagcagattgaaaaggattttggcttgtttactaattttagggaagagtttattcgttcagccttacaactattggggtctggttgggtttggcttgctttgaagagaaataagagaaagctttcagtagttcatacacgaaacattatctacccacttgcttttgg

SEQ ID NO: 27017 - DNA, 1936 bp, Zea Mays
tttcgtcgtgtgtatgtttgatgaactaaattatgttttctgtagaaaagtcatatagaagagttatatataaccttattatcttacttgggttaaaatttgacagccataagtctgatcgtttgggagttatacttttcgcaaattcagtaactgaatctgtccactttctgtatagacttcagaaactgcattgtttgcttaatttaattttacaatcagttcatggtcgttataagaaagttgtagatgtttttcttatcttgcttgtgttaaaatttcaaaaccataggcctgacattttaggagttatgaattttgcaaactggttgttgtgttctgtccaccgtcagaacagatttggaaaactgtgttgtttgatttagttaaacatcgaatcacttcttggtgattatataagttatgtagtacttttcctaatctgtccaaaacatattggatcactctttttggtgatatgaagattaagttatggatgtctaaagtgtgaagtctaaatctgtccaaatctggacagcaaagccttcaaatgtcttttatcctaaatttcatattgaatcaccttgggatgtttataaatgatttgtagaaaatttcattagctttccagaaagtctaggatcacctcttttggatgcatgagtctccggttatgaatttttgaaacaaagggcctgaatttgtccaacctggacatagctgttatttttgcacaattcgaccttgctaagagtctaatcatgttgagatgataataccaaagttgtagagcgtttcctaagctttccaaaaagtatttgttcactatttttagataaatattttgtgagttatgactgaaacaagcaactgctgtgctgctgtcctaattttgttatgtttgatggattgctctactctgttgtgtttggctcgggttgactgtttcctcattttgattttagttgaacacacagtaatgacaatataaccaatatgattaagcctaagtatagaagtaactagtacatgtctcgctaaattagtgaactaaattggttaaggtctaataagtgtttgccttgtgaatgattgtaaaaactcgattaagtaactattcctttttaattaagtctgtctatatgtaagtcatcgtaaattatgtgtacttaactagtttaatcataagtagccaatgaacgattaaagtgaacatggtaaatgcttgtactcgttatgccgtgtttgtgtgggtcaaatataggaaatgttcgtcatctttccagtaatgttaacttgttgtgcccaatgatgtataaataactagcacttgtgtggcaatgtcttataatttaatgtttagttcgctactgtttatttgggattgtctgtgatatatttcatcatattcatacacatgcaccctgcatctcatttaggatctgttgcgggccttcgtctttcgaaggtcctaaaaacatgatttaacaatgtttcccaagtgtaatatatgtacagaaaccttcggactcggaataaagttgtacacaatatgaaaagcatggacaggacaaaggttgaaccagttccgaagctacgcgcaaggaagcttcggctcaacggcagagaaaggaaccaacttaaaggggaaaaggctatttagtcctcgctggattatctttaagtcaatagtaaacataaagggaatgaatgtaattttacacaggctgtgccctgtgcctataaatagatgaacagtacccccgtactgttcacgctaacttgtacttcctcgtgcgtcacgcttgtactttcaccttctgtcaggtcgaaggtacaaatgtaatcctatgttgttcttattcattcatgattatatagtaaaagatatattataatgtcatacgattatccatgttatttctcatgttttata

SEQ ID NO: 27018 - DNA, 3867 bp, Zea Mays
catatttcgcaatccccttctcgtccccttcgcgaagaagcatcatcctccatacatcccctcgtccgcggtctcacatggcagtggcatgagctgcttctccccgaaaaaaacgtttaaataaaaaacaaaacataattataaaccaacacgcctgccaccgaccgatcagacgaccccttccaagaggaaatccaccaccgcggccggggcctcccaggagatctcgccggaggccgcggcagcggcggcggtggggggcgatggcgctcaacatgaagaccctgacgcaggcgctggcgaaggcgtcggctgtgatagagaagacggtgtccacgacggtgcaagaggtgacgggcccgcgcccgttgcaggactacgagctgctggatcaggccgggtccggcgggccggggctcgcgtggcggatctacacggcgcgaccgcgggatggcgccccctcggcgccctaccccgtcgtctccgtctgggtgctggacaagcgcgccctcgctgaggcgcgggcgcgggcggggatgtcgaaggcggccgaggacgcgttcctcgacctcgtccgcgccgacgcggcgcggctcgtgcgcctgcgccacccgggcgtgctgcacgtcgtgcaggcgctcgacgagaccaaggccgccatggccatggccactgagcccgtcttcgcctccgtagctaacgcgctcgggtgccttgacaatgttggcaaggtgcccaaggaggtcaagggcatggaaatggggctacttgagattaaacatgggctgctacaagttgcagagacgttggattttcttcataacaatgctcatcttgcccatcgagctatatcgcctgagacggtatttataacttctaacgggtcttggaagcttggtgggtttggttttgctctttcggttgatcaagcagcagttggtttgagtttgacttcatcacaactatttcattattcggactatgatgtcgaggatacagctttacctcttcaaccatcgttgaactatactgcaccagaattggtccaaagtagagattctaaagttggctctgcttgtgatatgtttagctttggatgtttggcttacaatctggttgctcgtagaccacttctggactgccataacaatgttaaaatgtacatgaatgccttgacatatttaacaagtgaagccttttctaatattccttctgatttggtattggatttgcaaaggatgctatcgatggatgcactatcacgtcctagtgctatggcctttacaggttcttctttcttccgggatgatacgaggttgcgcgctcttcgtttccttgaccatttgcttgtatgtatttattattcccctggataagttaaaaggagagagataatatgcagaagacagagtttttgaaggcattatcagatatgtggaaggattttgattcccgagttcttcgatataaagtgcttcctcctctttgtgctgagttacgcaacatggttatgcagccaatgattttgcctatggttctaactatagcagaatctcaggataaaggggattttgaactcgcaacactgcctgcgcttgttccagtgtttgcttcagcgtcaggtgaaactctacttttgcttgtgaagcatgcagatctcatcattaacaaggccactcaggaacatttgatatcacatgttcttccaatgctggtccgggcttatgatgacaatgatccccggttacaggaagaagttctgcgtcgaacagtaccactgtctcgtcaacttgacaccaagctagtcaataaagctgtgcttcctcgtgtacatggattagctctaaagacaacagttgctgcggtgcgtgtgaatgcgttgcgctgtttaggagatcttgtgccatccttggacaaagaaggaataatgggtatcttggagactgttcggcgttgcacagctgttgaccatactgcgccaactcttatgtgcacacttggtgttgctaatgcaatctataaacaacacatcaactgaatgtacaacaatttgccaagtatatgctatttgtcaaggacattacaagcaagattgaagagaagcgtggtgtgactgttacagataatgggaacacagaggtaaaatcatcaccttcattggcaaacgggatccattctgaacctatgtcaggacaaataccagttgcaaagagcagccctgcatgggatgaagactggggtcctactaagaaatccggtgttccatctctttcagttgattctagtgcacaaacaaagcaaccctcagtagacccttttgacttcggtactcaaacaaagcaatccacaacactcccctttgatttgagcacccaggcaaagcagccaccatcagtttctcatgttacagcagctacaatcccacctgcgcaaccacaaccatcactacaatctcttgcggctagttcaggacctaaaatttctggctcatgtgtccctgtcgacattgagtggcctcctcgaagaagctcgtcatccaacttcaatgcacccttgtctattagcaaggataatggttctggaaggctgtctagcgatggagttgatgatattgatccttttgctgattggcccccaatacctagcaatgttaatagcatttcagcaaccgagcattggccaagcataaatcaaaatatttcgggatttagctcaggcaacatagtttttggtggcagcgggaattctgtagggcaaacgaaaagcaaccaaatgagctggtcaaacacgtctaatctaatgggcacaaactcaactggcagctatttgaatcagggcagtgcagctctaggtttcggaaatccaaatggaggattgagcacaggtctctccaatccaagtagttccagtacaggcctgagcatgatgctaccaaaatctgattctggatcattgtcgacgtcggtcaacaatgccgcacatgggctactaagacttgcccctcctccatccacatcggttggaagagggcgcggtagaaatcaaggacagtccgcactctcccgagcatcaaggcctcatgccaactcggcatcaggacaacaacctatcctggatttactctagtaagagatggtcgcctctgttcttcgcgttcggattgtcaatgtgtacatcctcaaacctttgtaagaggtttaccttttctcatgctcccgtgcttagggttttgaattgggcatcgaggccatcttcatactggtgacagaagaaatgttttgtgtatatttctgtccaaactcggctgtagctttcagagtttgtgaatagttgacatgtttatatgggctgtgaagttttgaaatgtttaatgggccttacaggactgggggttcaactgcagtggtgctgtgagccgtgcatgcgatggacaactctcctatcgagcattttcatcaattcgctacacggccctacatccctgtgcctgtgtgtgtaccactagcttgcattgcattgcatgcagagtgtactattgatgggtgatgcattggatggggcatgcacagcaggaatatttgcagttgatgagcggcaggaatcagtggctcagggaaaattgaatggcgatctggccttcactccacatgagtacgtacctatacgtacgcatgtatcatcagacggagtcaggaggatgcgggtagtgtccctgtgttgtctaccattttgtctcaccaatgtggtcccaaagtacatgatgtttttttacttttacacactttaaaccgaccgtaatatttaattcttctgtaaatacttattttattttatcattaaatatattttttaattacttaactattt

SEQ ID NO: 27019 - DNA, 2345 bp, Zea Mays
ctcccagcttttgccattttggcgaccagctccaacaaccggagagggggagagagagagagctcgagtcacaaagctaaaaaaagcaccgagaaatctagtggtgcagcgagcgaatccgtccggccgtccccttcctccgccacccatccccaaaattttcaccgcacgtcgcctccccgcgacgacgacgcccgaagcttccagggccctcccctcccccccgcggccgcccctccctagatcgccgcctccggcagcggcgaggctgcatcgcgagggcggcggaggagccgggcgacggggtcgacgaaggcggggaagacgaggctagggttcggggtcgctgctgctgggctgcgtctgagggaggaggatgcatatgatgcggcggctcaagagcatcgcctccggccgctcgtcggtctccgatccggtgtggttttggctgtaatgcgttggcaactgagcttcataggaccatgaagaaaatggacagtagcctattaactgagagtctgagactttactgggtggtgactctggctccaaaagaccaaagtttgagcaggatggagcaggagatattgttatggagccacacttaaccgaggataaacctgtgcggatagaccaagaatcatcgtcaacatctaatagggatgctgaggcaagcacatctactagcatgaaacctgttaaaactgaagaagcaggagcagatcttcttcccaaagagatgaatattatgacaattagcgacgataaagctgatggccataatgataaggaaggtgagggtgttacacttgatgggactggaacagagacagggcagataattgtgacaacaataggaggtcacaatgggaagccaaagcagaaggtctcatacatggcagaattggttgttggtactggttcgtttggtattgttttccaggcgaaatgcttggaaactgacgagacggtggcgataaaaaaggtgttacaagataagcgctacaagaatagagagctccagactatgcagttacatgaccacccgaatgtagttcagctgaagcatcacttcttttcaacaactcaaaagggagaagtttacctcaaccttgtacttgaatttgtatccgagacagtttatcgtgttgccaaatactacaaccggatgaaccagcgtgtacccataatatatgttaagttgtatgcatatcagatgtgccgtgcgcttgcttacatccatcgagttgtcggtgtgtgtcatcgtgatattaaacctcaaaatctactggtcaatcctcatacacatcaacttaagatttgtgattttgggagcgctaaaaaattggtccctggtgagcctaacatatcgtacatttgctcgcggtattatagggctcctgaactaatatttggagctacggagtataccactgcgatcgatatctggtctgttggctgtgtagtggctgagcttctgattggtcagcctttgtttcctggtgaaagtggtgttgaccaactggtggaaataataaagattttgggtactccaacaagagaggagatcaggtgcatgaatccaaattattccgaattcaagttccctcagataaaagcccatccatggcacaagctttttggtaagcgcatgccacccgaggctgtcgatctcgtgtcaaggctgctccagtactcaccgaacctgcgctgcactgctgtcgacgcctgtgcccatccgttcttcgatgagctgcgggaccccaaggcttgcctgccgaacggacggccaatgccaccgttgttcgacttcacagcagccgaactcgaagggctccccgccgagcttgtccaccggatcgttcctgaacacatgaggaaggaagtgaattaggtggacggacgtactggggcaaaaaaaaaaaaaaaactccctgtttctctgttggttctgagagatgtgtgagggcacggatatggaggagcggtggtgtattgtaattgtaaagagggctgaaagaaaggtccctctggttgggcgtgtcaccaaagagtggccctagaggcaaaccttacgtttgctcgttgcccttggtgtgtacccagatgtgtatcgatgacataggctggctgctgtatcatcatcagggttgacgctgaacaagagaaattcaagcagggtgctgctagctcgcttcctcccgtagctggaaaccccagaatgccagtttccatcactgcacgtcgtcgcgctgtccactggtgtcccgtaagcatatagagctctgccggctccgctattggcttgcgtgtgtctatcgataatgacttctacggacgctacc

SEQ ID NO: 27020 - DNA, 1365 bp, Zea Mays
tggggccgcggtttcggcgtcgttattagctcgttttttctcttggcacgcgtgctcgacagactgactccatctgaccgggacacgtatagccgtgccagttgccgtccgttgcccaaactgtatccagccctctcggtctcggatagacagcgacggagaggagagcggcgggcggagagaagtggaggaagaagacgaggatggccacctatttcacgctcaacaccggggctcgcatcccctcggtagggctcggcacctacaaggccggacccggcgtcgtcgccgacgcgatcaccgccgccgtcaaggccgggtaccggcacatcgactgcgcgccgctatacaagaacgagaaggagatcggcgttgctctgaacaagctctttgatgacggcgtcgtcaagcgagaagaccttttcatcacctcaaagatatggtgcagcgatctcgcacctgaagacgtgccgttggcgatcgacatcaccctgaatgatctgcagctagattatcttgacctgtacctgatacactggcccttccagataaagagaggcagcgagctcagtccagagaacttcgtccacctcgacatgcccaagacctggcaggcaatggagaggctgtacggctcaggcaaggctcgcgcggtaggcgtcagcaatttctcgaccaggaagctggccgatctgcttgccgtagcccgtgtcactccagccgttgatcaggtggagtgtcaccccggctggcagcaggcgaggctcagagcgttctgctgctccagcggggttcatttctctgcgtacgcgccgctaggcaggatgaaagccgtcgccagtgacccggtggtcgcatccgtagccgagagcttggggaaaactccggcacaggttgctctgcgatggggtatccagcagggccagagcgtgcttcccaaaagcgccaatgagtcgaggttgaaggagaacattgacctgtttggttggtccattcctgatgagctgtgcgccaagttttctgaaattgaacaggtacctctccagttcttgcagcgatggataatcatgcgtggcggtgaactcatcaaccaagtgaaggtcttgtggtccgatatggatgaagaactggcaacttaggaagatactgaagctctgcgcgctaaattccctggcgcaccagtttgggggcaagctggcttttaaggtcagggcaatgtcagcagctccaaggagaaggcatcaatggaggctcaatcggatgcgttgaagaagtcgacaactgaagaaccgaacgcgaagatggcacaagcgcgggaacgacgtccaagtatcaaatatagtgggctgcaatgggccgtgtaag

SEQ ID NO: 27021 - DNA, 3917 bp, Zea Mays
atggcgcccacactagcggctggaaggttagaagagggtgcaacaacgacagatgctctttacttagcagaaagaaaagggcatgatcaaacgaagaaatcactttctgaagctcaagaaacaaacaaggagttactaaaaaaaattgagaaagctgagaaaaacatagatcagcttctggagaatgtggaaagacttgaaaaagatgcaattacaagagagtctttactgcttacaacaaagcaaagctatggtgacaccgcaaaattgctgcttgaatctcaagagaaaaaccaagagttagtgcacaaagtagaggactcagatagcaaaattgttctgcttgaagattcagtaaaaagactcgaagaaagtactgcagataaagattctttattggctatagaaagacatgaaaacagtgaaaccaagaaagaattagttggttctcagaaaaagattgcggaattgctaactgaagtgcaagatactcgtgcaaatgttgcagaacttgaggacttgattaggagacttgaacaagatgtcactgccaaagaggccttattgcttacagaaaaggaggcacacgacgcaacaaggaagactctgactgaagctcaggaagagagtggagaacttctgaagaaaattcatgataatgataaacatattcttcagcttcagtttactatacaaaggcttgaggaaactacagttgcaaatgagaatttgctgttgagggagagggagcagaatgacataacaacaaaagcgcacaatgaaagtcaagaaaaatatgaagaattactaagcaaatttgttgatgttgacaggaaaatcgaccttcttcaaggtaccatagaaaggcttggagaaaatacaacaaaggattctctgttgctatcagagagacatgaaaaggatgctattaagaaagcacttactgaggctcaagagaaaaatgaagagttactgatgaaagttgaagatgctaatgaaaaaatagaacaacttcaaactacgatagatatgcttgaagataatgtagctgcaaaagatgtttctttagaagctgcaatgaaggaaaatgatgcaattaggagatctcttactgaagctcaagagagaaatgatgaattactcaagaaaattagtgacagtgaatacaggatccatttacttcaagacacgatacaaaagcttcaagtagatgcaatatcaagattgtcgtcttttgtaatggaaaaacaagaaagtgatgcttcaaagagagctgttactgaagctcatgaaagaaatgaagatttactgaagagaaatgaggacctcctcaagaggaatgatgatctgattaagaaaattgaagactctagtaaaattgtcactcaacttcaggaagctctacaaaggcttgaaggaaaagcatgcaacttagaggctgagaaccaagttcttcgtcaacaagcaacttcaactccaccaacttcagctaaatctccagcttcacgtgcaaagatctcaaggatccatagaagtccagagaatggccataatttgaatggtgacattaggcaaactgaaatgaagccctccactggcacatcagaagcaataacctcagcagctaatgttcctgacttgggcgaccaaaaagattttgaacatggagaaaaactgcaaagaataccaaaacagaaatatcagccttctcatcaccagcagccccaggacgatcagcagtggctactcgcttgtattccacaacatcttggattttctgggagcaaaccagttgcagctctccttatataccaatgccttctccattggaaatcatttgaagccatgaagacaggtgtcttcgacagcattttgcatgctataaactcagccacagaggctcaaaatgacatgagaacattggcatattggttgtccaacttatctacattaacagttctccttcaacgatcattcaaaactactaggacggcaatctcaactccacaaaggagaagattttcatcggagaggatctttcatggaaatcaaacttcaaatgctgggcttgcttatctcagtggtcaatcagttgttgggtctgctggactgccccaagttgaagcaaaatatcctgctttgctattcaaacagcagctcgtggatctaattgaaaaggtttatggcatgataagtgacagcgtgaagaaggagctaaaccctttgcttgaattgtgtatacaggatccacgaacttctcactcgagtatcgcaaaaggcaatcttaatggcatgggtcaacagaaccaactcacatattggctgggcatagtgaaaattctcactagctacttggatgtactgagggtaaatcacgttccatcaattctggtgcataaactcttcactcagatattctcattgattgatgttcaactatttaaccggttacttttgcggcgtgagtgctgttcttttagtaacggggaatatgtcagagctggactaactgaactaaaacattggtccgacaatgctacaagagagtttgcaggttcagcgtgggaggcattgaggcatattagacaagctgtcgatttcctggtgatttctcttaaaccaatgaggacattaagagagatacacactgatgtgtgccctgccctcagcatacaacagctagagcgaatagttagtatgtactgggatgatgtgaatggaacaaacactatttcagcagagtttacatcaagcttgaaatctgcggtgcgtgatgaatcgaatatggccacaagtttttctatattgctagatgatgattccagtatacctttttcacttgatgatattacaaagacactgccagtcattgaggtggctgatgacgactttgtgccttttgtccatgaaaacccaagctttgcgtttttattgcaaagaggggagtagtccatttttcctcaccatggtgacttcacccacctgtggataagtcaggattcctgcctaggatgtacagtacgcgtgattctttttgtaccaggtagcaaggcattaaagattagatgctaggtgagcttataggattctggttttattgatttgtgtgttgattgtccatttgtattcaggttttccttgccattttttttctgtttgtagttatttttttgggcttgtatactaggggctaagggcagaaggccctgtcctgtaagcaaagtagcacaaggttttgctgtaggtgggaaagctgtacatgtgttgtaggagggggagtagcggttatcctgctggtcagggctaagaacgacagttgttgagaaggcaacggttatgccgtttttcctggatgagcagaatatcttgtcctggactgctggacagcagagcagtgcccacggaggtctctgcgcgctcgatcgcgacgatgcggccactatggtagtagatgcactcattacctgttatactagtaatttgctcgcgcctcgcgcaagtcgttaaccgatgagtttatacaattaaaagagtgttgctttagccatataaatacagaagtagtaatatatgtggatacataaacatagaagtgacaaaattatataaacatacaattgtttgcgttggtagataagttcagtagcatcgtgagcagcctagatgtcaaaattttgaagacaacaaaatactggtcttgaaggccacaaaatgcagagcaacattacaatgcacggatccttttcatgatcgtgctcactttttatgaaattcattgcttgttgtattgaatgtatatgtatacattaaggtacaattattagaattgtctcaatatgtaacgaagtaacatgaatagatagctttgcttagcacagaatgtcatgtgaatgtagcaaaaaataagtcagttttat

SEQ ID NO: 27022 - DNA, 4885 bp, Zea Mays
ctgctctgttgcgcgtttccctggcctctgctgcgaacctgcaggtgcggacttgcggctgcggcgccccactgcagcactgctgtactgtactggccgcagcgttcgccgtcctccgccacagaaaattcacgcacgattccgagcagccgccctccgccacaatttcgccatgggcgcgccctagccccgcccttcttatccccgctcttccccgcctatggctgccgctgctacagctgacgcctccgcgcagcccctcccatggctctgcttgcgctacggttcgggccgcttctccctgccccgccccaccaccgtcgggtcctgcggaaccgatgccgagtccggatcgtcgcctccaatgcccccacccccgtgagggacgggggcgctgccgcggtggtgtggtttaagcatgatctccgcatcgacgaccacccgggcctcgccgccgccgtctcggagccgcggcgccccgtcgtgccgctttacgtcttcgaccgacgcatcctcgccggctattcagataaaatgctggaactgctgctatttgctctgaaagatcttaagatgacgttgaaatctcaagattctgatttgctcataggcctgggaaacgctgaagatgttgtgctgaagcttgtgaatgaggtacaagcaggtctcgtttttacagaagaagaagttgaatatagagtgcgtgatgttcttgccaatgttgaatcatctttatctaatgggtcattctcatggggaagccctcccaagatagtggcttggagtgccccattgtatgactataagaatctgggagcagtaccgacatcacatgacgattttttaaagaaaaaattaccattggccacaccttcttgctgcggcgaccttgcctgctctaaatttggagttagacacaggttctctacccactctggaagaattaaaatgtttcctgaaagaaataacaccagaggacaattgggctcctctcaagagaatgcccgcaagatctatccttaaaaggacaatcagtcaaaggaagatcaaaagtaatgctacattaagcaccatcaatgaagaaaacatagatgatgctgccaccatggattctgttgcatcaggaaagaggattataaactcgaagtttgcatcagagaactcactggaagttagtggtggaacagaaattactttggatgctttggctgcttacctaaaatatcttgaaggcacaggaaatgctagttggcaagagttgcatgataaagtgcgtttagctgaaaccagatatggtgcttcattctacatcttgtttggtcctgcaattcaacttggagtcatatctaggaggaaagcttacactgagactatccaatatgaaaaagatcgcaatgcaggttttctatcaccatttgggtactcaacacctacagtaacatcagcagtagatgctatatgttcaatggagtggtattggctcttggcatcaaaatcccaagtatgcatcgaggggaaatattctataagaatttggagatggaagggttatcttgtacagtacacctttcttggcaacgaaggtccacctgttcttcttgtgcatggttttggagctttcctggagcattttcgtgacaatatagacaagattgctgctacgggccaccgagtttgggcaattactcttgttggctttgggaaatcagagaaaccaaatgtcaactattcagaacttttctggtctgaactactgagggattttattgttgaaattgtgagggagcctgttcatcttcttggcaactctattggaggttatctctgtgctattgctgctggtttatggccttctcttgcaaagtctctggttcttttaaactcagctggttcagttgttccaaattactccttcatcccactgagtgaagaaagacgaacatcatggatttccaggttgcaggcacagctccttttgctcttcttgaggtcaagggcagaaggcattcttaaagaatattatcctacaagaactgaacgggtggacaagccacttctggaccagattgtaagagcttcatatgatcctggtgctgcaaaagtccttgagagtgtattcaacttcaatctttcaattcctcttaacttcttatttgattcttttggagggaagatattagttatccagggtatgaaagacccccttacaaaatctgaggcatttgtcaccatgctccgagaacattgcagcaaggttcaaatcagagagttaaatgcaggtcatgctccacatgatgaagttccagatgaagtaaataccatactatgtaaatgggtggagcagattgaagttaagccagccctggagaagaccaaggcaatatagaaacaaatcagcagtgcttccaccagtcatgagccctggtgaccatccgagaaatctttgggcgcgcatcagtgaggccataaaacaaaagcgctgattgggatcgcccaaccaacgcaccttatcagctttccccctctctcttggtttcaccaaatctgacggtgacgcgcccggtgcatggcctccggaagatgtcaagttgcaggtgaccgttccatccctcacaagctactgacctcctccccctcttccctctaatgatatcgatagataggctaggctgggccctgccctgaggtcacttgcacttcgtccacggccactgcttgaattgctcgccctagctacaagcctccacggaattgtttgtgatccagctgctttcgctcgtgtccagtcggtccggtcactcgtggatgttacaagctgctgctcatgggccaccagttgctgcactcttgctgtctgctttcaagccaagtgctctctccagtctcctcccttgtgctggatttcttggcgagttcttacgctagtgcctaggcgtagcgacgtgcgttgcgcaggtcgggcgacagaatcggggccgggctgtgaaacttctggagcttttccggtaggacaggagtgtaggacctctttcgaacaagctacgttttagaatttaaacacaaaatatatgttccatccgtcctaaaaaactggtctgtagtttataacaaaaatactatcaacaggtatggttatatataggaatatgtgaaaggttattttgaggaattcaataactcttatttaatatcattaatatttatacatttttaatagaaaatggtcaaaatgaagattgtttgacctatcatcggagtgagaagtataccatttttaggacggaaaagtatacactaagattgtctctagcggtttctctaaagggccccttgtcctatatctggagaaaattcttctcctctatacgctctagcagtgtcttctagatatagatgatgtttctctatcctctctctatatagattctctcttctatctacttattttatagcaaaactaaactatttataagatatttgagtgcatgataaatacatacatacataaatctagaacaaaatatgtttttaatattatttaacgtaaagaggacggaatatgaaggacgctggggagaaataagacatgagggaatgtttttagaggagactgtaaatgagatatatagatgaggaatatagatgatatggttggagatagtacaagactgtaaaattgctatgattttgacattggaactgttaatatattaaaccatttctatgtgaaactcttaaattccaaatagtcgctacacgctttgtttgagtacgcatacctatggctatgttggctttgcaaaaagaaacacaggcaagtatgcaggtcgaatatattagtactgttacacattgtcatgtcgtgtctgattacggcaacttattctaagagaggtcaaaaggagtgtcgcttgcgaagttggtacactagagactgatgttgtttcattgtttgtcctttgatgatggggtcgaagaatgatgcagcctagctttgttatctctgtcacggaagccaaattgttaatgccccaaagcctagcatacgcccgctgaatgttcagcagatgaaagtggcgtttggttagaaaattgactagaggtgtacaattattgggtgcatataggtcaagatgcttgctatattcctcttgtatctaaggacagtatgtaaggaaaatgcaattttaccactagcgcgtcgacgtcaaaatatatatatgttcgtgaggtttaattttatctatatattccactgattattagcaggtgattttttaattcagagggaaaaaagagacgtacacgcggaagctttttactctagtagttagagttagttgttagtactattgcagtgtagagtaatttttttaaaattgatcatagcgtggccatgtacaagattttttttgggtttactgttgtgacgcagcatgcatgcatgcacgcatttttcttccatgcaaaggcttcccacaaaacttctgttagacaggtcagtaggtcatcactcactcgatcagtttcggccaacacgtcgatttgctgcatatacacgtattggcgccacacgcgtggatggcattaatttgagcatcatggctgacaggtgaaacagtggagcaagctaacaataaaacctgcgtcagttgatgtgtatctggtcatcactgtttccgtcaactgaaatactactacgaatgagtatctagccactcattgacaaatgctgctaacgtgtactggcatgctcatgagatcacatcagcaatgttctggggtttggtcacttggagtctgccactgcaaataccttcattagtacgtattgtgcaacctgctgcaactttgattaatccataactgtcacacccggatttcg

SEQ ID NO: 27023 - DNA, 997 bp, Zea Mays
gaaggtgttgtttcttttcacttggttgcacttgatttacatggattgcattcgatattagtgagctcaacctgccgaagaccacatcaatttcttttcccaatggcaaggatgatctgatgaattttgagatcaccatccgacctgatgaaggatattacatgggaggcgctttcgttttcacctttcaagtgtccccatcttatcctcatgatcctccgaaggtcaaatgcaagaccaaggtgtaccatccaaatattgatttggaaggcaatgtctgtctgaacattctgcgtgaagattggaagcctgttctcaacatcaacaccgttatttatggcctgaatcttctttttacgcaaccaaacgacgaggatcctttgaaccacgaagctgcagctgtcctccgtggcaacccaaagatgtttgaggcaaatgtgaaaagagccatgaccggaggctacgtaggccaacactatttccaaagatgcttggcttgatgtgatggcttcaagccagcgggcccatgtatcagcaccagcgcgcccaggtttggaggatttttgtggatttagggcgcttctggaagcaaaggtcaaatcggtcgttgttgataatgtgatgtactccctcagttctttttatttttcatgttttagtataaaaatgaactaacaaacgacaaatattcgataacgaggtagtatctgtttgccctgtgacgtgtttaaaaccggtgaatttggggatatggtggtgtcacaagggaaaatgcttctccaattatatcactcgataaatactaaacgagaaatgggaactggattgtaaagaagatcgcttcttttccagaaaaaacaaaattgaggtggtatctttgattttgtactcggctgtcttcaatgtccgatcttccaggtaaacaccctctatttcaaacgtttcgattttttgtaagtttttagtctgatgtgcatttattttaaattataaggta

SEQ ID NO: 27024 - DNA, 1951 bp, Zea Mays
gcctaaccattcccggctcccggcagagacggccgctcgcctccagaagagcaacccaagtcgccgagagcgactcccacacgacccacctaccccgccgccgccgccgccgcatccccctcgatcccgtctggcgatcgggggctcccagacacatcacagatacacaccacgctaagccaaatcgagcaacgcctatcatcatattataatttcccctcattcatctcacagtcccaggcctcccctccctcctccccgtcgccaaccaacctccaacccccagccgatcgcgtcggagatgctgggcgtcgcgcggaggcggctcggatccggatgcgtgctcgcccagctggcgcaggccctccgccccgccgccgctcccgccaggacctactccgccgcggccaaggagataactgtacgggaagcattgaataccgcattagatgaagaaatgtcggcagacccttctgttttcttgatgggagaagaggttggcgagtaccaaggtgcatacaagatatccaagggtttgcttgacaagtatggccccgatagggttctcgatactccgatcactgaggcgggcttcactggcattggtgttggtgccgcttaccatggtcttcgacctattgtagagttcatgacatttaacttttcgatgcaggcaattgatcacataattaattcagctgccaagtcgaactacatgtctgctgggcagatatctgttcctattgtctttaggggtccaaatggtgctgctgctggagttggtgcccaacactcacagtgctatgcagcttggtatgcacatgttcccggattgaaagttctagctccatattctgcagaagatgctcgaggtttgctgaaagcagcaatcagggatccagatcctgttgtgttccttgaaaatgaacttctttatggtgaatcatttcctgtatctgctgaggtacttgattctagcttctgccttccgattggaaaggctaagatagagcgacaagggaaagatgtcactatcactgcattctccaaaatggtgggatatgcccttcaggccgctgatatactggccaaggaaggtatcagtgccgaggtaatcaatcttcgctcaattagaccgctggatagagctactattaatgcatctgtgaggaaaaccaatagattggtaaccgtagaagaaggcttccctcaacatgggattggtgcggaaatatgcatgtctgttgtagaggacagctttgagtatcttgatgcaccagtcgagaggattgctggagctgatgtgcccatgccgtacgctgccaaccttgagaggatggctgttccacaggtcgatgacatcgtccgggcagccaagcgtgcttgctacagggcagcagtaccgatggcagcaaccgcctagtccagcagaaccctgcatgttgcatttctttgtctaattttaatgtccgtgctgcagaaagacgtgtcacataatggtgtgacgagtacccactgccgctgcaactcaactatagcatgagctgagtttttgtagagccaccgagagatttgcagcagagcctctggagatgagaattttacttgtggcgagatgttggtgcagcagtcactgcgtgtggccctgagcacccccgtctgtccactcaccagccatgcagtcgaccgcagaggatccgaatccatccgagactggaagcgagcatggttcggtcaaagccttgaaggtgaggcgtcaaataatggcggtgtgcggtgtccgagagtgacgcgtccgggcacgtccactcctcgcttgaagacgtgtccagccgacatgtatggtcaggcggaagattctattctatctctatacgatgcacaggtgttggtatgggtgcggtgtagaactatcccagacccatacagagaaagagcagagacgtcagag

SEQ ID NO: 27025 - DNA, 4204 bp, Zea Mays
gtgcggatgagagttcggatgcgggtaaaacttagaaatatccttcaaaggcggggcataaaatttcctaaaatttacagatggatctctcaagccttttgaggccaccaatggtgaaaaccgaggcggcggaggagcgggagcccctctcccggacgccagcggcggcagtagcggtcgagggtagcggcagaaggaccgccacggcggtgatcgacctcagcagcagcgactctgattccgacggcgagggtgcggtcggaagcggtaagagggtgaggggcgttggtggagacggctccgcgactaagcgggctagggtttcagcggtcgtcgatctgcccccgggtttcctcgagccaatcccgccgccgccggtgccggtgccattggcagcttgtgcgacgaagcagttctggaaggctggggactacgacggaaagccgctcggtgatggggtggctcagcagtcagtctctggaatggatcatgttcgcgtgcaccctagatttctgcactcaaacgcaacaagtcacaagtgggctctaggtgctttggctgagctgctggacaattctcttgacgaagttataaatggagctacctatgtgaacatagatgtgttagagaatgataaagatatcgataaaaagaagtccagaatgcttcttgttgaagatgatggtggtggaatggaccccgataaaatgcggcaatgcatgtccttgggttattcagctaagagcaaagttgctagtactattggacaatatggtaatggtttcaagacgagtacaatgaggcttggtgctgatgttttggtcttctcccgtagtcctggaaaatcaggcaaaggcctactcaaagcattggcatgctatcttatacatttcttaggagcactggcaaagaggacatcattgttcctatgattgattatgaatataaacaaggctgggaaagaatggtccggactacattggatgattggagcacaagcttccaaaccatcattacatggtctccatattcaactgaagcagaattacttgaacagtttagttctatgaaagatcgagggacacgaattattatttacaatctttgggaggatgaccaaggggacttggagcttgattttgatgctgaaatacatgatattcaactcagaggtggtaatcgtgatgagaaaaatatccagatggcaaatcagttcccaaactccaagcattacctcacatataggcattcattgagaagttatgcatcaattttgtatttgcgacttccgacttacttccaaatgattttgcgcggaaaagagattgaacaccataatattgtgactgacatgatgttgaagaaagaggtcacctacaggcctgtggcacctaatggacatccgaaggattcaaatatggtagctgatgtaacaattgggtttgtaaaagatgcaaaacatcacatcgacgttcaaggatttaatgtataccacatgaaccgtttgataaagcctttctggagagtgtggactgctgctggaagtggaggtcgtggtgtcataggtgttcttgaggcaaacttcattgaacctgctcatgataagcaagactttgagcggacaacacttctagcaagacttgaagcacgattagttcaaatgcagaaggattactggtctgggaatgctcatcgaataggatatgttgcaccacgatttggcaggaatactgaggcaggagatggagaagactctcctgaaaacacagcaagtgcacaaccatcaccttatcattctggtaaagggtacacacatgcaaaagacttgagtaataatatcaaaaagggtggtaaggcaagcacatcatttggtattcagcaaagagctgagaagtccgcaaggactaaacgatctacgaagtcaatactgcacgggctgtctgatagtgataatagtgattctgagtttatgggcaccctgtcgaggtcaagatcgcacaccctgaagacaaaccgaaaattgtttcaaaatggcagtactggtttgataacacctcaatccagtggactgatagaaagagagagggtcagaactaaatcccagccattggacccaaaagcaacaagcaacggagatctacatactatggatgagtatcagtctgttatcatgcagttaagggatgaaaattcatcactaaaggaaaggtaaatatcagcgtattaccgttgggcaaccaacaattactatatgtcgatggtattttacgagatctaataattgaacaaagttcaaacttaaaaacattggattgatcacattgtcactttctttgcatacttcctgttgtacaactgttgcgagaatgacttaaaatgtagcaacaagtttgtgttaagggattccttattcaaatgggctttggtatcaagagtcaaatgttttcgtcgaacaacgttggagagctacgtgttattacattaagaaataaaaatggagagacaagagtctactccgagtacaagggagaaagaaactaactactgcacccaacacttaagaaacaataaaaactaaaatgaaaaaaattccatcacaataaaacagcacaaagcattcccatcagcagcttaaagaaacatctcattaggagcagaggcaccagtaatgcaccacaaagcactcattagccacagcttgtagaaccaattggacatttggaggagctcctacgaacacacaagcattacgatccttccatatttcagatgggctatggtacctagagtcatgaataagggattatgatgacccacaggccacgttcagaaattaaaatttaaaattggcaatggacctgtattagatacttcgccttctgatcttgttgttaagagaggaatgtgttttttattaaaatgatcatgccgacgagacacataagtggctgttgaagtaaaccatagattccaagtaacctcaccttggaagttttaattcttgacacttgaggatttgtttggttaattaagagttggaattttcatattgaaaggaaattatagcctgtgtgatttgctatgcttctgtgtggcctgtatgatttgctatgcttctgtgtggcccgtcctgcatatgggtgggttttagtggattctcacctcttgagtttatatagttttcccaagaagggctatttgaaaattacgtcactttaaaaaattcgttatgtttcacttgttatgaatagaaattgcacaaaacattgtagggatcatttgtactttatatatgctatataaaaactagattccttttactttcgaccatcaaggtgtagctactccagtccatttgaccatgacaatgtggaactaccaagcctgcatgctcgcagtcaaagttacttggtcaattgggctacttttagaaatgttttgacaacacggcaacgggattgttcccatgcaactggaatgggactgacattcccaggatgaggaacgggcattgtaatggtactccaatttgttttgagattgcagtaaggtgccttcatgttcttttctcagattatcaaagatggaagaatcgatgtcgcaagagctagtggttgagtgtgacaagaacaagtctttgacagagagggtggaggatctgcagagacaacttgagtctgcaaccaaggaacaggaggcgctgatcgacatcttctcagaagaaaggaaccgacgagaccaagaagaggagagcctgaggaagaagctgaaggacgcatcttccaccatacaggatttgctggagcaactgaatgctgccaggaaaggccgcaaagtttgaggaaataaactagtaacgttgctccttgcgggcatcatcttagattagagtttgagggttagctgcatctacattgtgctccaggtcgtttggagcatcccatgtacagccaagcagtagtgaccactgaagaacacgttatgctttatctgcagttagcagttaccctacaagaaataacttgcgtaattatctttttatcctgttacgtcatctcttgattacttgtcggtttctgtgctctggttgctgctgctttgggcttcgggaatacttgtactaccagttggccatggttggtttgaaaggttatgttactgcaagccatggatctgtagtgtctacgaggtcctatcgaggtcg

SEQ ID NO: 27026 - DNA, 2346 bp, Zea Mays
ctccccctccgcgtcctacagccatcgtcgctctgccttccgcccccgccgtcgccgcagacgcagccggccacccaccactcgcgcctcccccaccgcgtcgcgtgtgggccacagctacagctgcctcctcgagcaacccacactcctttcttcccctgcctgtcgtctctcttccaccttccaccacaagcgccgtcgcagccggtgcctgctccttcccgatccccgaggcaaagctgcgactccgcaactgccgccatggcgttcgagaagatcaaggtctccaacccaatcatcgagatggacggcgatgagatgaccagggtattctggcagtctatcaaggacaagcttatcttcccatttctggacctggacatcaagtactatgatttggggatactgcacggtgaagcaactgatgacaaggtcacagtggaggctgcagaggctactctcaagtacaatgtggctattaagtgtgcgaccattactccaggtgaaactagaagaacgtatgaagctagacttgttgcaatttatagacatgtaagagaggatggagttgagggacaacctatttctgtttcaacagaacaatttgcaccttgttgataacaataattgatctgggcctcttccaccagaattagtagatacacgtagtcttcttgctatcttgacttcaggctgataataacaacttcagtggaagctccatcctgctgaatacaacaacatacaaacacttctaaagctggcattgcgctgcggggttacatcgccgtcaccttcgacatgcgcgacataggtgggtccacagggcgggtgtcgctcacgtgctccatcaagaacatcgagtgaggtggtgtgctgctgctctaaagaagggaggagaggaagtagcgacaatgtcgccaagaccacctggcgcgatgtctcctaccagatcaccaagatcaacatgtacaaggtgatccagtccgagccctctccctgcatgcttccattgattttttatttcattccaatcgatttgccgtgatatatgcaatgcaggatggtcggcatgtacaagatatgcttaagcatcagaggctccataaagcagctctgctagaattaactgattcactgtcaaggtcaaacatcactatgatattgctgagatggtccaatcagtgacaatgctggtggtattgttgagatggcaggaatgagccacaaaatctgagagaacttatgctcttggtgctgctgacaacacaactgttgctattagaaagggatttgccattggttcaggtgctcttgtgtccctggtgctgtttggtgccttcgttagcagagctggagtgaaggttgtcgatgttctctcctgaaggttttcattggtttgattgttggagacatgtttttgtactggttctctgtcatgaccatgaagagtgttggaagtgtcgccctaaagatggtggaggaggttcgcaggcagttcaacaccattcttgggttgatggagtgaacaagcaagcctgactatgcaacctatgtgaagatttgcactgatgcttcttccatcaaggagatgattccttggggtgctctggtcatgctgactccctcattgatggaacctctttggcatcgagactctctctggcgtttttgctggtgccctggtttttggagtgcaggtgcgcactttgccttctactctctctgtgcacttcaatgtgtttgcttgttctagggtttatggagatttctgctttggacaaattgccatctctacttccaacactgtgctgcataggataacgcaagaagtatattaagaacaaggccatctcagataaaagtagatgtagctttcataggacttaattccagcaaagcaaaggttggcagtgcaccaaacaatagcgtttatacttcattcttatggattggagaagcctatgcaacatgtcaagccagatgacatgcagatgagaaggttctgcatcaatagaaaccagagaaaaatctgtatgtgtctgtatgacatctcagataaagcctgatgatcagcatgatgaaaggtggggagttctatagctggtttaagctggagctagcttctgaagtccggtcaggtgtctgtatgtgttgcccctttttatttcatttcatgagaaaagattgttatttgttccttgaactgtacttggtcgtacttgtgaataaatattttagcatggttgttcgacttctcataatgtttattcgacatcagttcatgatattagtgttacgtgatattttatcatatgaattttgaatatcatagtgatgtttatc

SEQ ID NO: 27027 - DNA, 3254 bp, Zea Mays
gtagccagtaggcagcgtagcactgcggctcctactaccaagtaccaaccacacctccaacccccgccgtataccaatccgccggaggtctctattcagtccacttgcctttttccctcaccggtcactgcatcgagctatcggttcgtctctccctttccctcaggtttttgggaagtgcggtttcctcaatgtctatttgaatcacagcatactgaactgaatcaagtgataattgtgttctggtcatacactaagatatacctgaaacttctgcttcatatgttcacacatcataaatattccaacaaaggtcagatgaacagcgaaaggaatgtgaagatcatatcaggtcgtgatgggcaaaagaagggaaattcacagtatggccaaattgtacacatgccaaaggacatggtcacaacagtcaatggaaacgtagatgcaaaatttgaagatgaagttagagttgtgaagaatgataggttccaaaggcaacgagagtcttggggtggggaatgcaagaagggctcaaaaccatggcctggtcgaaaggcagctactgttgatgaacttgttaaacatatgtcaaatgttccttcatatttacagcgtaaagaaacttctgaccatcttcaagacaaggcactgaatgttggagttcttgagtgggggcttcttgctaactggtctcagcaagaaaagcataagctcactagaagctatggaccatctccacccaatactagcaggtctgtactattcccatctccatcacattcttctccaagccccagcagcagatctcttgagagtaatcaatctaccccaatgagtggccatcatcattcatccatcagagcacagcagaataggctcacagataaacaccatgagagggccagatgtccacctagcccaaattctgcagtactgagcttattgtcaggtcatggcacacatccctgtccagagaacggtcataattatgttgggttgggtctcagcaatgtttctttagcctcagactctctaggttcttcctctagaagttgtggaagacatgaaatggttggagatgaagagactagacggaagactgaagacgttgtccatcattgttctcgtaggctttttgcagacagcgataacattgggaaacatttcttcgcatcaaataccaatgactccatgtgtaatgatcctgaacagagtattggcttgaatggggaaaattttgagtcactaacgtctgatgctgtaatggacacagctagaaatgacagtaagtcgtctgactatttactggaggatattgagccatcccttgaatttcctcgaatcccatattcatgtccacttcccatcatagattcagcagccaaagagattggcatcactagcactgaggctggagatgcaaaagtgagtaaaaattctaaccggaaccaatctgccatgaatgtcactgagaatcctccccaatactcagcaaagtttagtgataagatgccttattgtcatctaggttctgggatgaatcgagggagctgcagctctagcctcaaggagtcaccacatattcgacaacccaatatagttcctcctgtcgataagacaggagacaggtcatcacccaacagcaaaggtaggcgaagcccattgaggaggatgttagatccaatattaaagccaagacattctagtccagtacgtccttcatttgttcctaagtgtcaacttccagtcaataccaccaagcagtctctggacttggggaaatcagtgccacataatgttcagcgaagtgcaagatacatacaaaaaggaaatgattcagcaacaacaaggcaagcacttctgcagctagcatggaagaacggcttgcctttattcatactctcttatggtgattctgacatcctggcagccactgttagaaggaagggcatccctgaaaaggatggtctggaaagcacatatgctgtattcactgttgaagaaccgaagaaaaaaagtggagcttggatcaagacagggggcaagaacaaaaaacatcaccttttatctagcatagttggggaaataaaggttgcgcgtcgaaaatcaagatgccaccatacaaccgatgttcatgtacacagggaatttgtgttggttggttccaaatttctaccatcgtctgaagaatcaggtgattcaaatgttagtggagagcttgcagcttttatcagcacacttcctcagcaagaagcagaaacctcgaagcaatcatcttcacagaataccaggcaaagaaattcaatgccaattggctgtggttgccccccactgggaaatttccatcctagcacgagaagtgctaattctgcttcagccaatgttgttgcagtacttcctgatggcttccatggcacaataacatctggacagccattgcctttgattgagaggtggaggtcaggaggagcttgtgactgtggcggatgggatgaaggttgtatgctaagcgtcctcactgatgcgtccgaagaaaatgatgccattcaggctaaccaggcaaaggatggcagccagagatttgagcttctagatcagggtcgatcacgagaagagaggcatgccttcagtatgacttccttcaaagaggggctttatacagtggaattcagatcatccattgcattacttcaggcttttgcaatgtgtatagtgatgctccatggaaggtacccaagaagaacgcaagttggctcgcaagcagagcaggagcatgatctccttgctggtcatgagctcaaggcaatggcagccagtcaaggaagaaggcctccgacaagctatgtgccccaccggccacctctttctcctgtaggccgagcctagcttatcacgatttagtgtatgttctttctgtgtctgtcctctttcttcagctgcgtagtgccggtgggattgatataccatggtccaatggtccatatgtaatacgcatgtccaaagtgacaatctctgcgcaagtctttagagatagctccctgtacatgctgtgatgttgttgatggtgtatgactgtaccagtaccgtgatgtggctgcaaggtccatctcagtgcttagttacccttttatatgtccgcttatctgttgcttctgtatatgctgaaatgcgcctgcaatctgttgcaacccttgtttaaattgtgcgttgcatcgcagcagcatttgtgcagctgctgaagttatgttttctgg

SEQ ID NO: 27028 - DNA, 3799 bp, Zea Mays
gctatttgcaattttgccgtgggggtaacccatggagatcacggaggagcagcggcgtcgcgccgaggccaaccgcctcgccgccctcgagaagcgcaagcgctacgcagaggccgcggctgccaccgcctttcccacctccggtgcctccacattccctgcctacgacactgccgccgccgccgagtggaggctcgccaaatgcccaagaatcgccccgcccgcgcgccagttaccgtttgtaccgctgccccctcgtccttccccaccgccgctgccgccgactccgcctcagccgccggtggggttccaggttgtgctggaggtatgcggccccgacgagttctgggtggcggtggtgccggtagaaggcagggcctaccctggggaggccgagtgcctcggcgccgtccaggactgcctcgctgcggcttcggttgtacaatactctgcaacacagtcgctaagtcaaagcacacatcttcgtcctgtatttaagcttgtggactatggtgtggtgttgaaatgccttaagaaattacctggagcttctgtgcaagaaataccttctagcacaaagagaattattcagaatatacctaggtatcacgtccaaaagtgggcttctgatgaagaagtacatgagcttctcaagaaactgccacagcaaataaaagatgcgcttttacccttccaacttgaaggagtgatgtttgggcttcgaaggcgtggacgttgcctaattgcagatgagatggggctcggcaagactctccaggcgattgcaatagcatgctgtttcaaggacgagggctctatattaatagtatgtccagctgtattgcgttattcttgggcagaggaattggaacgctgggatccttcatttatgccaaaagatattcatattgtatttggtcgtcaagacagtcttgaacatctaaatgctactccaagggcagtgattatatcttaccagatgctaagtcgccttagagaaagtatggtgaatagaacatgggcactgatgattgttgatgaatcacataacatacgctgcacgaagaaactagaagaaaaatatgagacaaaagctgtgctacatctagcttcaaaaactgaacgcatcatattgctctcggggacaccctctttctcaagaccttttgatatctaccaccagataaatatgctatggccccacatgcttggtactgataaatttgattatgcgaaaaaatattgcttgctgcatgttgcacgaagttatcaggggaaaatgtttaaggacttctctaagggcacacggttgacagagttaaatgttttgctcagtcaaactgtcatgattaggcgactgaaggagcatttgttgaatgaactgccccccaagcggcgacaaattattaggttgaagctaaaggcaccagatatcagggcagccacatcttcatgcggcaaaagggtgaaccctaacagttgtaatggaactcttacaattgaattgcccagtaaaagcaatgatgatgaaaatacaaaagaggaagaagaagatgattgcaagaaatctccaaggagtctcaccccacaagagattggtatcgcaaagttatctggatttagtgaatggttctcaaatcatttcatcatgaatggatttgatgctaaccataacctggatccccagtctagctgtcagaaaacaataatatttgcacatcacttaaaggttctagatggaatacaggtgtttatctctgagaatgagatcagatttgttcgcattgatggaagcacacttcaaagggaaaggaaagaagctgttgattctttccgtttggatccagaggtgaaggttgcaataattggaattactgctggtggtgttggcttagacttctcatctgctcagaatgttatttttgtggagctcccaaaatcagcttcagaattgcttcagaacacattggatgaatcacactggctccagttaaaccagagtctgttccgtgtctcgtctttgatgaatggaaaaaaggatgctgtaagggagattgaggttgatcaagtgtgccaacttgaagaaatcaaggacaccgaggaaacacaacgcaaactgcatcctttggagaatcataatgcagatttgacccacgtaccaaaaaaacttctggaaagtgatgatttgtccattgatggttttcttggcatcgaagatttggaatttgacttggatttcaccattaggacaattcctcttgaatttgaggatgaaaaccccggcacatccttgaaaaataatccaactccaacagtacttgaagacagatcttgtattgatgtttctctttcaccagctgcagtcttttgctctgtactatctagttgtaaatcaataaagtctcgtaagaggctttctggaaattctgggtccttgagtcaagctgcatctgttccagattttccaattcaagtggagtctctgcgttttgaggttagccggcacacaggacgaatccacttgtacagttgtgttcctggacatgattcaagacccaaaccactttgtgaaaattttctgccagaagaattgaattcacctttatgttctcccagtgatgttaaaacaagaactcttctcttgaaaaagattccttcattttgcaatgtgttcaatgcattcatcaaagagtggttggcactaagaccaattgatcaaaataaattgcttggaaagccattacaacttccgttgaaccttgagttgtgttttctgaaagatagcatcaatcatagcacagaagggatacttaaagggggaagtaagaggcgtgctgcatcattgaatgatgtcagtaatcctttgccagaaaatgctgaatggagacaggtggtgttgcgtaatggcacctgtaaagagagacagtacactcagggctggaccattgatgatgaacctctctgcaaactttgtcaaggactttgcaatggaaggcttgcaaagtcaccagaatattttgaagatctattctgtagtttagcttgtttccaggaatacagattaagaaccagtggcagggccctccggcaggcactgtttcaaatagaacgtggcaagtgctcccaatgcaagctcgattgttgcaagcttgtcaaacacattaaactcttacctttgggaaagcgagaagaatacatcagaaaggttgctccaaacattgcaagtagaaagaaactcctagataaacttgtccgtgaaccaattgatggaaatgcttggcatgcagatcacataatacctgtttataaaggaggaggggaatgtaaactcgagaacatgagaacactgtgtgtggcttgtcattatgaggtcaccagaactcagcacaaggaactaaaagaaataagaaagaaggctaaagagcacttgaaaaacgccttgaataaacaaaaggataaaccaagtgaagcaacagaagaactagatgacgaatcgttgctgatagctgtcccgggtagtgcctactccttaggatttcctggcaacggatctgatgaaaaggctgctgaatagggcatgtttcatttaccttgattattgttcaaaaagggcgctggtattttttagctcgcgtcctttttttgtacatgttaaatgctaccaagcgtttgtaagctgttcggctgctcttataagcagcactgataagcaacactattgcagctgcagagctagaattatctcacatttttgggcttgttcgttttgatgctaaaccatgtggattgagttggattg

SEQ ID NO: 27029 - DNA, 1148 bp, Zea Mays
ggacaagctatcagtatttgcggtcctttgcaatagcagattaggacttgctcaggaaaatggaacaatatctgaggatgttgttcggagtgcgttttctgccaccgaggaaggcttcttgacactcgtgcggagaacacgttttataaagcctttgattgctgcggttggatcctgctgtctagttggtgtcatatggagagggacactatatgtggctaatctaggcgattccagggctgttattggcgttctaggtagatcaaacaagatcgtggctgagccactcacaagagatcataatgcaagtagggaggaggtcaggcaggagcttatatcccgtcatccagatgattctcaaattgtcgttctcaagcatggtgtttggcgcatcaagggcataattcaggtttcaagaacaattggagatgcttacttgaagaggcgggaatttgctcttgatccatctatcactcgtttccgcctttcggagcctctccgccagcctattctcacagcagagccatctatctatacaagggtgcttaacccacaagataaatttattatttttgcatctgatggtctttgggagcacttgacaaatcaacaggccgttgaaattgtccacagcaatccacgatcaggaattgcaaagaggctggtaagggcagcgttgaaacaagctgcacggaagagggaaatgaggtatgatgacctcaggaaagttgagaagggaattcgccgcttcttccacgatgacattacagtagttgttgtttacatagatcacggattactgcaagagagggatacttccgtgccagagctctcagtccgtggctttgttgactccgttggcccctcaagtttctcagggataaccgccatatcatgactcactactaatcgatcagcacaattttggtgtacggcattcaagtagcatgtgactatctgagtgttatgctttaccaggcgtttgcttttagtattgcctttatattgagtactactacaatacttcatgtcgctttgttttcaaaaatactttgtcaattttgcaagtctgatttgctcgaaataagaggctcatgctgttgtgcggtgcttaataatatgagtattgatggtgcaggaaatgcttt

SEQ ID NO: 27030 - DNA, 1679 bp, Zea Mays
tgagcaccagggaatcgggtttctcaatgatccgcgcaggttaaatgttgcgctaactcgtgcacgttatggcatagttattcttggtaatccaaaagtactaagcaagcagccactttggaatagcttgttgacacattacaaggagcatgagtgcttggtagaaggacctctgaacaacttaaagcagagtatggtgcaatttcagaagccaaaaaagatataatgaccggagattgttcctgggcggtggtcaaggtgttatgcatggaactaactttggggctggggcctcaagccaagcagcagataagagaagtggcagagggaaaggacttctttgtagacgattttaagagccaagggtcacatgtgccatacaatattgctgaattttctacccaggcttctcaaggtggttatggtgttgagtttactcaagcgccccaatctggatactctgggaattatatgaaccaaaattcacatcctggatactcccatattggtacaacaaatgacattgtatctcaggatcacatggcccatggatctcatgggatgtttacacaagcgggatataatgatccctcacaagatgagtcgtctcagattcattatggaatggctgccgctggccctctacagtcgcagggcatgatgaaccccttgtactctcaatcctatgctcactacaacacccaaccacagtctcttcaacctccgccccagtgataatgaaagcttgtgataggatgaagccaaattttggaagtttggtgggttgcatcttttggcccacatgtgcacttctccgctgtttcagactcgatggtgcatagacatcagatgcaagcaatgaaggcacactatgtattggctatttatcggggcaggcttgactgaggggcacaaggattgcaacgtatcattgatcgttgtagttcactgcccactttggccacaggagaggtcatatcatcgagaggttgacggcactaccctcatccctcacctgtatagaaaggcaatcggggccaatagtggtacgatgtgaatattccaggatttgctgccattcagaaagtcaagttgcagcaactgcatgcctccatggtaccatgaagacacgcccgtagagtggctttgtatagaggtgctataggcgaggtggacaaccctttcggatatcgcacatggcaagatatttacattgacattttgtatgcacctgatatggttttgatatttatgccacaaatcatttaggtggtgatgcaagtagtttgttgtgattggaaatttgggagtgttcgtgaaagcaagtttgatcctgaaatcttatgggggaatggttgagtgggggttattttgttgtgaaacaggtgtctttgaaaagaaacctttccaggagtgatttcatcaagattgattgttagaatagacattagtaactgttataaatggttaacatggtcaccaaagcggtacgtctagttaacatggccacaaagacattaatcaactttgagacgaatgacaggacctaaaggggcatgttctttggcaaagtagaagtggtcgtctcgcagttttatagcaagacggccattgacttatggttccaccactcccaccccttcccatctttggtagattttctatcatatctcatattt

SEQ ID NO: 27031 - DNA, 3190 bp, Zea Mays
acgatcccccttctcgatccctacacgtctcctgaaacgcacgccctcccttggctgccccccgccccttccctttcgccccctctcgcgcaatttccccagcccggaccccaaccccggcggcgctgcagtccaccgcaagtcacctccacctcacgcgaggcctccagccctcgtcgccccgcgcttctcccccacgacccggccgccttcgcgcttgcgccccgcggatcgccggcgcgaccctcaggtgtgtacgtctggcatggcaagggacctatcaactggccctgctttctcttttcatgaatgatgtccttccgttcgaaggacgcacatgcacaaacaagacttaactggccatggagaagccaatcgccgttatcagcgcagctgcttgttgatattccacctgaaatagagttgtccgactaccggagattgccaagttctcgaagcgagagcccatctggacttctccatgacgaaggcgtcaaggaagaacctatccctgatctggacattttctttgaaaggctttacgaatatttctgcgcaaaagggctcaggtgtatcattaccaaatggataatagagatcctcaatgtactttttatggtatgctgtatcgggttctttttcttatttgttgattgggatactcttattcatttgaaatgcggtgtggaggcacttgagtctggggagaaaccatgtgatcttatgaaggccattaagcatgatccattagttcccttcacattgcccaaaatgataactgttggatcaatggtcataatgacagcttatggacttaccaactttctcaagttctttgtacagttaagaagtacactcaatgttcgtcagttctactatgacagacttaaggtcaatgatcttgagattcaaactatatcatggcccaaaataattgagaaagttgtcctgctccagaaatctcaaaaactatgtgttgttagggatctctcagagcatgatattatcatgagaatcatgaggaaagaaaattatttgattgggatggtcaataaaggcattctttcttttccaattcattcttgtgtgcctggggctggcccaactggatcacatgagcatggcaggagaaactatctgatacttccaaagtcccttgaatggaccttaaactggtgcatctttcaaagtatgttcgatagtaaattttgtgtaaggaaagagtttttgacaagcccagatgtgttgagaaagcgacttatatttgttggcattgcaatgcttatcctatcaccctgccttgtgatatttccattggtgtacgtcattctaaggcatgctgaagaaatttataatcaccctagtacagcatcatctagacggtggtcaaacttatcaaggtggatctttagggaatataacgaggttgatcacttctttagacacagaatgaacaacagcgctgttcattctttaaattacttgaagcaatttccaaccccactggtttccatcatggctaaatttgtatcttttgtttctggtggcttggctggtgctctaataatcattggatttgtgggtgaatctattcttgaaggacatatttttggaagaaatcttctctggtatactattgtttttggaacaatagcagctataagtcgaaaagtagtggccgatgagcttcaagtttttgacccagaaggggccatgtgcctcgctgttcaccaaacacattacatgccaaagcgatggcgtggtaaagagaacagcgaacttgtacgaagagaatttgagacattatttccgtatactataatcatgctacttgaagagatggcctccattttcatcactccttacttgcttatttctgaggtacctaagcgagttgatgacattctgcgcttcatctcagacttcacaatatatgtagacggagtgggagattctaagcttgtttaacttcaaaaaacatggaaatagaaactatgggtcaccattcaatgctcttaaaggtctcaggagctcccaagggaagatggagaaatcattcttaagtttccagagtgtctatccatcatgtgagccaaatgctgatggcaaacaattcttatctaacctccaaaagttcaaagaaaggcaagtacgtcaacaagctcttgcacaatatcaagcactggaggcttcaggctttgtggcaggcactagaggtcaaagggatgataccttccaacaactccatagcgatattcatggccacgctgaggccaccctgcctcctgtttataacttgagccccttgggattgcttgacacagaccaaagaatgcatccatatatcctggactggtattacacatgtcatccaccacactcggatagagctgagggcccccaatttgaccaagcattccctgagaccggtgtgagcacgagtccaccagcaagggaaacatctgaaattgaagaagtcggagactgggacaacgagttgtatgaaagggttcaaagtcatctgggggcatcaacatcaagtgctttgttctggaacactccagggaaggaccatggtacagaagaaaacactaacagcaattggtgggcacatgcccctgcatatccttctggtccccagggtagcttcatcgagcctccagattttggaaatcgatacatgacaaatcctcattccagtaatcacagtggcggtacatcggagggaagcacgtcggatctagagcagagcaatagcagaagcagaagttcctggaggagccctcaagcgttgtccaagacaagatatatggacgactctgatattgaggaagggctaagcctgcactttgctgatgtccatcagaaggatgaagacgatagacacctggtggtcagggatcatcaagatcccgcaccatctggtcttccagtaagaataatacctagaagcagtgaccctgtgtaagctggttaaacaccacaggattatcacataaaaaaaaactccacaggattagttgatgcatgttaacggttgtattttgttgtttgaaccacatcaaaatcaaatgctgcgtctcgcccgtgaactggcaaaacagtcacagattctttttgtacaggccagtaatgatagaaacattcttttacaagcgtgcttggtaggtgcaacacaagtcacaagtgc

SEQ ID NO: 27032 - DNA, 2113 bp, Zea Mays
tgtacaaagttactactatacacttgtgaagtggaacttgatgatatcttcattttttgactttttgtgctttaggctcctcttcttggatcgactgcagcagttagatctgcacatgtatatctttgtttaattatcgtctccgtattgtaagattaatttgagcttccattctacttttgctccacatatgaaacattaaaagatactctaattatgctatttaactccaagggtggaggtggaatgggtgattataaccacctgcaggttgtgtacatatctttagtacatatccattatgctatttaactccgaaaggagacaatatgcatcagtttcaacaactttgttgtttccttttcatgctgtcttataggatggcattttctgctcaatttgtccgttgctgatttcagtcgggtaatgttctttctgcacaatgacttttgcttgcaaagtcgagtttggcattatgctttgtgtagatgtatctgagaattgcatgactgcatacccttaacatgaaatttcatttttagagattagattagattagatatgtcgctgatggaagtccaactaatagcgaactgaagaccgccgaccttgtgtctacacccgcacattctgttgcatctatacctccttctacaccagcacttcatgttgctcctgcacttttgtctacccctgtcagatgctcatctccatttatcacgccaccatattgttcctcaggttccatttagttgttgaattagttctaaaatcatagtggaaccaaaataatgtgtggatatttgcaaacgagtttctcttgaagtcatggtgtgaggaaaaaaggtaatgtccttcacattattctggtttagtataccttgttgattattgacatatgttggtcatgttggtgctccactaccttgttcgtatattaaggcatgctacatttcttaactacgtaccaatgatgtggatacgatttttgcagcaaagctatttttatcctggtgttatcttatctattctcatgacagtgaatttagttttattgttgacctcccacggttcttgacttcctaacatcggccactttatttttagttgattgactggcatgagggtggatacttgactgttgatttaccaatgtctcggggagaagttgtcattgggggtccaaatgtttcgtcattcttgcctaccgctgtccctttgcttcagaatacggtgaaacagaagtccttcattggctcttctcatcttggctcacatgcagtacttgaataccagtttcttcctgagcagccaagtgatgcatatgagaggggaagccagttgcgcttctatgatgctctagcagaagtgttaaactcaagggtagattcgttttctataggatcacactttacccatgtagttgagcaggcacctagctatacatttcacagtcaatcatctggttctagctgtttgtcaaatattattgctagcatggctcaaatccaaatattattgctagcatggctcaaatccacggtcaaaaattggcatccctcaagttgtcagatttgaaagctccctcgcatcccctaaaagattgggttatcatgatgaagaacatgtcacgtggacagaaaaacacaagaactatatttatggatatactatttttttcttcttttgtattattatattcatatccttttttacctttatattattattttttatatatgttgtatttgtctaatattacttcatcataatgaggaagctaagattgctagggaggttgaggctcatgaaaagagaattaaaaaggagcttgagagttgagaagcaaggtctactaaatagaaagaaagaagaacaaatgtagagggaaatggagagacatgatcacgagagatgtaatgaagagaggttcatgcgtgaaaggcaaaggaaagaagaaaattccattagcaacagagacgtatacttataactattatggtagataaaaaatgttacaatgtctctcttctatagaacgaaactgggatatcattcattgatatatgttcgattttattcaataattattatataattgtgcaccgtcgca

SEQ ID NO: 27033 - DNA, 2659 bp, Zea Mays
gccaaatgctacatgtcatctctgttgcaactccaggctgctgtttatagagaagactacaggactgctcataaactgaggctggctattgctgctacatcaaaaaatgacgctgtgggcagagctatctcggacttaaatatggccatagatgaggagcgctacaaggatgcagcatatatcagagatcatgctggcgcaggactgctggggtggtggtctggaatttctggaaatttgtctgatccatatggtcttattattcgtataagtgctgaacatggtcgatatgtggcaagaagttatgatacaagacagctggcttctgacagccctggtctccctatatttgaaatatactttgcagaggcaaatggtggatataacctacaggcagtgcatctgaaaccagatggtagcgattctgaccaagtgccaaacatgttaagggagaaacttggcattgacagtataaacatatctagcagtccattagggtctaagcatgaagaatttgatggaagtgtaaacatggatgataaagatagtgatgatagcaacatcgctgctggccctggttcgaaaaacttgtcaagcgatctaactgcagttcccaggattaaaatcttgaaagtggtacccatgcagaatgttgatcatgactacataatcaatatctttgatcagatttcagaggaagatgatgacaatgatgatcatgaagttgaaaatgaatcttcagaagatgttgataatgatgataacagtggagtagcagaaacagtttctgcagaagagaatggtgatgaatctggtgacgaaagtgatattgaaaccttggtttcatttgattttgtcagtgagaataacgtctatgcttctcgtccatctgctgaagcttttgaacgaatgccggctagattagaaaaaagagatcgcttctcattttccttctatactgaagaatacagtaaaaagctagatgctggaaaggcccggcagacttcaaaggaaacagttggtttgcatgccgatcagcaggattatgatggttttgtccagcttgatcgtgtaaagttgagtggcagcaacaaaaaactatcgatactacaacttggcatcaagcaaaataacaaggttcagcaaaaactgcatggagttacccactttagtcgtattcagatgcctatattttcagatcctcttaccggtttatatgtgaccacatcaggatttgactcagaaattcttagtttgcaacgaaaatttggtcaatggcgggatgatggttcatctgaggagcatagtgacctattgttctatgagcatgttgaagctgtaaaattaacaggggacaatctcatgccagctggtcaggttgtcttccgtgcaaaagttggtgaacgctatcagctccctcataagggaattatccctagagaacttggagtggtattttctataatccaaatagtattttgtgttttcacccgcagacatcaaacctcacaatcaatgtgatatagattgctaggtacaaggggcaaaggaaaattgcagatcctggtttccaaaaccctcgatgggttgatggagagcttttgataatagatggaaagttcatcagagatggtcctgtgatagctttcttttactggacatctaattttcatcgtttcgaattctttagacggttgaggcttcctgaatagttcccatctaaaagtagttaaaggagttgcctggcattacattttccgaggacagattctgatgtgaagagggcgcctggcatgaatcaaggggcatctccacccactctgaaaggctgccatgagggtggaaaatagctcacagtcgcaggaagaggaatagcatcctgccaacatgggtgagctgcgggcgcatcataccaattccgcttctgctatgctccgtccaccaggtcaccagcttgtgaccgaggcatcaaaccgccagattttgtgtttctcagagcaagtagaactaaagcacctcaaagatgtaaatttatgcactcccaaatttaggattttgagcgcaatcttggcagttttcatacatgcgaagtgaactagtacgagcaatagttttgtatagcgtgatcaaacagtggcagcaatcagtagcagaggcatacagaccaacacggccacacagatttgttaatatatctaagtttgtttaaccttgcccatttcttaagcaagaactctatttttaatttttaagctcccattcaaacaagcaaggaaaaggctgtgctgtcgcttgtcgctgcagcaatagacaagactgtattcaggagatgatgtaaaacaggggacgtgaaactgtagatgtgtcatctacattgtttgatactttttgcagagtacttcatgaagtactgaagttttaaataggggataagatagagaatttgttaaagattaggcagcaagttttaaataggggatgagatagagaatttgttaaagatagcctgcctaagactactgcctcacttgttccacactctatttacaatggctgtgttacgaagggcagataagatctgttacatctgtccgctcactttggacactgtgtgcttattgagagatgtcatggactgtcttctccggcgaggttatac

SEQ ID NO: 27034 - DNA, 3355 bp, Zea Mays
cggcgttggtgttatgggcctacttgggccctcgagttctgtcgtatggcctgctagatattctgtgagatggctggccccttggacggcgcagatcgcttgactgctcagcctggtcgacgttagaggatttgatacccctcgccaccgccaccgccaccgccggtgtcgtctatcctgaccccgacacctcgccgcccggtgccacctcaccgccggattcacatcgcccagtcgccccaccagccagaacctcgtcgcctcgcccgccttgctccgcaggttaggcagccagtacccccaaaccctagcatcctcggcgctgtcggtcgtagaagagcactgggggcgtgagagagggagtcaccagccctcgagacctcctcccgcttctaccactcagccgacgctcccaaaaggggcatctcaaatcccacctcactcccttcgacctctgagatgtcgatatgaatggagacctgtaacttgtatatatattagggcttagttttcttgtttcagtatctgtttggagttagaagcaagggttctcatggcatctccacaagaatccaattctctgtgcttgaagcgaaagcttgttgatgactgcctgtcaaaagactgcaaatctcgccgtgtcaaatctgagaatgagccctcatctgattcatttgctaaacgctgcaactgttgctgcactcgacctaatcttgccaatgattgtgtgaatttcctgaagagtggagcgccaaaccgtgtcatgtattacaaaaaaggttcgtggcacaattttccagagcaaataatgaattccctcatcgatgaatttaaaggaaataaatcaagtgttgtctctgtgatggatgatgaaccaatccttgttgatttcttatcaatgaccctggtcaacctgaaaaccagaaagcagcggtctgttgcctggtttgatgacactggcaagcgtttctttccttctctgttctttgatgaggaaagtgatgaaatgcccaaacaggattctggcaatgttaataacactgcacaaggaataatgttagataaggtcacgagttctccacctgaagtggtcaagcaagttgttcttgaatctagtccaccagtccctcaaaaaccttcaactgtggatgtcttgcgcaagaagatcacatctgtggaaagaggtagcgaagggtttctatttgtccaggacctttttctctctggtatgaacccgtttgcaacaccaaataacatacttcatgtccaccgctactctccaaacgatatcaccgcacaatgtagatttgaagcttttgaaagacagatgaagtcaactaaagaagcacgtggtgatgcaaatgttaagtatggctggctaggatctaggaagagtgacatagttaggattctcattaatggtttgggtactactgcaaatcctgttgagaaagctggtttgagtgctggtgtatatctttcacctgaaaatcgagcctttaccagtgtcggtctttgtgatgttgacgaaaaaggagtgcagtatatgttgctgtgccgtatgatattgggcaatgtagaagctgttgaacctggatcccaagagtcttttccaagcagtgagatatatgattctggtgttgatgattgttcaaaccccaagtgttatgtgatgtggccatcacatctaagcactcacatccgtttagaatatcttgttagtttcaagcttgccccaaaagttcgaaattatttgcttgacctgaaaggtttatggtttaatccatcactaaaagaacttggcacggacatttgtacacttcaacctgtaatgtgtgaaacaggtgaaggaccaacttccccatggatatcattcagagttctgtttgcagttattcaagacaatatatcatctgtggcaagggagttaatcttccatcattatgaagagctgaaggaaagcataattacccgtgaagaaatggtgaagaaaatgataattgtagttggagagaaagtacttttggaggccttgaagaagcttcattactgtccatcattatggtacaggccttctgttgaagcagtgtctagtgattctgtaatggcagcaccaggaaaattatccttggataaggcagcggatatggtgcccaatggtcaagattgtccggcaccaagtggtgtgccagaaacatctagttctgctgttgccatgcgtggggcttctacaagtgtggaacccaagcgcagagatcctcctgtacagattgtgccacctggaagctctgcaaccccatgtgccaaaaatcaagattcttttgtaggaagagtgacacctatagctcgtgatgggcttttgaggacaatttgtggaagctcttcatctcctggcggttatgcttctctagcgcaagctaatacctcccaaaccaatggagtttctgccccaggtgtcactcctaggggctatgaatctgctgtaccaagcttgtcacttggaaattccgaaagtacaggcgtgaaacaagtaaattctgcaccaagaatgacacctgaaggccagaagttcctttcgctgggtattgcgccacgaagcccagcactgcgtgatttagtaaaatgccaggccagttcgacactcgttgccatgcctccagcgggcctgggaaaatcacggtccatgaagatcgagggccatgattctctggcaccgagtgtgaaggagccaaaaggcaatggtggtctagcaccaagtaaaacgccaaagctgcatgaacctgtgatagctgatatgagcatcaagagctgtgattctctagcactgggtatcgcaccaaatggccatacccatgatggtccagcatcaggaagtggggaggccaagaaagagcaggcagcactagtaactggctcgcagagtaaatcatctgtaccaagtcttgacgctagcagccatgttaccggggcagcgagcgcccttgtcgcactatcaactctgcgggagaagggcgggcgttagaggagcagcagcagcagcagtgtagttcccgttggatcagatcctttttctctactgtacatgtttctatgtacaggaatcatccccgtcgactctgatccccagtgcgtacggttgctgttggtggccagtcccctatatgttgcttggcagcaaatgttttggttaataattagtttttataaaaggaatattcacccttgttatgttctctacatgtaaattatctgaggtatacttgcattattatgagtgctataatcttttcttttactacatgctctaaactgtatcgtgtattcaataataaaatgttaatttactccctccatt

SEQ ID NO: 27035 - DNA, 1262 bp, Zea Mays
gagacccaccgaaacctaccagtgtccctacatcgtcagaggggcatagacgaaaaaccgagcccacgcgagaagaaaaaaagtggctaaaaatggaggcgtccgcggaggcggcggccgccgccgccgctgcgcgaacgttgaggtgggctggccgcgcggggcacctgggcggcgtcccgcgcgccgtcgtgttcgccgcggtgggcgcgttcgccaaggcgtgcgcctcgctgctcaacaccaccacggtccacaacgccgacgcgctcctccgcctcgtctcggcgcgggctcccgggacgccgctcctcaccgtcagcaatcacatgtccacgttagatgacccgcttatgtggggattcaagggttttccaacttcggatgcaaagcttggaaggtgggtgctgacagcagaagatatatgcttcaagaatgtagtcatgtcctacatgtttcgacttgggaaatgcataccaatcacgagagggggtgggatttatcaagaacacatgaatgaagcccttgacgtgcttagaaatggaggctggctgcatacattccctgaaggaaaaatagcccaagaagatcagccgattagaagattgaagtggggaacggccagtcttattgtccgagcacctataactccaatagttttgccaattgttcactctggtttcgaaaaggtcatgccagaaaactcgttctttggacggcgaccaccggtgccactctgcagtaagaagatagacatcattgttggagagccaatagagtttgacttgccaagcttgaagcaagaagcatcaacggtaccccatgactcatcctctgaacggaaggggtggccggccattacaccagatgggctggacgaggccgcccagagatggctttaccagaagatgtcagacaaggtccagtctgtgatggagagactgcggaaaacagttaccaaccttaagcagcgttgatcttcatctatcaggcaataccttgttgaactgctgattaggattctttaaccagcttgagttggtggatacagaaatggacaagtggtcgtcacacaagttcgtcaaagtattggtaataatagaattagagctcagattgtttcattttttagtctttttttagttattgttttgaaaggtttcttcattatttacaatcaactgttcaggttgcctgccagttttactgaggcatgaataaaaaaaggcttttgatattcagttgcaaaatcaccatccatt

SEQ ID NO: 27036 - DNA, 2134 bp, Zea Mays
tcgtcccgatgccatatggatttctctatcgacacagttcgcaataatcaactcgtttctctccgattgctcctccgagtccgagactccgttctctcccgcatccaccgccgtctcatccccaatccgagcaacgcctcccctcgcctccaaaaccctacccctcctgtcaccggcgggggcatgaaccggtgatcgcttacctggtctcgtctgtctgcgcacgcgcgaggtcagtgagtgagcattgcggtggtccgatcgcccgcggggggccatggcgtctgtggcgggatcgggcggcggggcaagcgcgggggccggtgggttgaagacttacttcaagacccccgaggggcggcacaagctgcagtacgagaagacgcactcccccgccgtcgtgcactacaaccacaacggcaagaccgtcgcccagatgacggtggcatatttgaaggagaagccagcaggccagggttccacgccttcaacaccaagtgctggtagtgggatgcggtctgcagctgcgagactgcttggcactgggaatggtagccggacacttagcttcgggagcaatggtaccagcagggctgtctcaggaagcagccgcatgggtggaggtattggtgtgtcaactagtgcaagtggatcgcaaggcatggcgaactacgatggaaagggctcatacatcatattcaatactgcggatacgctcttcatcagtgatctcaactcacatgacaaagatccaataaagtccatccacttcagcagctcaaacccgctttgccatgcatttgacccagaggccaaggatggacatgatctgctcattggggtgttctcaggagatgtctattcaatgtcactgaggcatcagttgcaagatcctggaaagaagcctgtttcataccagcattttgttaataaagacaaagacaaagataaagatccaagtcaaggtggcgctgccagcagtcagtgcacctgtgttgcatgggttccggagcgtgaaggaatttttgttgttagtcatgctgatgggaatctgtatgtgtatgacaaattcaaggatggaaatactgattggacatttccaactgttaaggatcaaagccaggtgctaatttcacatgcaaagtcgagtaagggcaatccaattgcaaggtggcacatctgtcaaggtgcaatcaatggcatttccttttcaccggatggtgcttacttggcaactgttgggcgagatggttatttaagagtatttgacttcacgaaagaacaactaatatttggtgggaaaagttactatggtgcactgttgtgttgctcttggagtgcggatggcaaatatttgttatcgggtggtgaagatgatcttgtgcaagtatggagcatggatgacagaaagatagttgcatggggtgaagggcataattcatgggttagtgcagtttcttttgatccgtgttggtcccaaccaaattcagatgaaactgaagaaaatgtcatgtatcgctttgggtcagttggacaggatacccaactgcttctctgggatctggcattggacgagattgctgtccctctacgccatccttccggtgggtcaccgacattcagtagtggaagcccttctgcacactgggataatgcatgccctccaaccggtgttctccaaccctctccacggatgcgagatgtgccgaagctctcacctctcgttgcacaccgggtacatgtagatcccctatctggcttggaattcaccagtgaatcaattgtcactatatgccgtgaggggctaatcaaaatttgggcacgacccatccatagtgaaaacaaccagcagccagattcttctgaacaggttataggcagtgccactgctaaggataagatgttaacatcgtcaaataaagcagagtagcttgggaaggcttgcagtaaaggattgaagaggctttgctagcatttttgttagccatttcttatcctgcttcatcggcaacgtttctagttacagaagtgtcattgttgccatcaatgttggcgaaagaaaataacagaacttgctcctgtacatatacagacattgccataagatgaaatattacaagcttactggtttgat

SEQ ID NO: 27037 - DNA, 2977 bp, Zea Mays
atggctacaggcgatgcgcgtgattcaagccccagcccagcaaccatttcagcagaacgctccaccgcttctccgaaaaggcaaaaaccccacagctcgagcgccgcgccggaagcctgcgcccccgaaaccacgagcgtaaaccctcctagtccggcggtgatggccggcgtcggtggcagcggcggtggaggtggggacgacgcggagatgggcggttggacggggcttctccactcctccacgaagctcctcgagcaggcggcgccaaccccgcacttccctccccttcagaggaatctggaccagctcgaggcgctctccaccaagctcaaggccaagaccatccgctctgaggctccgtcacagtcgctctccgccaccagattgttagcacgcgaggggatcaatgctgagcagctcgccagggacctcaagtcattcgaactcaagactacctttgaggatgtttttccatctgaagcaactactgttgaggagtacttgcagcagcttcatgaaatggccattgtttcatccatccaagaagctcagaaggacaatttgaagagttttaacaactatatgatgcaagttcttgaggatgactggcagaaagagaagagagacttcttgcagagtctaagccggctttctacattacccaagagaaacactaatctctcgaccagtgggttgggtcgccctgcttcaatgccaccatcaacttccagtcttcatgctccatcaggcctgccttctgctgaagtcatgcctataccgaacaagactattattgaaaaaaaatcttcagtttatgctggggttgtgagggacctcaatgattctagagggcgcagtctaccttttaatcctgctacggcttttagggctgcttatgaatccttgtctattgatgccattggcacaaagtcagtgagtatgcagaaagtgtggcatctaattcaggcattggttggggaagggttgactcatcgaaatgtttcaagaaaaatgtcactagtggtaggtgcaaggcaccatcttgagtggggtcatgaaaagtacatacttgagaccatcaacagccatccagctcttgctgcccttggtggatctgttggcaatcttcagaagatccgagcatttcttcgggtaaggctgcgggatcaaggtgtgctagactttgacgcaaccgatctacgcagacagcctccagtggatacaacctggcagcagatttacttctgcttgagaaccggatactatgatgaagcaagacaagttgcccaatcatctcgtactgcatataacttcgctcccctgcttgcagattggatttctactaatggtgctgtatcaccagagactgctctggcagcttctgaggaatgtgataaaatgctcagaatgggtgatcggccagggcgtcctggctacgacaggaagaagccagaaaattggcgtcatggatgcctgtgcagaggctgcaagcataatacgacagtatggctctatatacttgcgtaatggtaacattgatctagccttggagtattatgcacaagctgctgctgccatgggtggaggtgaggcatcgtggattggtgaagggcatgctgataagcagcgacaacgaagtttgatgttgaagcaactactgatggagatattgctaagggatggtggtattcaacttttgcttggtccaagtggaatgggagaagaaggagagctgaaaaagtatatgatggattggagaagtaggcagcaattcttacttgaagctgcccatcggtgtcaagaggctgggctctatgacaaagctgtggaaattcacaaaagagtaggagcctttgccatggctcttcagacaataaacaagtgcttgtctgatgcagtctgtgccatggcacggagtatgttagatggcgagagtcgtgctgctgccctaattcattctggcaatgaaattttggagacagctagatactcttctgaagccagcattcaagagaaggacctcatttctgagcaacaaactgtgctgagacagcttgaagctattctccatatttataggctagctcgagctgggcaaactgtagatgctttgagggaaaccatcaggctacccttccttcatttggaccccaaggctccaaatgtgactgttgacattttcaggaacttgtcaccccatgttcaagcttgcgtgccagatctcctgaaggttgctctaaattgcattgacaatgttagagatactgatgggaccttgcgcgctgtcaaatcaaagatcgcaaaccttgtagcaagcaacatgagccggaattggccacaggatttgtatcagaaggtggcacagtgcatatgaagtggcttgtgttttgagttgatcaggaatctggactaatctgtatcagaactctgaagctttcaaacaatatggttgtcatcccatcctgtgtttaatgtgtgtcaaatgtaagatgtttattttttaaaaaagaaatttccactgatatttttctgtctttgtcgtgggaaaaacggctcacccgttgttacagaatccttaggccttattcggttgccgatcaatcaaggggggttgaaggggcttgaggcggaatctctagcaagtcaaaatctttcctaatcccctctaacctcatagaatggggaataaccgaatgaagccttaagatcttaaggggcatattggtccagtgcacatgcgtcgacaaggacctttgccagctgttggcaacttggcatctccgcctgattgcaggagtgcacggagccagataaacatttgtagcctgtatgtaagttactgttggaaatgtctttgaagacttgtattgtacgagagcatcactgtttgttacggaacatcagcattacttgaggaatcgcgaactccgtatgtttattcgaatggtaaagtctcgtggtacagtttaatgga

SEQ ID NO: 27038 - DNA, 361 bp, Zea Mays
tcaggacctttcaaggtcaatggagtcccaatccgccgtgtgaattagacttacgtcattgcaacctccatgaaggttgatatctctggtgttaatgtagagaagtttgatgacaagtactttgtaagggagaagaaggcaacgaagactgagggtgaactttttatacataggaggcaaccaaggacctgccacaactcaagaaggacgaccagaaggcggtggacgctgagctgatcaaagctattgaggatgctctttgaaggaaggagataatgcgtataatgtgtgggatgatatattgcttgagccctcatgctgtttatataagagtacatggcttggaggacccaacaggtac

SEQ ID NO: 27039 - DNA, 2045 bp, Zea Mays
acgtactctgtcaaacgatacgccgcgatgcttccagacgagcgccatccccttcctcgcctcacacgccgtcctgttggtcgtgcctctcttcaacctttttttcttgagcattagcgagagccccttacatggtgcagtgctagcatcgttgctggcgacctcggtgaggtcggatctgcaaaggttgcagctagcgcgcctacactacatcaacatggtgtggcatctcctttcgcagatccccaacatgctacgccgccggctgcctcattggaactcctgtgcaccgcttgcctttcttctcccattcaacccgcaggcgttccctggctcaatagcgcaactaggggatgtccgccgctacctccatataggaaacgacagatttagattttcaggtgatgcgtggtcgggatcccggatcaatcaaaataagtgtgaaataagtgtgaaatttgagaggctgttgaacttccagatcaggtaccaaccaaaaaaagtgacccttttgacggcgtattgcgtgggcaaggcatgccagtgcgacaatagagaaactaacggggagctctgttcgttctgctgattgcttatgattaggctcgcagtggtggtagctgggagagcttgggactggccagacgcgaccaactcacccatgtaataagacaacttttatacatagccgacagtacgcaacctcatgcgcaagatccttaatgaaaccaaagagctgcagcagataaccaacgacaagcagaaaaatcaggttgtacgcatccaacattttactttcatatttgctgaagatgtcaacaaacaaaatagacaagcagcccagacaatggagatgatgtatacgataattgcagatgagttcaagtcaatggacaataaggacatgcgccctgaagattacttgaacttcttttgtcttggaaaccgggaagaaccaccatctaatggcagcccagaatcagagaaatctacatataaaagtgcagagatagtctgtttttgcattttccttattcttaagggtatggcttagctcaacccttctgattacaccaaaactgaatatggttttggcgcacggaccttatgggaagctagagaagcatttgaagacgcagaaattactcatgttgacgatacagtagatcctgttagagacatggaaactattagtgaagagctcagactaaagttttcgttggattttgttgatttacaagatcagctgtacaacacttaaaccttttttcgacactattctgtttctattttctgcaggatatagagttcatgaaaaagaaacttgaggaccttgataagccaatgaagaggaggaatgataagctgctcaaaattgagcatgaattatgtgagaggattgatccagcacaatgccgaggagactggagactaaacttggaggtgctactgaaggatgtgactttgagtcaaaggacaataggtagtcagatgaagattgtaaaaaacaagcatgcttaacccttcaagaatgcacagtttgagcttgaatttggaaaggggatatgccacagttcagagttttttgaacagaatttctggagcagttgttcctataaaataatattttaggtcttgaagccaccaccgtttggattgacatgatctgtggtattctggtgatctcattatagcagacttcatttcttattgtgcttatacagtagtgtagcgggaagagaattcacattgcatgaaatcatgttgatagctaagaggtggaagttgaagtaagccgggaagggtgaggtattgggaactgtggcatttaaagttcagtaggcagcagtaaactgtagtggtgtggtcgtgtacataagatgtgcacattttgaactcaggcattctttattgagtgctgctagaattacattgagctccctccacttctgatacttgcctggttttgcgtcaattggatctgtttgtccgtcctcaacactgttgtctgtttttgctaatttgggcattatctatgacagaag

SEQ ID NO: 27040 - DNA, 253 bp, Zea Mays
agagacactctaagagcatgtacgactacaatctagagcctcttgatcgattttctaagcacaatagacaccctagaaactgcatgatacaatgagacaaccttatctggaacggctgataaaagctattccaataatagtcttattacatttgtacaaaattttgtcagtaatcgaggaagtagtcttgttatatctgaacagtagttgatgtcatagcgccagcgaatggtcattgacctgaggaatatat

SEQ ID NO: 27041 - DNA, 330 bp, Zea Mays
tcaagcctggttcagagaaatgccgaggggggtactggactctatcccacctgaacaggtgatgcaatgccaatctgaagaggactgtgcttgggtatcgaaatgtcttccactagctgaagcagctttgcttgactgggctgttaatctgatggatgatgtagtccaggaagaacagataaacaagatgaatgatcgcaatattgctatggtttttgtgccaaatacgacttaggtattgcattgtgctaatattgtagcaattagcgaactagcaatatatacctcaccccgagcagtggaacggttatgcgtgctaactattagcaa

SEQ ID NO: 27042 - DNA, 3839 bp, Zea Mays
tacaaacccactatatactgaatttaatgcctccaacgaaacccccaatcctgaggatttgtttgctcgtttggttgtgcttctgcataatccacttgctaggggtcaactggccacccagatcctgacggttctgtgctacttgggtccacttttccccagaaacctttctttattttggcaagatgagtattaggtccctaagatgaaagcttacatcagtgatcctgaagacctaaagcaagatagcacataccaggaaaaatgggatgacatgataataaattttttggcagaatgtttggatgttgtgaatgatactgagtgggtcatttctttgggtgatgcatttgcacggcagtatgatctgtattctatatctgacggacacgctgctttgctgcacagatgcttgggaatgcttcttcagaaggttgatgataggatttatgtcagcgagaagattgattggatgtgtagacactcaagtatgtctattcctattaatcgccttggacttgctcaaggcatcgggctggttgcggcttctcatttagatacagtgttggagaaactgaagaacatactagatagtgcagagcaaagtgctttccagaggttcctctcatttttctcattcggcccaaaagtggaagatgttgatgacacatatgcagcattggcgttgatgtatggttatgccgcaagatatgctccatcaactgttattgaagccagaattaatgcacttgtggggagtaatatgcttggaaggttgcttcatgttcagcatcctactgcaaagcaagctgtgattactgcaatcgaccttttaggtcgagctgttattagtgctgctgaaatgggaatctcattcccactgaaacgaagagatcagttactggagtacgttttaactctaatgggtagggatcaaagtaatgatctcactgatttcaacactgagcttttgcacacacagagccttgctttaagtgcctgtactactcttgtctcgctagaaccaagattgccaatggaaacaagaaaccgtgtcatgaaggcaacattaggtttttttgctttgccaacagagccctcaagcattgttgagagtctcgtaacaaacctaattattctgttaggtgccatcctgcttacaagtggtgaagatggtcgaagtcgagcagagcagttgctgcatattcttaggcagcttgatccatatgtatcatcatctctggaacaccaaagaagaagaggatgtgttgctgtacaggaggtgttaataaagtttcgcaatctttgttctggtggattcggtgcattgggctcctatccaactttcacaatgaataaacaaatcgatcgagggactaggagcttgtcaagtttgccatctgcatttgtgttgcctagtcgagattctttaagcttgggagagaggacaatggcataccttcctcgttgtgctgatacagacacggaagttaggaaagttgcaattcagatcattgcacttttcttcgacatttcattgtcacttccaaagcagaaggcatatcctaatgatattgatctggaatcctcgtatagtgctttgtcctcccttgaggagttagtctctattgtcagaagggaggcatctgttgatcaaactgaactatttcagagggttgtatcctcagtgtgtattctattatcaaaggatgagctggtcgtcttgctacactcttgtacgttggcaacatgtgataagataaaacagtcagcagatgcttcaattcaagctattatcatgtttattatcagaagaggcaaggagctacgtgaagctgatgtctcgaggacaactcaatctttgctctcatctgctatttctcttactgacacacactcacgccaagaggttctgaatgctatatcatgcctagcagaaaacaccaatcacgttgtggtctttgatgaggttctatctgtggctggaaaagatatctgtacaaaagacataccaaggattcgtggaggctgggccatacaggatgttttttatgcattttcccagcacaaggagcttgcacttctattcctggagtacactttatctatacttcacaaagaacctgtcataataaacagttctgagaagggggagagtacctctgagtcattggctgatgactgtattctacaggcaactatgtttgctctcaatgcatttatgagaggtggtgggaagattgggaaacaagcagttgagaaaagttacccttctgttctttcgggccttatactgaagctcggaagtcttaatggtgttgctgaattgggccgaaatgaacttctacgatcgttgttaattgcatttcagtcattttgcgaatgtgttggtgatgtagaaatgggaaagctattagctcgagatggggaacaaactgagaaggacaaatggatcgagcttgttcaggaaatcgcatgcagttcctcagtaaaacgaccaaaagatgttctgccaacttgtgttatcttgtgtaatgctctcaaccgaaatcagagggctgaaagggaggctgctgctgctgcactatcagaatttatccaccacattgaaaaagaacctacattgcttgaacaaatggttgaggaaatgtgtcaacatgtttctgatgattcaccaactgtcaggagcctctgtttgcgtggacttgtgcaggctcctgagagccacatgcttaaatacatccagcaagtgttaggagtaatattagcacttcttgaagaccccaacgagtctgttcaattaactgctgtccaatgcttgttaaatgtccttaatttgtcagaacaagatgctgttggtccaatcttaataaatctcttagtaaggctgcgaaatcttcaggtctcaatgaatacgaaaatgaggtccaatgcgtttgcagcttatggtgctttaagtgcatatggtgttggtttgcagcgcactgcttttattgagcagatacatgctacccttccccgtctgatcctccatcttcacgatgatgacctaagtgttcgtcttgcctgtcggaacacattccagctccttgcgacattgatggaagtagagggcttgtctgtgctcctcagcaagcagtattttgcttctgatcgccgttctgactatgaggacttcattagagacttaacaagacaactttgtcggttgtctcccgccagagtcgacagctacctagaatcggctatccaggcattcgatgcaccttggccagtcataagagcaaacgcagtttgtttggtgagttgcatgctatcctttttggatgatcagcgattcattgctccttatttctcccaggtatttgctacgttggttggtagaatgagccaatcgccagacgcaattgttcgagcatcagcatcgtctgcgctgggcattctgatcaagagatctaacatgctgaggtcactggtttcacgatatgatcgagcagattcatcacgcaattcccagagcggtgattctaacaccaagacaccatcagagtttcaagaacaggcagaaggaaatccgaatgatggcgcaagtggagcggcaataaaggggactgaagccgatcactgatgtaaatttactcgtatatacgtatagtgttctagctatgcatgcttgtgtatatgctgtacttccctcgcaaataggaacaggagagcaaatttatgctgccatgtcaatagatcttcagtacacctgtaaagcaaccactcacagttagatgattatttattgaatcaaatattatttatatattgaattgaattttcttcgatgcagt

SEQ ID NO: 27043 - DNA, 313 bp, Zea Mays
actcaatgcaggtacttgatacatgttgggaatgaggggagtagcagcacgtccactttcactctcacaataacgctgcccaggcgcagccatgatttaattagaaacttattgtcaaaataagtttgtttatttttttatatggtcgtgcgcactggttaattcagttcaggtcgtatgtttatctttccttgctggccgagtaataatacttagtatgttttggtcatgatatatgtttatactctgttgctccctcttttatgcaatcttgcaaagaggatgctgccaaaattttatatatggacgtcgg

SEQ ID NO: 27044 - DNA, 1677 bp, Zea Mays
gttcctgagagggttctatatgaaattctatttcaggtaggtcgtgttgtagacctacacatactcgtgacaaggaactagccgacccaaaggttatgctttgctgagtatgaaacagaggagattgcccagtatgccattaagctattttctggccttgttcgacttcgtaataaaacacttagatttgcggtgcgtttccttttgctctctcattttacataagttatattagtatagcttgatagttgaatgttatcgttcctttttcattgtatattatactcccttgatcactaaacgttcgatattaattagtcaaaattaaactaaccaacgtcaaacatttagggatgttgggagtatctattactatgtatgtatgtgtcaagacttgggacttagtgttagcccagccccatatatttttgcactttactatttgagtttgaggcactttcacttaatatgtttttttagtatcagcataagagtcaactctgaaattactccaatgtttggcagatctctgggcaagacaaaccctcattaaatggcaatattcctgtaattcctagtttaaactctgtaccacagccaaagcctcctcatcaacatatgaggtctagtgatacccctttgccacaacatacagcagtgagtggcaggagtgctgggtatggtatctcacaaaatcattcatatgacactcacactcaagcaccgtcaagtgggttaccgagtagaggactaagcaacggtacatatgaatatagtagacgtgtatttggttctgttctgaatgatgttagccgtcgagctaccagggaaccaattccatacccgtcctgctagcatgttgagccctggtggctgtgactctatatgctgacagaaaaggtctctgaagatgttgtctgttgtctcagccatcagtaaggctatctctgtactcaccatttcatgcctgtaaatatgggttatggtggtaggacatatgcttgtctgttgggttgttctgttttttgtattgtagtgatacttttccctgctggttaggtccctctcattccctagtgtgaatgtcattcctccactaatatggctgcactaggaattaccaggcttagttgcatgaatgggtggcaatatgctcgcaatggtgttttaacattaagtgccattagctatttcaatgttatagcagggcgcgtttgtgtttgacatattagtatttggtggagtttgtgcttttcatcctgcatatgggacatctgaaggagagacatcgttttaaaagaaaattgtaaaataagtctcacaatttatgatgtttgatcatatgaatatttagttatatatgacttgtttgcttgagctatgtgtctgtcgcagcacaagcattcattatcgctcaactggctctcatggtgatcaagttatagattttctgtgacctggctactgtctggtctttgtgagttgatctgttgtcatttccatgttcattagtttggaaaagttggtgctgctggattttcacctaactgctgaattatctagactagtcggttgcccgtgcgttgtgacggcccacaacaatacccacgtaaactatctaccggaaagatctcaatattttttattaatattttttattgattgtcttctcttctt

SEQ ID NO: 27045 - DNA, 1198 bp, Zea Mays
gtctggccctcgaacggcgagacggtgggtggccgcatacgcatacatttcttccgcattgactctgtggggccaccgacggccacagagagaaacgttgagacagggagagagagagagcgagcgagctccagcctccacgcctccactacaccagccaggcagcagcccccaacgactggctcgccgctcgcgagaacccgagtctatttctgcacgcgcttccaggttttagctgcagcggcatcagggcagggggagagcaaaagcaatagttctgttctactggaggaagagcagggagcaagatggggtccggatctttcctcaaggtgctggccaataacttcgatgtccttgccgggcttccattttggtcgtatgcaaagctgttctttaactgctggttggtcttgccttggttcaatggtgctgcctatgtttacgaccattttgtgcggccaatgtttgtgaaccgccaaatagtgaacatatggtacattccaagaaatgagaagctaggtaaatctgatgatgttctgtcagctgcagagagatatattgaacaaaacggaccagaagcatttgagaagctcatcagcaagtctacgaagtcttcgaagtcaaggaacacaaagcggttgaacttggaggatggagaggctgaaaatcgagctaaagccgagagagaatcgtggggcgaaaatcccttctacgacaaaaactacagatactaaaccagttcaaaatccactcagcagtttgaagatgaccttgctcacgagcctcatgcaagctatagttgcgtcggactgaagacgacattcccatatttctgactctgaatattgtaccttgttacatccactgctactacataatgatgagttctagagcaattgtggactgtgtaaatggaggtagatgctagcgttaatcgtttatgtgctttttggatggtgtccttatcacccgttttactacatctttagcaaggagcgagccttgattttcagtttggctttcgtatttttgtaattgaatgctacttttagataactgaaatatgagggagttcgagcttctatgaagaaacttaacatgtgctaatgcatagagtgccaacaccgttatcatcgtcacaatttttgtacagggctcttctacaatgacttagagcaaggtggatctttgcagc

SEQ ID NO: 27046 - DNA, 583 bp, Zea Mays
aggattaataaaagtaaaaaaattccaaccgcacacggcacctcctctcgtccgttcgccgcctggctcgcaccgctgacagtgcgtcagtccaggtcgatactccctctttccaagatccggtcattctctctcggggtcggctaccgccgccgccgtacgccaggtgccgactgccgagaccttctccgatctgtttgccggcgaagagcgcccgccaaatctgcccctggtttcaaccgattgaaccccgatgtccgacgtcgagaaccctggcgtgggtgggaagccgccgccgtacaaggaccctgacaatgggagtcagcgattcctactcgagttggagttcgtgcagtgcctcgccaaccctacctacatccactatctagcgcagaatagatatttcgaggatgaggcatttatcgggtacctcaagtatctaaaatactggcagcgaccagagtatatcaaatacataatgtatccacactgccttttctttcttgagcttctccaaaatgccaatttccgaaatgcaatggcacatccaacaaacaaggatgcggctgcaagtaaaggcaaa

SEQ ID NO: 27047 - DNA, 1488 bp, Zea Mays
ctcctgctgcctccaggtccagcccacgctaccccacaccgccgttcctccactgagcaaaccccgccgccgacgagatgaagggagcaatgccgccgcgccagttcatggtgccgggccctggggggccgatgctgccaccgcagcagcagttcgggctggtggagacgcgccccccgctggcggccgtgctgcggccgcgcttcaacatcccgggcctccacccgtcagcggcggccgccgccgcggcctcgggcgcgggcaagatcgcctccacctatgacctcgtcgagccgatgcggttcctctacgtgcacgtcgtcaaggcgcgagacctccccgcggtgtccgccacgggcgccatcgaccccttcgtcgagggcggccagccacaacccgtcctggcagcagtcttcgccttctccgccacgcacctccagtcccatctgctcgaggtcgccctcaaggccaaggatctcgccggcgacgacctcgtcggccgcgtcgccttcgacctcgcggaggtgccggtccgcgtgcccccggactcgccgctcgcgccgcagtggtaccgcctcgagaccaagcgcggcgagaagctgccgcacggcgagatcatgctctccgtctggctcgggacccaggccgacgaggcgttcccggacgcctggcactccgacgcgcacgccgccgcgggcccggcggccgtcgcgtccacgcgcgccaaggccaaggcatccgtcgcacatggacactaagctgtcccatgctgagctgacacaccctgatgagcttgacgaggagttcgacacattcccttcctccagaccagctgaaatcgtaaggatgcgctacgacaggctgaggagcatcggaggccgtgtgcagaccgtggttggggacctggcgacacaaggcgagagagcccatgctttgctgagctggagggaccctcgggccaccgccatcttcgttttcttgtccctggtggtcgccgttgttctgtacgtgacgccgttccaggttctgatggtgataggcatgctttacctgcttcgacatccccggttccgcagcaggatgccctccgtgcctttcaacttctacagaagactgcctgccaggtccgatatgctcctttgagatcacagtattcggcgtgagagaatcgggtgcaagtctttacttatttatgtctgttctgctcggttccttctgattagtatcagatcagatgtgaatataccagatgagttcgtatattagaggtcatttagtgtcccaggaataaggtgttggtttaatggttcatttccttttgagtttttgggatagtgaggggaggtttttgggtgcagaaatgtaatgttaactccgggctattagcatagaactaaaggcaggaacaatattatcccccgtgtattatgtttgtactatttgtgtcaattttgtttgtgtttcagtgatcttttccttgctgtttgt

SEQ ID NO: 27048 - DNA, 1387 bp, Zea Mays
atggggcgatcgccatgctgtgagaagattggactgaagaaaggcccgtggacaccggaggaggatcagaagctgcttgcctacattcaggagcacggacatgggagttggcgagcattgcctgtgaaggcgggcttgcagaggtgtgggaagagctgcagactgaggtggacaaactacctgagaccggacatcaagaggggcaagttcagcttgcaagaagagcagaccatcatccagcttcatgctcttttaggcaacaggtggtcggccattgcaacccatctaccaaatcgcacggacaatgagatcaagaactactggaacacacacctcaagaaaaggctggccaagatggggatcgatcctgtcacccacaaatctatcagtggcactcgcattggcaccacaaacgacaaatcaaccaaggccgccgcaagcctcagccacatggcacaatgggagagcgcccgcctcgaggctgaggcacggctggctcgagaatcgaagatacggacagcaacgccaacaccaactgctctccatgcgcagccaacgatactacctgcctctgctgcttctccatgccttgacgtgcttcatgcatggcagggtgcaaagatagacctggagtctccaacctccacgctgacgtttacagggagtaatagtggaacgctgccaacccccaggaccaatagactagacgtatcagaaagcaactgtgcagtgtggcatcagaggagtgatgacttggaggatgaagaaaacgattggcagatcttcagcaagcaccaattgctggaactcgacagcaaggagagggaagaggacttcattggttgtgaggagccgtggttctcagagatggctggggttggagctggcttcactggcatgctgcttggtgtatccaatgagcatgatgcatcagaatgctggggtgagtccaataatggccaaactgagcgcagcaaccaagcatcagatgaggaggacaagaattattggaatggtgtccttgacatggtaaactcagagctgacacccaagtcgcctccatttgtctagactctagaatacagtcccctccgttttatttcaagtactcctgagcaaaatctattggatcatctcaagtcaaaagagaaacagaacaagcactacaaataaatgctgcatgtgctacaacaatatgttttttttgtccatgcatgtgaaagtgaaataattaactattgtgtggatggagtaaataattttttcccgccaatttcttttctgttggcctagccctagaaataactgtatgttaagccaccaggaccacagcagggacactacattaatgacccaaggacttttagagttgttagttcaacacaca

SEQ ID NO: 27049 - DNA, 1897 bp, Zea Mays
gatcacctcgtcgccgtctcccaccatctcggccatgaatcccctcctcccctcctcctttccgaaatcaccccacccgccggacccaaaccctagctccccgaatcctagcccctgcagctacctcctccacgccgacaccgacgacgaggcgctgattcaaatccccggtcagaaccctaccctggtgggcgcctccgcccccttcgcgttgctgccgtctatcgacccggtcccgcacgtctcgtcgcagttctacaccttcagcgccgcctcctacgggctcatggtacgctgcatccgagcaggccgctccgcatcttccgacgaggtccgcggcgccacgtcgctctccgtgctcgcctcctggcgggcggtctggaaggatcggaacgaggacactgcctacctcaccgcgtggaagcgcatccaggacaagctcgccgcttcggccgacggccggcaccttcacttcaagtccaacaccgcgcagcgcgtctcccacgtcggcatgtggagggacatagtctcggaggcgcacgccgaccccgacctgctccggcacctcgcgttcaaggacaccgtcgaccgcatcaagcagtcttggactgtgggggccaaaatctacggtattccagaatcatttatccgtgcatgtgtcgctgcatgccccgtttgtaaagctgcgcctgctagccaacctgatcccgctacctcatcacctaaacgtgggaagcggcgccgcaggtttgtatatactgagacattggatgtgcctgctcgagatgtgccttggaggttacaacaattggctgccaagcataaggttgtactttgtataaggcagaagtatatacggtataagcccttcatggctgaggtgaaagattatgcctgcgaccgtgctggagtgcccacatcaagtagtgggagtgctgcatcctcagccaataattccgagggtaagaaggcgcgggttctaaagcgagagccataccagtcaaagaggtgtggttgtggattccgtattcgggcaattgtgccgatagctaactataatgaaaaagacaagacttttgtgtacttggaggagggcactgcagtgttcaagctttacgctgtgcattcagggcatgaaccagggccacttgatggcaatgcacgaattgttcacaggttggttggtcataagggagctcttgagtttgatccagacatttatggtgtcagtgaggaaggtgatcctaccttttcagcgaagggggatgaagatgttgatattgacgactcacaccaggcagtcttgcggcaagtacggtatctgagatcagaagttctctcgctagaagggaaggtggctaagatgcacccagaattgttagggtcactgtccactgagttgtctgaggttttgcacaggattaggaagtttaatttggaaggcaatgtctaccaacagcagatattgatggtaggcaatgaagaagtcaggggatgggggtcaggggatgtatctcaccaattagaccagcatgatcgaccattctgcaaggatgatgagatgcttgatgatgatgatactgactttggctcaagcattggacctattgtctcatgggacaggatggcagcagagtgcgaggataggaagatgctcatgggtgatagcccaaagtgtgacaagtggatgcttaaggatgatgtgggtgattttgatgcaaagagtattcttaactgtggggatgatgatggcgtggaggattccaaggtcatcaagccgttgatgcatgacgataccatggttcatcagcaatgtttgcgatgtgcagcctttcagcaaggttattgtcaagcactgacatcggatggtataccaccagttcaaggacatcctgga

SEQ ID NO: 27050 - DNA, 1458 bp, Zea Mays
cctcgtttcgcccctgtctcctggtgaatcgcaatgcgaccttggaggacctcaagaagtcgtaccggcggctcgcgaggacgtggcaccctgacaagaatctgactggaggggcggaggctgaggccaagttcaagcagataaccgaggcctacgaggtactaagtgatccagagaagcgtgcaatttatgatcagtatggtgaggagggcttaaaggggatgcctccacctggttcccagagccggtcctccacaactgctggcccaagtggtccgagtaatttccattacaatcctagtgacccagatgatttctttgctgagttcatggcaagcaacaagacttactcctttgaccatgaccggaggcgattccagccaaggtcacattggacttcagccaggaacagtagaagtgaagctccttctggttcacagaaagagaatggtgccagtacaagcaatatagaaaagccaccacctgtggagaaaacattactttgtactcttgaagagttgtataatggaacaaaaaggaaaatgaagatcactaggaatgttgcaaagccagatggaagaatagaagttgaaacagaggtcttggcagttgaagtgttacctggctggaaaaagggaaccaagattacattccccaacaaaggcgataagctacatggccagttagcacaagacctgacctttgtcctcgattcgaagccccatgatgtgtacaatcttgaagggaacaaccttcttgtaaagcaggtgatccctctggtagatgccctcgctggggcagagataaacctcacaacccttgatggtcggaatctgcctgtgagggtggaggaagtggtgcgccctggatacgaagttgtgctggagaacgaagggtggccgatcaggaaggaacctgggaagaagggaaagctggtaatcaagtttgatgtgaccttcccgatgaggttatcgccgtcacagcgggcagccatcaggcgaatcatgggcagctaactgggggaagagaaagagaaggggcattgcattcttttacatggagaaggaacagtctctacattggcactagaattcagatggatagttggaacttggaagtaacttgagtcaatcagataggcatttccatggttaaatatcccgttactaatcctacctatttgctttggttaattgaatgtgacctagttttttttttcgttttctttgttatatcgtgtgaatccgtagaaaaggtgggtgatttcgaggataatgtaagctgatttttccatccgaattttttctggggcatgtgatggttttttcattggaaaactgtagcatacccgggaaatggaaggaaaggaaaaaaagatagaaaagacaagaaaggagcctttaagcaaatattcatgtgcctctttcttgtatcatgtatcagttgggcagggttcat

SEQ ID NO: 27051 - DNA, 2319 bp, Zea Mays
gacgatcagtttgcctgtgtttgattgagacgagagcagcagagcgccaccacgcagcacgcacggacgccatcgaggaaccctagaccagagcacatcacacggccggcgactggcgccccctcttcggtccccagcgcggcgacgccctcctgcttgagcaggtgtcctcttctgtctgcttgagcaggtgacttcctgggctttaggtactcgctttcgcttccaaccagcgcgtcctcagccagcgctggaggccgcccagccgcgcctgcgaccgcagaccgcgcgtcctcactcagccagcgctggagatctcctgtccgcccagccgcgcctgcgacagtgcgaccgccctcctgcccccaggtacgcagccggcccctctcctccctcctccctcttccctccgccagtccgcccacaggctagtgcgccgccgtgccacaggccactgcccagtgcccactgcgccgcgctgcacggccaagctccagtgcccacttgctgccgctgcatccacttgcccggccaagctccagtgcgccgccgcatccacttgttgccgctgccctcaacggcccagatccatccgctgcccttgctgcccctcacagtgaatcacctctgcggctgggagtgaggggtcccagccacttcccactgggccgcagaccgtcggcctctgcgctgcgtctcacgtctgtggccactccacaagaccagcagccaagccaaattctatgtcaagtctgaaaagacgttcaacgttcgtttaaacgtttaaatgttaaaaagttagttcataacgttttaacgttttaccgcttccggggaggaaagcactgcaagatgatactgctccagtccccatcgaggttcctgctccagatcctgcaagaccgtgttctcagtggcgagaagggcatggacattgactgtcacacggtagagttcgatgatgtccggtatcatatccagttttctatgaggaatccaaaggtaatggtgttgtcagttgctttgcctctgccacctcctgaagcgattctgtatgatgggctaccactaggtgccattgaagctataaaagcagcatatgggccagttgtgcagattcttgatcctccaaaggacgggtttgatctcacaatgaagataaatttgacaaaacttccgctagatgaaggttctagagttcccttctcaagagcaaaggaatactatcttgacacaaattgcatctattagagaggttgtgttgggtgcaccactgaagctcctgctgaaacatttagcctcaaagacagttgcacctaatgttaacaaccttgttgctcttgttcaccgccctaatgaatcatttttccttgctccccaggcagataaagttactattgtgtatccaatgagattccaggactccattgatattgttttagcaacttccttcctgcaggaatttgtggaggcaagacgaacagctgcacttaataatgttccttcttgtatgtggtctccggtaccacctcttgagttaaaaggagtatctgctgatgcactaaatgcaaatgctggctttgttactttcgttgtttaccctcggcatgttgagggtaaaaagctagatagaacagtttggaatttgttgacatttcatgcttatgtaagctatcatgtaaagtgttctgaaggattcatgcataccaggatgaggcgcagggttgagtcgctgatccaggcgttggaccgggcgaagtctgatgctgagaagttgaagaagttggtacacggtggatctttcaaaagactgagcctgaagaacgagggggactcgcgtttctgaagggaattggcaaatgttgttgttttccatttggctaatgacttctgttgtgggaagcttacttccgttcagttttgggagcgaaggctcggaaccggttaaatccatgccattgaattttaatgtaaattcgcgttgcttttacatatttactagcctgaaatctctcggcgtatcagttccatgacacatcgcctttgcaaccggagagcctgctgcctgcatcttggtgcaagtagtttgtttttgccatgagatgtctgagtctgatcttttttggcattaataaatgtgttgttcttggatcacatgatgtagtagggagttgaggcttggttgaatcacatgaccactcacggtcacggtacagcatcggctgagttatgtcgagcagccgcattcatttttttataagcttgatggtgtattgttttataagcttcggctgagttacgctcgaaccacggtcctcc

SEQ ID NO: 27052 - DNA, 182 bp, Zea Mays
atagaggcgaatgtcaaaatctttaatatataacaagaatgtcttacaaaataaccgataataaaataactcgaactaagataactatctctgtgacgccatagttgactaggaggcgacatctagatctcatcgaactcgtcgtaatagtcctcctccggtggtacctgctcttcacctga

SEQ ID NO: 27053 - DNA, 1444 bp, Zea Mays
  misc_feature (1443)..(1444): n is a, c, g, or t
cgcgcgccgaggctgccgttccccatcgcgacccttgcaccgggtccacgctgaccctcttcacgggggcggcgaaagatctcagccgcgacgggttcgagcgccggcgagcgctcgcccacctgggcctataaactggccccggctcctcttctcgcgtcgcagagcccagcctcgggatgacgtggcgtatcgcgacaccgccacagctcactcaaccgcgcgggtctccaacgaaccccttgtagaagcttccaaaccctagcgcaggaggaagaggagcgtggaggagctccaggaatggcgaaggcgaggaagcagaagggtgacggtagcggtacgggcggaggcgccaccgttctccaccagaaactctgcctctccatcgacatggagaaccagctgatctacgggtacactgagataaaagctcttctagctgaaaacgacacatttgctctacatgctgacaatatgacgatcaggagcattctggtggatggtgaaactgttgagttcgactattcccctcattggaaaaatgaaactgatcaacctaattggtcttcaatatcatgtttgaacactgttgctgatgctgcatgttcaacatatacttcgtctctaaatcgagaagctacaccaaatcttattgtgtcatctgagagatcaatcaagtcaatgattgagcagcagttagatgaaaacagtgaaaaatatgaagaaaatagtggaaggcttgaaaaacatggtggaaagaccatccaaacttcctatgatcaaattgttaatggctgcaatggttctgcagtggaagagggaatagaaaattctgcagtggaagaagggaaaaaaaaggaaaaggaaaaagagaaggaagagaaaaatggaaatgagaagagcaaggaaaatggaaatgagactgaaaatgaaaagaacataaaactggttcacatagattatattttggagaaggctgaaactggcattcactttgttggcaatgtcatgcatagcagtaatcagataaggcgggcacactgttggtttccttgtgttgatactgccacacaacgctgtccatttgacttagaatttacagtcagcacagatttcatcgctgtcagcaacggtgacttgctttaccaggtcttaagtaaggaagatccttcaaaaaaaacctatgtgtataaattgaacactccagttagtgcacagtggatatccttggttgttggtccacttgaaattctccttgacagaaatgacataaatgtgtcacacatctgtttatctcctgccttgtcaaagcttcagaacactattgcatttttccacgatgcatacagctgttatgaagactatcttgctgcaccgtttcccttaggtttatacaagcagatttttcttccatctgaaatgacagtattaccggcaagcttnn

SEQ ID NO: 27054 - DNA, 4414 bp, Zea Mays
ttatagactagaagctagttttttttcttttctttatcttttttctcttctttattaatgtttttatcctaaatgctttctcaaatattaatatcttttccctaattttaactatatttaaggcgtcacctcgccttacgccgtattgcttaaaaggagatgatgatgaagatgatttggaaaatggacaagttagcaagaggagacgtactgctactaatttgagcatgagaaaatcttcaaacaacagaacctaccatctagcagatgaagaccaaaagcaaatccagatgataacagcactgttagttcacctggttcagtttagtgcaattgttcccaatagcttaaaaggaacagttgattggaccactattgttgatgcctccggagatgctgattattatccaattaaatgccatgaagcggcaacagaggcttgttgccgtttttggactgatgtccttcaacgttttactgctgctaaatctcaagatatgtcggaaaccaaaggaataatagataatcttgttcaggatttcctaatgatactaaacttgccggagtatccagctgctgcttctatccttgaggttctctgtgtgttgctccttcagaatgctggattgaaatctaaggacactaatgttcggtgctttgctattgatcttcttggtggtattgcatcaagattgaagcatgattcggtcatctgtagtgaagagaagctttggatattgcaagatctcactgatgcaggtagcgatggctcaaaaatcttgaaaaacaagtgctgtgtttgtcttggtggaagaggtataaatatagcctgtaatgaatgtggaagatgtttccattcagattgtatgggggctgctagccaggataacttagagcgtgatagtgtttgccccttgtgtttttgcaaacaacagctcaatgtgctacagacgtactgtcagtcacaaattaaagaaaatggcaaaaaaactgctgcgtctactagtaagaaatctgctaaaccagctgaggtgccagcagtggatattattcaacaaatactactgagttatctccaagaatctggtccacaagatgatgggaacctgtttactcgatggttctatctgtgcatctggaacaaagaaaaccaacattctcaggaggagatcatctactatctcgctagattaaaatcaaaagagattctgcgagattctggcaatggtctggcaatttccagagattcagcaaagaaaatttgcttggcacttggtcagaagaactcattttgcaggggttttgataaaattcttgctcttcttttggctagcttgagagaaaattctcctgtaataagagcaaaagccttgcgtgcggtcagcagtatagttgaagctgaccctgaggtcttgggtgacaaacgtgtccaatctgctgtcgaagggaggttttgtgattcggctatttctgttcgtgaagctgcccttgaacttgttgggaggcatattgcttcacatcctgatgtgggcctgaagtatatagaaaaagttgctgagcgaataaaggacactggagtcagcgttcgcaagcgtgcaatcaaaattataagggatctatgtgcttctaatccaaacacagacacaacacatgcctttgtggagataatttctcgtgttaatgatgaggaatccagtgtacaggatcttgtatgtaaaacattttatgaactatggtttgaagaaccaactgggagccataagcacttggttgctgatggaagttcagttccaatggagatagctaaaaagactgagcaaattgttgacatgttgaggaagatgaccaatcaccaacctctgattaccatcataaaacgttgaggagggagctgctaaggagatggaaatccacatgcttccttatattgttgctttgcaagcattttgtattgttgatcccacgctctgcattccagtaactgatccttctaagtttgttgtgacactacaaccataccttaatattcaggttgacagtaaatcagctgcccagttgcttgaaagtattatttttgtgattgatgctgttcttccactcataaggaagccaacacaaaatgttgttgaagaacttgagaaagatctgaaacatatgatagttcgccattcgtatttgacagttgtacatgcctgtatcaagtgcctttgtgctctgagcgagtcagcaggtagaggtccaggattagtggaaaaccttgtcaatattttctacaagcatctgtctggagctaattcagatagtcagttattgggtcgatcactgttttgtcttggactcctccttcggtatggttatcaattgatgcaaacatctgaaaatcagcttgattttcccaagattatcaacttgctccagagaaaatatcttctcagggatgattttagcttgaaggttcgagctttgcagactttgggatacatacttattgcgaagcctgaatttatgctacaaaaggatatgttgaaactcatagagacagcactatcttctgaggttgattatagattaaagattcaaggacttcaaaacctctatgagtatctcagagatgctgaaagccaacttactgccgagagcactgtgaaacctcctgtccggtgtgaaataaatggcagaagtaaagtgcctgttgctgctggtgctggagacaccaacatatgtggtggtattattcaattgtattggagttctattcttgaaaggtgcttggatacaaatgatcaagttcgccagagtgcacttaagattgttgaagttgtactccgccagggtttagttcaccctattacctgtgttcctcaccttatagcacttgaaatggacccactggaggggaactcaaagttggctcatcatctgctgatgaatatgaatgaaaagtaccctttattttttgaaagccgtttgggtgatggactacaaatgtcatttaaattctttgaatccatagtcagcaaccataagatggcagcaaacataaaatcaaatccaattgcatttgtcaaacctggcatatctagaatataccgtcttatccgttcaaatcgaaattccagaaacaaatttgtccactcgatagttcggaaattcgagtctgatagccggagtcgcagcacagttagctttcttgtatactgtgccgaagttcttgcctccctgcctttcacatgctccgatgaaccactttacttgatctatgatataaatcgaattattcaccttaaagctggaggagttgagagcaatttgaaaaggtggacttctatgtctcagtctcaaaatacagtggatatgccaacgttgccaggagagaggcatgttgtcatgcaagagcctggcggatattatgataacgtgggctatgcccatgaaagggtgaatgccaatccttgcagtacttcagacgtggacatggccaaagtgcaggttgacgtggatatggccaaagtgcagggagattgccttgatgcaatagcccttcagctactgctgaaattgaagagacatttgaaagttgtctatagtttagatgatgcccgctgtcagtcattttctctaaaggagcctccgaaatctggagaaacattctccaggcagaatattccttttaatgttagcagcactaacatcagtctgccgagctgcctgcaggacgtagcttctgtttaccaggatttcaagacagtgctccacgaagattccatggactttgctgtgttcatcccttcagtccagattaggaagcgcccaaccccgagaaatacgacaaacccaaccccaagaagtacgacgagggtcaggagaacggctgcctcgagtgttacaaaagcccgtggtggcgcacgtggcgatgactccgacgactccgatgatgacgactggaccgggggcccaagagtgcttgacttcagtgggggtggccgtgtgacaaggcagagggtccaagtatgatgactggtcttggtgcttttgtacattctagggaaacctatagcgggtagcagctgacacgaggagagttagggttgagttttaggtttaaagtcgtttagggtacatagaagcagaaaaggaaaggaagatagcctttttacttagatgccattgatttggagcactccttttcttgctctgcccctgtcctgtttgtaattccggtcgggctttggcaaaactgacaaacagggttgtgctccggcttctgatctgattcaatgggaatgaaattattccttttgctttgcctgtataataacagttaagcctatgtttcgtgtaattgtctgccttgctaatgttatatatctgtacgtgtgctgagccttttttgttgaagttcatagaaattgcc

SEQ ID NO: 27055 - DNA, 4853 bp, Zea Mays
gtcactggtgcttggtcgcctagggtttcgggccagccggctggcttggacgcgccaagtctaatggctactgagagtgctttccgattgattggtgggacgggggctagggactggagtaagggatttggtgcatttggctcttcagcaggtgccttatcaggggaagacttgggatttgtggataatgacactggggtttatgggggctggaacaaatctgttccaaatcgtagtggaagcgcaccgcctagcatggaaggatctcttgctgctcttggccatctcattgatcagcagagtgggagctttgaagctagtttgacaaccttggataacataactgacagttccaaatctgaggagcaactacgtgctgatccagcatattttgagtattatggctccaaggtgaatctgaatccaaggctccctccgccacttatttcaagggagagtcgccgattaatgaaccgtgttggcaaggctaaagagtggaggatggtctcccaagataacagcagcaaaggctcaatatacgttcctcgatctatgttgtcaactcacaaagaagaacctgaggatgataaatctccaagattggattcaagttcagtggaggatgcccagattgtctccagtgcatccaactttcagagccaggattttatgctgccttacttgcttgaacttgaagagaggtttcaacagagtgttgcttcttcgcctgatagttcatcttctaatccttcaaatagcaacactggtgattctatgcctgtatattctgacataaatttgttaaagagtttgtcatttgatgctttgaagcaatcggatttgaactcttggacaccaaaaggcccactgaaaagtaatgttaacaatgacctttcatcgccacccctttccagttcatcatatcctggtagcaaaactggtacgcaaacttttgagcaagaaaaggctgctgctgacaccaaacatggaaatgttgtgcttggcagtggcgcagctgttactgaagttgataatgtggactccattatgaagaatttgaagttaagtttggatgtccatacatcctcacctgccaagcagaggtggcaggacaatgtcttgcagcagtatggttcctttttaccagcccaaggtgatcctattcaattgactactcaaggaccccatcctcctcatgtaccttttgttgataacttgtctcatgctcagctcaagttgcctgacatccaccaaaatttaccacaacctagtatgacaacacctttctatacaccaaattcttttgggaacccttattatcagaatttgcaccctgctaatgcttttccaacctcaattggaactgggggttatgctgtaagtggttctattttgccaccgtttatggctggctatgctccccaaggtcctcttgctacacctcttgacagttctatgactccaagctttagtggcaggccatctggatttcttccagcagggaatcttacagggggaacagattttatgcagtcatgtaaagtatacggacaatttgagcctggtatgcagccatccattcccgatccgaacttcattcatttctttcagcatccctctttatttcagtatactggaggaaatcaatacaatacaatgggtccaagatttactgttgttgggaatttagctgaaagctttgattcacaaaacacgatacctcaagctgcatctgcatatccatctgatcagaggcttccactgccaataactggctttcctaattctcctacagccagaagaggagggactgttccaaattatcaaggcatttcatcctacattggagtgccaatgacttatcctactagtccagtgtttcagggacaaacattgcctggagtattgcctcctgttaggagaaacgactctgctggatttctgcccccctcaagaaacatcactggtagccctggaattcaagggcagcgagcaagacagaagtttgatgaatcaaagacctgctctttcttagaagagttgaagtccaacagagcgcgcatggttgagctttctgacatcacaggccgtgtagttgaatacagtgctgaccaacatggtagccgattcatccagcagaagttggaaaactgcaccgccgaagagaagacatctgtgtttgccgagattcttcctcatgcttcagcattaatgactgacgtttttgggaattatgtgatccaaaagttttttgaacatggaactcgtgagcaaaggagggatcttgccaccaagcttgttggtcacgttttgcctttgagtcttcagatgtatggctgccgtgtaatccagaagcctcgcaaaccctatcgcctatccctctcgcggtcttgcctcggtctctggcggcggcaccgccgttttacactcctcctccttcgacaacccgtcgcagtagcgtccgtctctggtgtccggctgtccggctctggactcccgacctcgacatcaggatctgcgcctcccgaccggtatgtgggggctctgaagaaggtgcagaaggatctgggcgcgtcggtgttcgagccgctggtgcaggcgtacgccgccgtcgggaagttccctgggatgtggcagcggctgaagatcgagaacgtggaggtcggggaggggacggcccagctgcttgactctatctgcgccgatcaatagcccaagcacgtcctagaggcggcgacagaaatgagttgctggcaagtttgacaaaacaagcagacatggtcttggtggctcagcaggaattaatcacccaaaaaaacagttacaagttgggttcatgcatgtcttacgtcaaggattgtactccccgttaaactgttggttcgggccagtggccggcccggtacgttcaggcccaccgggcgaacgggccggcccggcacgatttatccctgtgcgtgccgggtttgggcatgtcgctaggcacgtgggccagcacgacccggcccgaagcatcaacgggccgtgcctggcccggccctatccgtaccgggccgaaacgggttcggaccgggtccgtgccgggtggcccgtttggacatctataggtccctatttggacctgaagtgaagcattttaaagttgaaggacccagattctcacttcgagagtttatgaacctagatgagaatctaaggctctggaagttatggaacttgaccagaaaatagatctagttcatgagcttgatggtcatattatgcgatgtgtccgtgatcaaaatggaaatcacgttatacagaagtgcattgagtgtgtccccacagaacatattggttttgtagtgtctgcttttcagggacaagttactagcctttcaatgcatccatatggctgccgtgtaattcagagaatcttggagcactgcggtggtaactcacaaggccagtgcataatagacgagatattacagtgggtgtgcatccttgcgcaggatcagtatggcaactatgttacacagcatgttctagaaagaggaaaagctcatgagaggagccaaattattactaaattggccgggcaggttgttaccatgagccaaaataaatatgcatcaaatgtgatagagaagtgttttcaacatggtgatattgcggagcgggatcttctgatcagacggattgtggagcagacagagggcaacaacaatttattggtctgtttggtagtgtagtaaaagtgttccctccattatcccttcctctctttgccaaacgggtcggggttctggaaggtagggctaggacatggggacctgatctcagttcggtacagccaatcagataacaccatgagtatctcagttctgctattccagctttctgggagctgcgaatcctatggattaccaagacatgggatctctgtaaacttatttcttcctgtgttgatgttagtttatatttcctaatcaccttttatattcaatcaggcaatgatgaaggaccagtatgctaattacgtggtccagaagatacttgaaacttgcaacgaggatcagcgggagcttctgctcagccgcgtaaaggatcatatgcaagcattgaggaagtacacatacggcaagcacatcgtaagccgagtcgagcagctctgtggcgacggaactgccgagtcaggttcttgaaacgaaccgccgcctaattcttcataggctggagggtgtcctgctcttttgctcattccgtcagtgacgaagaaagcaaaacggatcaagtctaactctggcgcttcagaacagactaacaaagctgtcgtcgaagattgtataggtgtgactctgttcagggatagtcttcaggttctagaacagaagggtagtggtgtgcatcagtgtatctgtttactggataatagtggttggttaggtgtgtgcagaaaaagtttagtgctatgctttgtatgtgatacatattaactatgccttggaatgttcatatgttgtcctgattacgtgtgatatctctcgttcagttcaagttgcgttttctacatggccatgggaccatctgccgatttgatgaaaaaggaaaggttgtgcacctttgtaagcgggcatggagatgagctgcgctattttttttttttacaaaatgtctgctgggattgaactgtctattttataaaaatatcatattttcttttaatgtcaacagaaaaattacggactgtgtatggatcccatgtagctaaggccagtgagtgttacgatgctttgtcagttgatgttatgtcagtcttttcattgttaattctgaaagtagattttatgccgatgaacctttataaaaag

SEQ ID NO: 27056 - DNA, 2148 bp, Zea Mays
gcgaatcacgaacttcatatcaaaccgacaaattggttggagcaaatgttgtttagcttttgtgaggaaagaggcggcggcggcggcggtgattgtttagcaggagaagatccccttctgcactcatcgaacggccgccgccacctagatcagttgggagtgtctcctgtgccttttctagcacagattgtaggtacttcccttgtgcttcaatgcggagttgcaaatgtctttgtacctgttgaaaggcgtcgtttatgtgtaaggtatcacattatcagtacttgaccattaacagtaaagagcttgtgacatgaaaagaataaaatctggatttacaattggtcagtttgtttaaacttattttagcatcattagtttttacttgttctttttaaaactgtgttcagttaaacgtatgacaagattatgttcctagaccaccatgactaggccctcttgcattgtgagcctcttagaagtcatatgctggtgtccagcatatacttttgttgataaatgagctatagatgttcattgtgtgaaggacaaaatatgtggatgctctaaagctaaagatatgcatacatttaggggtggcaataggctctaaattttacactataaaatttaaaaatcagattggatcggctctatttttattcatctttgaactaaaattgattaaaggctcaaacaaattgtgaagaaatatttggatcgtgatccattaccacccctacatatattacatactttctcttggactttttactctatcggtaatataggaactagtgcttggctaaaacaattgagttgattggactattggagcaattataagtgatgtttttttcttaaaggaatggtgattgggatgccatttttttgacatgtaacattatatatgatctgaccatgtccctgaagtttaccaactgatggtgaagctacgtaatttttctttatttggatgtctgtacatcaggtactttcatggcaaaataaaccttcatttgatgagtgtcctagatctacttaaagcctggtttgggataaattttgctatatatttgtccagacaatctactccagtcttttacacaataactctgctagggatgaatcagttatgtctttgtaaggaatgtttaaatggtaatttagttagtaatatgatttattttttatgcttctgtacctctagttgctcatgcagtcggcgctgtacttcaatttgcatctgaagggcttcacctatgtgcacagatctgataaaaatacaaatccatgttatcttatgcaaacatgttgaagaaaacatttattcatctcttacttgtttgtctgggttccaaggtttaagtggctagctggtgatccatttccttcaagtggtttgtccattgccatggtgcaaccaatcactgaagagcagaaagggcattcagtattaagcttaattggaggccgataactgctagagtctggttttataaggaagacaagtgaggagagaatttcgaatcgttagaacaaacactcaagcctggaccaatcctggcagcaactgaaaagagggaaacggaaagtgggtagacgaatccgatgggctgtgcatctgtatggagtcctctgagtttggctactatctgttctacataaggcgcagaaagttggggcttaaaaatgacggcgagcgcgcacgcgatcccgcgggaagggaataaggaaaagcgatgttgacaaagctggatgggaatcctgcgcttttttggaggcgaagatgagaaggaatatatcgcctgtgtcgacctcgccggcctgcttcttctgttccgtggcttggttgtgctcccgctggatcgtgccagccgccagcaggatgatgagcacgtgtgaaccctggcgtgggtatgttgttgtttgctctgggagtgttttgctcagtagtcgttctttgtttatttgtacaaactcgtccatttgtgtcggttgcagaaatacgaaaacacttcaaatggtacgaattggaatttggaaagtacagagtatagaccgctggataagctgtttttattgtttggcgtaatgaactggtgatccatatgttcgccttaaaaaaaaagacctgatggttcaagt

SEQ ID NO: 27057 - DNA, 699 bp, Zea Mays
gacagcagaaaatggattgaggctgtggatgtccaggaagggcagcgacgcccgccctcaaggtgttggatgaaatggtgcacgcttatgggagggtgacactgagcagtccttctggttgagaagatgaaagacatctgcaagtataatcatctacaatttgctgctaaaaggaactcaatcattgatgcaagatccatgatgagcatgcattggttatcttatcgcagaaaatcttccggcatgagacaactacacagactttggccagcttctgattcgatagtgattgcaaatgttgatatcttcagctagctggctataattatgtgcacacttgaaagtcaatctaaatttattttgagccccagccatgtgtcatgcctcgacgacaactggctagctagctacatgtcgtggcaatcagaaaaagggtccacagatagaaagggtgatgaagtggactctccccgtcgttcgttcatggttttcagtcgggacactgaaacaaatgagaaaagcaattactaggatttaaacatactaatgccaaagacgtcgtcatgtaattcgatggcatgtaacaaatgagaaaatcttcgttttattaattgcaaactagtccgatttttttggaagatggaagagaagatagtacgtttggttttataattaagggagagaaagaaaaaaaactga

SEQ ID NO: 27058 - DNA, 1474 bp, Zea Mays
agtagtctcttcgttcttggcattcctgtcacgatggatcagatcagaggacgaggtgtggccgttcctgctgcggttcccgatcggctgcttcggtgtgtgcctgggcctcggcagccaggccatcctgtggggcgcgctggcggcgagcccggcgatgcgcttcctccacgtcacgcccatgatcaacgtcgcgctgtggctgctggcggtcgccgtgctcgtcgcgacgtccgtcacctacgcgctcaagtgcatcttctacttcgaggccatccgacgcgagtacttccacccggtccgcgtcaatttcttcttcgcgccgtggatcgcggccatgttcgtgaccatcggcctaccccgctcctacgcgcccgagcggccgcacccggccgtgtggtgcgccttcgtcctgccgctcttcgcgctcgagctcaagatatacgggcagtggctgtccggcggcaagcggcggctgtgcaaggtggccaacccgtcgtcccacctctcggtggtgggcaacttcgtcggggccatactggcggcgagggtcgggtggacggaggccggcaagctcctgtgggccatcggggtcgcgcactacatcgtcgtgttcgtcacgctgtaccagcggctgcccaccaacgaggcgctgcccaaggagctgcacccggtgtactccatgttcatcgccacgccgtcggccgccagcctcgcctgggccgcgatctacggcagcttcgacgccgtggcgcgcaccttcttcttcatggccatcttcttgtacctgtccctcgtcgtgcgcatcaacttcttccgggggttccggttctccctcgcgtggtggtcgtacacgttccccatgaccacggcgtcgctggccaccgtcaagtatgccgaggctgtgccgtgcttcgcgagcagggccctcgcgctgagcctctccctcatgtcgtcgaccatggtgtcgatgctgctcgtgtcgacgctcctgcacgcgctcgtctggcgatcgctctttcccaacgacctggccatcgccatcaccaaggaccggcaaaacggcgcggtgaagccgaatgacagggggaagagggccagcaagagagtgcacgacatcaagcgatgggccaagcaggcgcccctctccctcgtgtcctcaatcaccaagagccactcggcggacaaggaggaagaagagagaactgaataagaatggctcatatagatggattaggatatattattattattatatacattagccagaagaaatgtatttttcccataagtataggaagaacataataataataagtgatgctatacatctcttactttattccctaatgatatagggcagttccgcatatgaaatggccacctagatctacaggaaactgtaagcaaaatcaggattagctgttttatttctttacaaaagactgaaaaatcctcataacatgatgctatt

SEQ ID NO: 27059 - DNA, 334 bp, Zea Mays
atctttccatcattcatcctttcttctccaacacccgtcactctcttctccaactccaagatgtcggccgccaccgccctgcttcatcgaggcccaagacccaatgtctatttttgataaagaaatcaaacagcaacctagcagtcttccttcacttctctgcttccgacctcgtagcgaatcagatcggggggctagggttccagtgcgcctctacaaccagacgcgaggctaggctgggcatggagggaatcgtcacggcccgaaagaggtcccggccagagacggcgaacggggctgccgccgccgggaagcgctccaaagacacagagtc

SEQ ID NO: 27060 - DNA, 2461 bp, Zea Mays
gaagaaaaaggcaaagaaaatcaatcctcgccgccgataaatccacagttcaaagatcaggccgacggctttccattgtgcgtcccgaggggagatatttattttccgttccgttttccccgtcagaaaggagtacttccaacaaactgctccgctttcagcacctgcccagcggaggaagagtgcggattgcggcggcgccggcggacgaaacaatggcgtcggcgagggacgagcatcttgatgggattcgcgcgctgatggcggcccactcgccgccgctccacgggctggtcgtcccctccgaggatgcccaccagagcgagtacgtgtcggagcaggataaacggcgggagttcatctccgggttcacagggagcgctggcttggctcttatcaccatgaaagaggcattgttgtggacggatggccgctacttcttgcaggcaacacagcaactgagcgatcgttggaaacttatgcgcatgggagaagatccaccagttgaagcatggattgctgatctttcttctgatttggtggatgaagtatggaaggatcgcccgctagttgaacctaggcctgtaattgtacacccagtagaatttgcagggcgcagtgtaccagaaaagatgaaggagctaagagaaaagcttgtgcatgaaaaagccactgccattataataactgctcttgatgaggttgcttggttgtacaacattcgaggaagtgatgtggattatagcccagtggttcactcttatgctattgtaacattgcacagtgctttcttttatgttgataagagaaaagtaactgtcgaggttcagaaatacatgtctggaaatggtatcgaaataagagagtatgaaactgttcaatcagatgcaagtttgcttgcatctggcaagctacaaagttctgtacatgtggaaaagtatatggatgaggtggagagttcaaaaatttggattgattctggctcatgttgccttgcactctactcaaaattgagtccacatcaagttttgacgcttcaatcaccaattgcccttccaaaggctgttaagaaccccacagaactggatggattgaggaaggcgcatattcgagatggtgccgctgttgtacagtaccttgcttggctggataatcagatgcaggagaactatggagcttctggttatttcagtgagataaaagggtcgcataaaaatgaacatttagcaaccaaacttactgaggtgtctgtgagtgacaaacttgaaggcttccgtgcaacaaaagagaactttaaaggtttgagttttcctacaatttcatctgtgggaccaaatgcagcagttattcactataaacctgaagcaagcacatgttcggaaatggatgctgataaaatatatctttgtgactctggggcacagtacctggatggtacaacagacattacaagaactgtacattttggtaaaccctcagcacatgagaagtcatgctacacagcagttttgaaaggccacattgcactagacattgctgtgtttcctaatgggacgacaggacatgctcttgatattctttcacgagcaccactctggagagagggtcttgactatcggcatggtacaggccatggaattggatcttatttgaatgtccatgaaggtcctcatctaattagcttcagaccttctgctcgaaatgtaccgctgcaagcatcaatgactgtgacagatgagcctggttattatgaagatggggcctttggtataagattggagaatgtacttatttgcaaagacgccaatgctaagtttaattttggagataaaggttatttggcatttgaacatataacatgggctccataccagaccaagctgatagacaccgggcttctgacccctgttgagatcgactgggtgaacacgtaccactcagactgccggaagatcttggagcctcatctgaacgagcaggagaagcaatggctgatgaaagctactgagcccgtagctgcaagaggctgagccttttcgtcaacgttgcatgccaccgagcgccaggctcatcttctgcgtggcatacatataagattggctgcccccgctggttaaataataatagcggcgaaggaacaggatagcttgttctcaacgctgatcttcgccgctaaagtggagtgtttggcaggatgctattttctttcccattagggtacgttcgggttttacggaacggtaggtttttatacggaacggtgggtacaacaattcctagagccggattgtttctctaattatttatataaggtttgatcaattgaaataattttggatccattcttgacaacctaaggcccataagctgatttgtacagttattctgggaagtcgcttccaactgaatacgctgctaattgtttcgcccaaaccggatagccttctttgacgctaaataa

SEQ ID NO: 27061 - DNA, 2375 bp, Zea Mays
cttgtcccttcctccccacgtgcggttggcgcgtgatcccggtttgaatgcctgatgcataatattgcataaggccaagggaagttctacacatttttcatgcgcaaggctgcctagttacaaacatatgggagctgataagttactatgtttctaggtgtcagcatttcgggaaagtaagtcagatgacaggagattttacatattttcccccactaagacgcttcacttgaagacaaactcaaaagttgaccgtgttgcctggattgaggctttgatcctggcaaggagtgtttattctcttgggtcacttagcgggagagcaacttttgtgcagagtgatgtttcaatttcaactgcaaggcttagagatcgaatgcatcaggagggtttgaatgagagtcttatacaggactgtgaacaaattgtgctttccgagttctcaagctaccggaagcaactgaagtgtcgttacgaggattacttaagcttgtttgggtcctgcagacataattttgaggaaggtaaagatggaagtataacacaggggacattgacacgaaatgacttctctagttctaggcatggaaattttagcgaatatagcacaacagaatctgatgagcatgagtttgagaaacacgatggaggcgaattgatttgtgaagatgaatctgcattctttgattctatagattacttcacagagtcagacaacaggtcttcaaccatgttaagtggcaaggaagtagtggattcccaaacacatgattccagtaataatatacaagcacaaatcagacgacggagtaggctgcctgaccctattgagaaagagaaagggatcagtctctggtccattattaaagatagcgttggaaaggatttgacacgagtttgtcttccagtttacttcaatgaaccactctcatcccttcagaagtgctttgaggatttggagtattcatacctcttggatcaggcatatcaacatggaaaagtgggggacagcctcatgagaatcctcaaagtagctgcttttgcggcctctggctatgcttcatctgttgcaaggccttgcaaaccattcaatccattgctaggagagacctatgaagctgattaccctgacagaggaattcgtttttttgcagaaaaggttagtcatcatccaatgctgattgcctgccactgtgaaggcaagggctggaaattctggggcgacagcaatctcaaatccaagttttggggacagtcaattcaagttgaaccagttggcattttgactctagaatttgaggatggtgaaatcttccaatggaataaggttacaacaaccattcacaatctcattcttgggaagttgtactgcagccaccatggaacaatgcatataaaagggaatcgccaatattcatgtaaactgaagttcaaagagccatcacttcttgaccggaatccccatctagtacaaggctttgtagaggacaacaatgggaacaaagcttcgtttttgatagggatgtgggacgaaagcatatattgtagtaactctgatacttccaaggtgaagagcgccgatcaactgaaaggtgcctcgctgctgtgggaaaagaacaaacctgctcctaacccaactcgatacaatttatcttcattcgcgatcacactgaatgagttgaccccagggctgcaggagaaacttccacctactgattcacggctgagaccagaccagcgccacctagagaatggtgaatacgagaaagcgaatgcagagaagctgaggttggaacgacggcaaagaatgtctactaaacttcaagacaatggctggaaatcccggtggttcgagcaagacaccgaggacgggacgtattgctacaaaggtggatactgggaaacaagagagaggggcttctgggatgggtgcctcgacatttttggggagttcgtggagacataagtgccctgttcctgcagtagcagaggttcaagcagccaacacgccacccagaaacaatggagtactgccatctccaatggagcatcctcttgcctctagaagagaagggggaggagccctgtgcgaggagtagagcattcgagatgtgaaggcattgtgccttgaatggtagcatagcatatgattggccacgaataggcattgccaccttgttagtatagtatagttcgatccaatgcaaataagaatgctgacattcattctttggttccttcttgcgttgaacatggatctgttgtcgtggaagaaatttgcttgctcggctaggcaaaagtctgcctacactgtatttgtttgccgatcgaaaaccaaagcaagtcaccatctataactcttcacttccatgaga

SEQ ID NO: 27062 - DNA, 1322 bp, Zea Mays
caaactggacgcaattcagcacaaacccaacttccaccagacccctaaccttttcgcagctccaggctccagcgcacagccgccgccgtttcttcatcttcttcgcagagccggcgctccatcttcggctccctcccttacttgcgctcggcacgcaggcggcggcggcggcgctgtggctcgggatctcagtgacggcatcagcggcttcccctcccgcctctcgccagtcgcctccggtcctccgcacaccggccggtgatctctctcctcccgcctccggtggatcgtcaacgacgcccggccccggcggctgcgccgcgcgcgtcctgagggcagctgcaggcgctgctccaccaaggcggtcgcgccgctttgggagcggtttatgcccccaaagtgaagcgtgctcttagtgccgctctttggaaccctggtaatggctactgctgttaaatggctcaaccttcagtcattctagcaactgcaagttatgatcacacaatcagattttgggaagccaagagcggtcgctgttaccgcactattcagtatccagactctcaagttaatcgccttgagataacccctgacaagcggttcttagctgctgctggcaatcctcatatccgcctttttgacgtcaactcaaatagccctcagccggtaattagctatgattcacatactagcaatgtgatggctgtgggatttcattgtgatggtaactggatgtactcaggctctgaagatggtactgttagaatttgggatttacggactggcacttgccaacgagaatatgaaagtcgtgctgcagttaacactgtagttctgcacccaaatcagaaagagctaatatctggtgatcagaatggaaacatacgtgtatgggatttggctgctaactcatgcagctgtgagttggtgccagaagttgatactgctgtaagatctctgacagtcatgtgggatgggagtatggtggttgctgcaaataaccgtgggacatgttacgtttggcgcctgcttaagggtactcagacaattacctgcttcgaacctctgcacaaactgcaagcccatgatggctacattctgaagtgcctgctttcacccgaattttgcgatccaaacaggtatcttgccacagcatcatctgaccgcactgtaaagatttggaatgtcgatggcttcaagttggaaagaactttagtcggccatcagcgttgggtttgggactgtgtcttctccgtcgatggtgcttatctgataacagcatcttctgacactacagcgaggctatgacgaatcctcttgga

SEQ ID NO: 27063 - DNA, 1614 bp, Zea Mays
gtcgtgtttactcgtctccctcgttgccagatctcaacctccgccttccctcccatgccctcaaacctacctcctaactagcatccgccgctccgatggaagccgcggcgcccgcgcccgcgcgtggcctcgggcggcaggagtacgcggtgctggcgctcaccttcgcgtcctacgcgtcgttccacgcctcccgcaagccgcccagcatcgtcaaagccgtgctctccgcggactgggtccccttctcgggcccccggggcccgcaccgcctcggcgaactcgacgtcgccttcctctcattctacgcgcttgccatgttcgccgccggccacctcgccgaccgcgccgacctccgctgcctcctcggcacggccatgctcgcgtccggcgccgcgtgcgccgcgctcggtgcggcctacttcctcgacatccacgcgctagccttcttcgcggccgcgcaggtgtccagcggtgtcgtgcagtccgccggatggccctgcgtcgtcgccgttgtggggaactggttcggccacgcctcgaagcgcggcaccatcatgggggtgtggaactcgcacacctccgtcgggaacatcgccggctcggtcctcgccgcagccgcgctcgagttcggatggggttggtcctttttgcttcctgcggtcgtcatcgccgcgctcggagttgtcgtgctggtgtttttggtcgcacacccgagcgaggctggtttggatgtggaagtaatggaggttgagatgaatggggatggtggggaggaggtagggctacttggggaggataagaaagaggttcaagggaatgaggataacgagttcgagctggaaatgggatcacaattgccgagggcaatcgggttcgtggaggcatggaaacttcctggcgtggcaccatatgcattctgcttatttttctccaaactcgtcgcctacaccttcctctactggttgccattctatatcaggaataatgttcttgtcacacaaggcttcaggaattttatcaattgtattcgacattggaggcgtcttaggagggatttcggctggttttctctcagatgccataggtgcccgtgcaataacatcagttctgttcctcttgctgtcaatcccatcactcgttgtgtaccggacatatggaagcatatccatgcaccacaacattgctctcatgtttctctctggttactttgtgaatggtccatactctctgatcaccacagctgttgcaactgatcttggcacccaagacgctatcaagggaaattcacgggcgctggcgacggtttctgcgataattgacggcactggttctgttggtgcagctctgggtcccttgcttacgggttacatctcaactagaggatggaatagtgtatttttcatgttgattgtttccatatcacttgccatcctgtttttgatacgactcgcaaagggcgagatagtagccaagcttagcacatggaattaaagtagtaatgtatgttcaattgaggatgcttcagatgtgagattgtaggtacttagggtgtttggtttctagtaactaatttttagtccctcaatttagtctctgatttatcaaacatag

SEQ ID NO: 27064 - DNA, 2417 bp, Zea Mays
atgacggtcatgatgataagcgccgcagggggacaggaggcggtgggggaggaggtggaaggtgccacgggaggagcaactcggttcggtcctcggtcggatcgttttgataacgatcgcagccgcaccgccactacatgggaaatgaggaggatgcgggagaggaggtggaaggcgtcacaagaggagttgctcgattcggtccttggccagatcttatcaatcgacggctacagccgcaccgctgagagtgtaacagttgtcaacaatacattagtgaatggtacagaaactactggcacgtcaactatatctacacccagcttgcatgatcttcaagtgtatggtgttattgtgactatactgctgtgttttattgtgtttggtggtgtcaaaatcatcaacaaggttgcacctgctttcttaataccagtcctgttctctttgctgtgcatttatcttggtgtcttcattgcaccaaggcataatgctccaagggggatcactgggttgagtataaccacattgaaagacaattggggtgaagactatcaacgtacaaacaatgctggcgttcctgatccaagtggatcaatatattgggatttcaatgctctggtaggtctctttttcccagcggtcactggaattatggctggctcaaaccgatctgcctcactgaaagatacacagcgttcaataccaatcggcacattatatgcaactcttacaacaactgccatgtatctattctctgtgcttctatttggagccttggctacacgggaggagcttctaactgataggctccttactgctacggtggcttggcctgctcctgcagtgatttacattgcaaaccaagtccatcctaagaattggtaccccattcctctgatattctgccgtccatggggcaaactgccggaaaatgttccttgtcatccaaaacttgcagactttgctaattgtatgaagaagaaaggccgtggtatgtccatttttgtctctataattgatggtgattatcatgaactagctgaggatgcaaagactgcctgccgccaattggatgcttacattgactacaagcgctgtgagggtgttgcggagatcattgtagctcctactatgtctgacggcttccgcagcatcgtgcagacaatgggcctaggaaacttgaagccaaacattgttgtgatgcggtaccctgagatctggaggcgtgagaatttgacacagataccgtcaacatttgtcagcataataaatgattgcattattgctaacaaggcagtagtcattgtgaagggactcgatgagtggcctaatgagtaccagcgtcagtatgggactattgacctctactggattgtaagggatggaggattgatgcttcttctgtcccaactcctgctgacaaaggagagctttgagagctgtaagatccaagtcttctgcatatctgaagaggataccgacgcagaggagctgaaagctgatgtcaaaaagttcttgtatgatcttaggatgcaagctgaggtcattgttgtcactatgaaatcatgggagtcacacatggagagcagcagtagcggtgttcagcaggataactcccatgaggcttacacaagtgcacagcaaaggatcgaaacataccttgacgagatgaaggaaactgctcaaagagaaaggcagccactaaaggagaatgggaggcaagttgttgtgaatgaacagaaggttgataaattcctttacacaatgttgaaattgaactccacgatactcaggtactccagaatggcagctgtagttcttgtgagccttccaccaccaccactaaatcatcctgcatatttctacatggagtacatggatttgcttgtagagaatgtcccacgcatgttaatagttaggggatatacgagagatgttgtcacatttttcacatgattatacatataatataaacttcccacctggagactctagtgtcgtctggctgttgtactatcttagcagagactggttacacaagattcaagcgtggattctgccatcgaaatgacaagccctcaccttgaaggcaaccatgatgagatgtcaaatgtcaagggctcttgttcgggcttattgggttcgtgaactactgaactgcagtgtcttcattcttttctggattttaaagatccacatagcgagctttgattcttacagattttgtagtcatcatatgtaaacacttaccatctagtaagcatacttacatgctgccccaatgacagaatgcgatccttaccttctcacaaacatttatatatgtattttctttgcatcacttaagtccatctaaaacttatggacctgtggagatgagcagagagccagagatgcgaattttgaatggctacccc

SEQ ID NO: 27065 - DNA, 1489 bp, Zea Mays
cacacagacacactcacacacaacctacccagacggccagaccccgcgccgccccgccgccacccccacccccaccccaaatcagtcaaacgcgccgccgccgccatgggctcctccgtcagccaggccggggcccctcctccccatccccccacatacgcgtcgactccaccctttgcgcccgctgccgctgacgctgctgacgccgccgccgccccgccgccgaaacctcatgaggaggaggcgactgaggagaaggtggactacctcaacctcccgtgccccgtcccatatgaggagatccagcgcgaggccttcatggcgctgaagccggaccttttcgagggtatgcgcttcgatttgaccaagatgatcaccccgtacttcgctttgactcacagcgttgccatgggatccattgagatcccggcacaggggagcgaggtgatcaaggttcccacctccaattatgagtttggtgccaactttatcaatcagaggacgatgctcatggggagggtctcacatgaagggagggagaacatccgtgtcaagcatgatattacggacaacctttctttaaagataaatgctcagttgacaagtgagccccactactcccaagggatgctgaattttgattataagggcaaagattttagatctcaggttcaattcggaaacaatggtttctatggagcaaactacatccagagtgtcagcaagaacctttccttgggaactgaagccttttggcttgggcagcaaaggaagtctggagtcggtgttgttgctcgctatgacacaaagaaaatggttgcgactgcacaaattgcaaccactggaatggtcgcgcttagttatgtacagaaagtttctgaaaaggtttcccttgcatctgatttcatgtacaatcaaatgacaaaggatgtaacagcaagctttggttatgattatatgctgagacagctggaccactggaagaaagattacaaatttgggtttggtatggctctcggagagtaagacgatttgagcaaattctagacacatgtacaattagtggttggcattagtcgacagggattaaaacgattctactttatctttgcatttatttgtctcccagttattcgtttagctgctatggctgtgggccgtggagacatttcgaagttttgattttactgggctcatcacttgagtagtattaaactgaaacgggaatgcgtgaatagattgcgctccaccagattaggatttctgcatgccaaactcttgatttctagtctggaaataagttacgattttattccataagataaagatacattcctctgctaagttaggtgctgtttggtctggcatttttggaattgtaatccattcttgctgcgggtgtttgatttgatgaatggggtgtttgatttgatgaattaggtagtccatcgtcttctcactctttattttttgtttggtttgtgcaatg

SEQ ID NO: 27066 - DNA, 2035 bp, Zea Mays
ctctctccctccctcgctcgtcgcttccgcaggggcagccgcagcaccgcagctacctacctacccacacacgcgattcacgcaagcacacgcagccgctccttccgtcctcaaaccacaggcggaccctgacgagacgtacaagaacctccaccaggccattgagcccttgaccgtgtacgcaaacgaacacgaagcctagctcctccccaatggcctcccatcctcctcctgcggagccgtcttctaagtcaaacaaggtttctctttccagctttgggaggccttctgtatggctatgacattggggcaacatccggtgcaaccatatcgctcaagtcgtcgacattcagtggtactacttggtacaatttgtcatctgtgcaaacgggtcttgtggtcagtggctcactgtatggtgctttgatcggctccgtcttggcatatacaattgcagattttttaggacgacgtaaagagcttatccttgcttctatctcatattttattggagcctttctgacagcagtagcacccaatttcactatcatggtggttggccgctttttatatggcataggaattggattggctatgcatgctgctccaatgtatattgcagagactgcaccgagccagataagaggcatgctcatttctctaaaggagttctttattgttcttgggatgcttcttggttatatagcaggaaatctctatgttgaagtggtttctggttggcgttacatgtatgcctccagtacaccattatgtctcataatgggagttggaatgtgctggttaccctcatcacctaggtggctcctgttatgtgccatacaagggaaggggaatctgccagagacaaaagaaaatgcaacccggtgcttatgtcggttgcggggtcaagcttcacctgatttggtctcagagcagattgacttgattctagaggaactttcatatattgatcaagagaagcaagctagcttcggtgagatctttcaaggaaaatgtcttaaagcaatgataattggatgtggtttggtgttctttcagcaggtcactggtcaacctagcgttctatactatgctgctacaatttttcagagtgctggattctctggggcatctgatgccactcgtgtgtcaattcttcttggcttactgaagctaatcatgaccggagtagcagtccttgtggtcgacagacttggcaggagaccattgcttattggaggtgtcagtggaattactgttgccttatttttgctgtcctcctactacactttactgaaagatgcctcctatgtggctgtaatagcgcttctactatatgttggttgttatcagctctcatttggtcctattggctggcttatgatctcagaggttttcccgctgaggctgcgagggcgtggactgggcgttgctgttcttgtcaattttgcgtccaacgctctggtcacctttgctttctctccactggaggatttgattggaacgggagcgctcttctctggattcggggtgattgcagtggcatctcttgcattcatattctggatcgtccctgagacaaaaggactcaccctggaagagattgaagcgagtttgtagttgactgatccagacgtcacgttcttccgtcctagtttcactgaactgaagggacttctggtatccttctgtagtttgctgccgtagttagccttctataaacgttctacaagctgttgtagcaataatacttctttccttccgggtataaaccgagatggtcggttgctgcaaagtgtgttctttaccgcagttcatccgattagtcacaattaattttcctgatcgccccctgcacttaactaggcaccatgactcaatcagagcgacgttgattattcaactagtactcgatattttcaaaatggttgctaatggaaagaaaagaaagaaaatgatcttctctctagatcatgatcaagaaaagattaccaggagattcttaaacaatacatcaaatgtctttgtattttgt

SEQ ID NO: 27067 - DNA, 3280 bp, Zea Mays
cctcgtgaatcaatgagcgcagcgaggaacggtgaagcaaagctaaggtatcggacgaacacatagggggcgagcgagccgactgacgagcacaagaccggcggacggggccgcctaatccagtgagagctcccccaagcgccatggcgtcggacagtcgcccccccaagcgctccccctccgcgcgacgcgtggcgccgcgtcacgcgcaccaccaccactcgcagtcgtcgggcgggagcacgtcccgcgcaggcgcgggaggaggtggcgggggcgctgcggccacggagtcggtctccaaggccgtcgctcagtacaacctagacgcgcggctccacgcggtgttcgagcagtcgggcgcgtcgggccgcagcttcgactactcccagtcgctgcgcgcgccgcccacgccgtcctccgagcagcagatcgccgcctacctctcacgcatccagcgcggcggccacatccagcccttgggctgcacgctcgccgtcgccgacgactcctccttccgcctcctcgccttctctgagaacgccgccgacctgctcgacctgtcgccgcaccactccgttccctcgctcgactccgtggcgctgccccctgtttcccttggtgccgacgcacgcctctacttctccccctcgtccgcggtcctgctggagcgcgccttcgccgcgcgcgagatatcgctgctcaacccgctatggatccactccagggcctcctccaagccgttctacgccatcctccaccgcatcgacgtcggcgtcgtcatcgacctcgagcccgcacgcaccgaggaccccgctctctccatcgccggcgcagtccagtcccagaaactcgcggtccgcgccatctcccgcctccaggcgctacccggcggggacgtcaagctcctatgcgacacagtcgtggagcatgttcgcgagctcactggttacgaccgtgtcatggtgtacaagttccatgaagacgagcacggggaagttgtcgcagagagccggcgcgataaccttgagccttacctcggattgcattatcccgccacagatatcccccaggcgtcgcggttcctgttccagcagaaccgcgtgcgaatgatcgcagactgccatgccatcccggtcacacacagctaaagagatcaaatggggtggcgcaaaacatcaccctgaggataaggatgatggtcagaggatgcacccacggtcatcattcaaggcatttcttgaagtggttaaaagcagaagcctgtcctgggagaatgcagaaatggacgcaatacattccttgcagctcatattgcgtgactccttcagagatgctgcagagggcactagcaactcaaaagccattgtcaatggacaacgtcaacttggggagctagaattgcgggggataaatgagcttagctctgtagcaagagagatggttcgattgatagagacagcaacagtacccatatttgcagtagatactgatggatgcataaatgggtggaatgcaaagattgccgagttgacaggcctttcagttgaggaggcaatgggcaaatctctggtaaatgatcttatcttcaaggaatgtgatgatatagtcgaaaagctactctcgcgagctttaagaggtgaggaagacaaaaatgtggagataaagctgaagacatttgggtcagagcaatctaagggtgcaatatttgttattgtcaatgcttgttccagcagagattacacacaaaatattgttggtgtctgttttgttggacaagatgttacaggacaaaaggtggtcatggataaatttatcaacatacaaggggactacaaagctattgtacacaatcctaatcctctgctacccccaattttcgcatcagatgagaacacttcttgttcagaatggaacacagccatggaaaaacttacaggatggtctagagaggaagttgtcggtaagtttcttattggagaagtgtttggaaattgttgccgactcaagggcccagatgcattgacaaagttcatggttgtcattcacaatgctatagaaggacatgattctgagaagttccctttttcatttttcgacaagaatggaaagtatgtgcaggccttattgacggccaacacaaggagcaaaatggatggtaaatctattggagccttttgtttcttgcagattgcaagcgctgaaatacagcaggcatttgagattcagagacaacaagaaaagaagtgttatgcaaggatgaaagaattggcctatatttgccaggagataaagaatcctcttagtggcatccggtttaccaactctctattgcagatgactgatttaaatgatgaccagaggcagttccttgaaactagctctgcttgtgagaaacagatgtccaagattgttaaggatgccagtctcaaaagtattgaggatggctctttggtgcttgagaaaagtgagttttctcttggagacgttatgaatgctgttgtcagccaaacaatgtcattgttgagggagagggatttacaacttattcgagatatccctgatgaaatcaaggatgcatcagcatatggtgatcaatttagaatccaacaagttttggctgacttcttgctaagcatggcacagtctgctccatccgagaatggctgggtagaaatacaagtcagaccaaatgtaaaacagaattatgacggaacagatacagagcttttcatcttcaggtttgcctgccctggtgagggcctccccgctgacattgtccaggatatgttcagcaattcccaatggtcaacccaagaaggcgtaggactaagcacatgcaggaaaatcctcaaattgatgggcggcgaggtccaatacatcagggagtcagagcggagtttcttcctcatcgtccttgagctgccccaacctcgtctagcagctggtagagaaaatcagctgatatgttaagatctgcgctgacaccacctaacttctaggtcgattaggtaacttaggtggtgtttgtttgggattataatctgcctaaattatataatcagtgttagttcaaaataaggtagattatataatctggtcagattataatcccaaacaaatagacccttagctccctgataagagggtgcctaatttacaagaagcctggaaacaaatgaatgctgccatggcaattcaatggttgagtgttgatgaggaggctgtttttcggtgcgccgctgtaagtttgggtatccatgctgtggtttcaagatca

SEQ ID NO: 27068 - DNA, 1822 bp, Zea Mays
ctccgtgctgctgcattccttcctctattatttctccaaccctttcccctctctttctctctctcatctaccctctctctaaaagactggatacagaacgaggaaaacaaacacccgaaaagaaaggaagaagaggagaagaacaccaaacaagcagaactttttttttgagaactccataggctgtggaattgtctccaggaatcccctctgggtttgacgagattcatacagagaaatacttcttgattttccccctttcttttgctcaagaatttacctgtacaggcgaaaccgcttctttgttcccttttttttctgtgtttgttttattgggattttcctctggtccgttcttcttcacctgtgaggtggtgagaagcagagagaatcatggggaagcaaggaccctgccgtcattgtggagtcacaagtactcccctgtggcgaaatgggccaccagataagccggtgctctgcaatgcatgtggctcgagatggagaacaaagggttcattggcaaactacactccaatgcatcgcaaggacgatattgatgacgatgaacccagagttagcaagctgaagccaccgacatcaaagctgaagtcacagaagaaaaaaccaaatcacattataatggagaatgggccattttctggtcagaatttccgaaagatgggggatgtcgaccaaagttatcggtctagttcgggatctgcagtatcatactctgagagttgtgccccatatggtgctgctgatgcaagtgaaatgactggttcagcacagtcgcatgcttgggagtccctagtgccatcaagaaagaggagctgtgtcacccgtccgaagccttcccctgtagaaaagcttgcaaaagatctaaacttcatcatgcatgaagagcagttatattacccttcaggatcatcggaggaagacctactataccatagtgaaactcctgtcggttcctttgagatgggctctggaagtgtgcttctaagacatccaaactcgaaatcactggagaaagaatcagaagcaagctctattcctgcagataataaatcatatattacaagtgaatcctactcgggctctgcctcgtttgccattcacaatggaaacaaggcagcaattaacttaaacgcttcaaatgcaaggctgaagaagtcgccgctgcatatggaagacaatgctagaaggggagtagggagcatcagtggtccggaaggctttaccaagtctactatgaaaccactcaaaagaccccgtgacacccaatttcagattgatgcagaactagaaggtaccatgaggagtcctctaagaggtctaaaatctggtgctttggctcagtttgaaagttcatctttgccaaaatctggctacaccaccaaagattcaacctgcactggaggagcacttaatttattcatgttacccccagaaaagttattagtggtccctcctcagtatgtcgaccctgatcaagacttgctgctggagatacctctcaatgcacgacacccagaggcagaacttctgtgtcaaccatctcagctgatgagctctataagccgcagctccacctctatgggtggggttgctgaaggagaagggtgcctgaagcaaccatagtctcaggtcacatcagcaaggagcttaggaacagccagtagttgcagtttactttagcctcctggatcttgacgcctccatttactgatcaccaatgggcgttatgcatccgtcattccctaatttacataacaatgaggcggctatgtacagaagaatcggtatagttgagaagata

SEQ ID NO: 27069 - DNA, 2383 bp, Zea Mays
taacttcgctccagtaaagagagggggatcgaagggcacgaaggatacattagagtacttgaggatatacaacagtttcttaattgatggaaggttgaaggactgcgtggatttgttagaaagcatggaacaaaatggactgcttgatatgaggaagatacaccatgccagctttttcagtatgtgtaagaagcaaagagctgtcttggaagctcttcgcttttgcagatttattgggaaccccaagataagtaccttcaatatgcttttgtcggtgtgtgctagttcactagattttgacggagcgctccaagttatggagctcctaaaggaagctgggctaaaacctgattgtaaactttacacaacgctgatatcaacttgtgcaaagtgtggaaaagttgatgccatgtttgaggtattttatgagatggtcagtgctggtatagagccaaatgttaacacatacagtgcattaattgatggctgtgctagagctgggcaagtggctaaagcatttggtgtttatgggattatgagttcaaagtagaaggtgaagccagatcgagttgtcttcaattctttgatcagtgcatgcggtgaatctggagctctggctcgggcatttgatgttttatcagaaatgacagcagaatcctctgaatctaaaggatggaaaccaatcgttcctgatcatgttactgttggagcactgatgaaaacatgtattttggcgggccaggctgatagagctcgtgaggtgtacaaaatgcttcaggagtataatataaagggtaccccagaagtttacacaatcgcattaagaagctgtagcttgactggtgatttagggtttgcactgaagatatatgaagatatgaacaggattggagtaaaacctgatgagatgtttttgagtgctctagttgatgtagctggccatgctaggagggcagatgctgcctttgaaataatgaaagatgcaagagcaaaaggtttactcgttggaacaattgcatacagttcgttaatgggggcttgctgtaatgcggacgactggaagaaggcactgcagctatacgaggagatcaagtctatcaaattgaccccatcggtttcaatgatgaatgctttgatcacctctctgtgtgatggtgatcaggtcttaaaggctgttgatatccttaatgagatgaacatattaggggtccatccaaatgagataacatactcagtcttatttgttgcttgcgaaagaaatggtgaagcacaactaggtttggatttgtttgaacaattaaaaatggatggcattgacatcaatccgaccataattggttctcttactggtttgtgccttcaaatgttcaacattgatttttcgcttgggaatattattgtcaacttcagctcagggaaaccacagattgacaacaaatggacttcctcagcagttatggtgtatcgtgaggcagtttcagctgggctactaccctcaagtgatgttttatctcaagtgttgggatgtctgaggcttcctcatggcagttctctgaagagtactttcattgaaaacatgggagtaagttgtgacattccacaatacccaaatataaattcacttttcgaaggattcggtgaatatgacattcgagctttttctatattggaggaggctgcttcattaggagcagttgcaagcatttccataaaagaaacccggattgttattgatgctagaaagttaaagatcttcacagccgaggtatctcttcttagaaccttaagatctttgaagcatcgattggctgcaggttcaaggttaccaaacgtgacaatcttgttacctacagaaaagaaacaagttgacattgatgaaaaggagaaaacacttaaacttgctggaagaattggtcaagcagttggctctctcctgaggcgattaggaatttcataccagggggaggaatctcatgggaggatgaggatcaatggcctcacgataaggaggtggttcaatccaaaactgaatagcaaatcctctgctgccggcccagctgacttgcttccactaccttcgcggttagccaaagggattgctggtcagcaacgcgatattagaaacctttcactcgagtagtagactagtactacacggctatcctggaagcgatctcagtaacccgtgtgataagaagcgtagtatagtaagatgtgcaaacgtgtgaagagtttgttcggtagaaggaaatacataatccatcaatctgtaatgacagtagtcgaaggaaagatatgcacgatgcatcaaacttttgtaatcatgtcaggtaaagggattttcccctgaacataatatacatatagagttacatatttggac

SEQ ID NO: 27070 - DNA, 3396 bp, Zea Mays
acacttttccttttcatacgaccacacacaagcaaaaacctcgaccggaccacacgcggcgccgccgctccgccgctaagcctccttcccatgcccgccgctaagcttccttcccatgcccgccgtcaccgctgacaagcgcactgtggcccttccgcatccataggctgccgccgcgctcccccgccacgagaccctgccccacttcggatgccctttcgaccacacatccccctccgcttcctactgcctcacctccagcaccgcattgcccgcccacccagacctccacgtagatcgctttcctactctctcgcggcggcgttgtcagcggctggaacagagtccgaggaggaggcggttgtgggtagggacgcgccgttagcccctccacgcccaggcggggcgggaagtggagcgcctgggcgtggctgggcacagcagggggcgctcgatgaggaaagtgcggagctcgagcggaaggcctctatcgtcgcacggttcaggcactgccatgagcttctgtggcagactaggtggcgggagatgcgccacgggttggcccagatggtggatgaacaaggttctgattctgctccgactctatgtgatattctgtggtgtggattcagggaatgggattcaagcagcattgtgtgggatgctctagcaaatagttatgctagagctcagatgaatcatgatgctctttatgttcttagtaaaatgaacagcctaaacatgcaaatctcaataaccacctatgatagtttattgtacagtctaagaaaggcagatgtggcactggcgatttttaaagagatggagtcatgtggtattccccccagtgattattcccatggcattctcatagatggactctgcaagcaaggtaaaattggagaagctttatctttccttcaggaaacaaggaaagaggggaaattcaaacccttgggaatgacctttaacacccttatgtccgcattgtgtaattgggggttcattcaggatgcaaaatcagttttctgcctgatgttgaagtatggattaaatccaagcaggcacacatattcaaccattatacatggtctatgtaaagtaggttctgtaaatgaagcattcgatatttttcagagtgtgacagaagaaggaatggaacttgatattgtcacttgcaacagccttattaatggctttcgcttgcatgggcatacaagagaaattccaaaaatgattgagatgatgaggggcctaggtgtcgaacccgatgttgttacttatactatacttattactggccactgtgaaggcggtgatgtcgaagaagggatgaggataagaaaggacatcttaggccaaggtatagagttgaatattgtcacatatagcgtccttatcaatgctctcttcaagaagggcctgttctatgaggtcgaaaacctatttggtgagatatgcagtattggtctggaattggatgtcattgcatattccatcctcatccatgggttctgcaagctaggagaaattggaagagcacttcaagtctggaatctaatgtgctgttctcagagggtaattccaacttcagtaaaccatgtatctattcttctaggcctttgcaagaaaggattccttgatgaagcgaggtcatatttggaaactgtggctagcaaatatcagccatccgatgtagtcctctacaatgtagttattgatggttatgcaaaagtgggtgatattggtaatgctgttcagctgtatgatgcgattattatggctggtatgtgcccaaccattgtaacatgcaactctcttctatatggctactgcaaatttggggatctacatatggcagaaagctattttatggctattcagttaagtgacctgctgccaacaacagttacctacactactttgatggatgcactctctgaagctgggaaagttcattccatgctaagtatttttaaagaaatgactggaaaaggtatcagaccaaatgcaataacttacagtgtagttattaaaggactttgtaagcagttaatgttccacgatgccaaaaatgttcttgatgatatgtatagagaaggttttgatgctgatccaataccttacaacacgcttatacaaggtttttgtgaaactcaggatgctaaaaatgctttctacgtgtatgaactaatggtatgtcgtggagtgatgccctctcctgttacttataacttgcttgttaatgtgctgtgcttaaagggactagttattcacgctgaaatgaaactggagtccttcagaaaacagggtgccgagctgagaaaatttgcatatacaacacttatcaaagctcaatgtgcaaaagggatgccttacaaggctattatgtgggttggcaagcttctagatgcagggtttgaggcatctattgaagacttcagtgcggcaatcaaccgactatgcaaaagacagttcaccagagaagctttgatgctcatatcgatcatgttatctgttggtgtttatccagatattcaactataccgtgtactgggtacagctgtacagaagaaaaatgagtcattctatctacccatattgcaagcccttgctatcaaaactggtatttagtactttgagtctgaagggcaggcctggtgcagtggtgatagctgtctgactaagtcaccatgtcacgggttcgaagcagcctctccgcatctgcggaggaaggcttgccttggtttatcccgtcgcatctgcggaggtggtgctgctgtgcatcgctgtgggctgtgaggcggaggcactgcatctcgctgtgaagtggactgctccatcctctctatgatcctgcaccatcaggggttcgggtgacctttgaggatggtggttaactggttaccttgaagatcccggtgccattgattctttgctacttggcctctccactgctggcaacagacccagggaatgaattagatacctattcttgaccccttcccgcccaaggaggagcaggcaggaactccggtatatggtggtaattggtggcacctttatgtacttctttaggggcagcctaccatggcaggggctgaaagcaggatcaagaagcagaaatatgacaaaaattagtgcgaaatggatactcccatggaggataccagttttgactggaccattttgaagtatcctcagataggctgcaacctgcggatgaaggcaagtgacagaactagtggaggtgttggaccttcaatggatacaattgagaagaccccaggaggtgtccgatagaaggaatcctagtggttatgtgaatccgagtggcaattatgcccaatgaccacgtgagaacatatgtatgtcattgaacgaaattggttcgtg

SEQ ID NO: 27071 - DNA, 291 bp, Zea Mays
gccccaacgccaaccacgattcccaccgatgttacgcgagctagagatgaaggtgagcagtttgagggaagacttaccgtgtagcgagtaggtccacacatggcgaatgccgtgctccggtgagcgattgaagcagcactgaggacgccatcgacccatcgatgccatgcatcgcctcgaaagatgcccgaaattaacctcatgccccgccataggcctaacgccgacttggctcccgtcaagccaacggcagatctcactgctctctctctccctcggtctcttcttctg

SEQ ID NO: 27072 - DNA, 4477 bp, Zea Mays
cccacgtttcctcggctcctcgcccgcctctctcgtttattagcgctcgtaaaccccactcacttcttccttctcttcggccccttcctcggccgaaacctcagttgctcctccgcccgctcgaaaaccccaagtccccaatcacacatcgggccaccgccgcggcatccatggccgccgaagacaaagggaccggagaccgcgagaatgcagaccccaacctctgctccatcgccgacgcgtcgctgtctcacgagaacaccgaagacaaatcggatttggataccaagagcgcgccatctattcagttgcttcagccaaaaccgggggaaaacaaggagcctggttcacatgatatccactttaattctgcaaacacgacaggaaacagtgaagaagggaacaatactggaaagaaaagagatgttttcaggccttctgtgtttgatagaatatctggccaccgtgaccaatggtgcaatgaagacaccagactgaattcagattcccatcgaaatcaatggagggaaatggaaaaagaacatagtgatatgaacaaagtggaacagcactgtgatgaccccaagcaatatcttggtagccagcggagtcgaaaagagcgctgggttagtaacgaaagaaactatgaccaacaccatgagaataattggaattctcgctggggtgcaagtagtaaagattctcaaaattggcgtgaaaagtcaacagattcagatataaaagatgattactcctgtgaaaaagttttttcttacagtacatgccatgggaaagaaaaggatggtaccaatcatgagaaggttaatgaaagggacagtaatatttctcgatcgtggaactccagctattttgcaaaccgtggtgcaggcggtacatctgatcatctttttacggatccacagaagttatctgcttcatttggatacagtagctataggcaggaaagtgatagcccaaactctacaagttctcgcagaaggtttacatctgttacaagcagagtcaatagtcggtcttcacgaccattccatcttggtgtactttctgagaggcctgttggtccatctagtaactctgtgagatatagcaggataaagttgtttgaaatatatagaacaactgatgttagaaacttcacaatgccgataaatgatattggtaacaatgagatatcttcgttgtggcaagaagatcctatggatcctttagctctcattgcacctaatgctgaagaagcggtgattttgaaaggaattgaaaaaggagatatcacaaacagtttggcacaagcttgcaaagatggttctgatgacaaaaatattccaggcgtggcagcattagaacaaatgaaattaagtggaagagaagatcaaacaggaaacaatgaagaattcaatggtaaaatgaccattgatatcagaggaattcttggggctgctgatttgagggaacacttgaagtctgataaatctcctccaaaagaatctgagtctggtggtggtggtatccatgggccatgtgctgaatttggacatcagcgcaatgccttggaccaaggaactaaagttggtgatggtgaaaatgttaacccagaaaacctctctctgtactacaaggatccaaaagggtgcatccaaggtccttttcctggatatgacatcattggttggtttgaagctggatattttggtattgatttgctagttcgtgttgccagtgctccctgtgattctcctttcttattacttggggatgtcatgccacacttacgggcaaaggtaagggtgcctccaggcttcagcaataccaaaccaagaagtatgacagatgcctcacatctaggatcagtgtatcttggaacatctgattatggatccataaacaagaatggctgtgtaactgaagcagaaaattactttttggaggctccagtgtctagtaaaatccagaatcctagagcagcaactaatgttgttactggaggtatgaatgaatggaggtttgtttccggtgagaaagtgaatagtataaaccatcttgaagtacagaaggtgcagttagagacagaaaatacctttcaaatagaaggtgatgtcatatcagttggagagtcacaaaagaaagaatcagtacagtcaacttcacactcaacattcttcccgcaaatggttgacccatcgagtgaagccctccaacctcagaatattaacctgctctcaatgctgcttcctgcagaaaaaggacaagcaccgactgctacttctggattgtcacttcggtcaaataatgctgactctggaaatctgcatgctggtatgtgtggtatagatgttactcaagagatactaaatgtgcaccaaaatctgcataattctcagcaaataggtattgatgctcaacagcattacgttttaacacagaatcaaccaactttagcttgtttgaactctcaaatcacacagccagaaaagtttctcggtggaatatatcatgatcctcagttaaacatcaaccaacaacagtatctgctatcagagctacacttgcaacccctgattcctggagtccctgaacctcaatcctctctattgaacaacatgctacagctcaggcagcaggagcaacagcaacaatacatttctcagtccatacctcatgatcgttccatgcagcagctttatgattcttcccatgggacaatacatacttcattgtcatctggtgaccgtatgaagctttgtcttcaaagaacagaagagattcttgatcttgctctgaagttacctggtcatggtaagcataatctacaactacatgcaagtgtgaaattgagagacacaggaaatattggtttgtcggaaagttgcgctactgccctaccactgccccatgaaatgatgggtcatgcagcttggaaagaatgttctgctagtctcacacagggctctgcagttgttgatgctctttcacaaaaagaaagtattgtagactcaccatctaagaaaactccaagttatggttctaacgattatagcaagatgactgtttttgaagttacaggttttcctcaaccatttcaaggtcttcagaaaccgaaaagtgtagcatctcatatctcaaatgaagttcatgaaatggatatttcctctgtccatcctcattcatggaaacctactccaggtgttagggctaaatcagtgttggaaattcaagcagaggaacgattggaaactcagagggaaatagccctggaaaatacaaaggtaactacaacaacagcttccgggctatctattcattgggttgatttggttgaaacttctgggcaacagtttggagatcaggctagacctatgtgtgataaaaaaaatgacaatatatcacagagtaacagaagtcatttacatgatttatcggcaagagaggaactgataaagtcaaatgctaaagctggtgttatcataaacagtgctgatgatacatcttttcctcctctggcaccttctattactcagtctgatgctcatattcatgatggtgctgatttcattgagttcaagggcacaagaaagataagtaacagggggaagaaacccaaaggttctgcagttaaaaccccagcatcacatgcaaatgttatacctggaccagctactgatcctgcacaggtacgcgaaccatgttctctgagaaatattcaggtggaagaagaacaggaatcagctaatcttcagcaactagtaccagcatcatcccatgcaaaagggcctatggaccagcatattcatgggaacaattcatcctggcaaggttctgaatcacctccatcgaggggtaacgaattcctcaaaatgacttctcatgtttccagtcactccactcctaattcagaagagtatctgttttgggagcctcgtgagcatgcaaagcaagataagccgagactccaatcacctccgagttccgtggtcaatacaaggtctactgcattggacattcataagaaggggaagaaaggtacaaagctgagcacgtcagctttggggttcaaggttcagagcacccgtatcatgatgggtgagatcgcgcatgttgacgagtagatgtccagactgaatttttatcatggtaggcgagcttcctgaagaatgaagatgatgacagtttggcggctgaagtgacgagaattcaaattgagcaactggcaaaggttttggttttcagcaggcttggttgtaacttgaaaatcgtataatgtttgttgctgggcggattttgtgcgaagcattgagcctggaaggttcaagattcaggtctaatttgcagtatggaatattcgagtgcttgcttgtgaccgtttcctgaaacagtcatctggtgtatagtttcctggaatctgatgggatcgtttgtcattaaaataatttacgtgcatatcaacattaacatttgccca

SEQ ID NO: 27073 - DNA, 1901 bp, Zea Mays
gctgtttcttgattaatattatattgttttgtttcctaaagaagtgcaggcctgatgcagtgatgagaactgtctcactgagccaccagctcacgggttcgaagcagcctgtccgcatttgcgggagaaggcttgcctcggtttatccctttctcaggccccactcttgtgggagcctcatgcactgggtctgcccctttttgtattgtttactaaagtatcatagatgccacacttgttcaactgatcattgaatatcaaattggttgtttttatatcagtcattttacacagtaatttggttaatgaccctccccctccccctccctctccaccataaccctgttgcagccctttcgccacacactctattgattgatcttgttttgttcttcagctgctttgatttctgatccttaggatttcttctggattgctcataatcatgctatcgagaatatgatgctgtttcagtatcttgtcaacacacttgaagcagattttgtgcctcgccaaattgcaaccaaagagtcactagactgggtgattttcagagagtctctcttaagtatgcttctgggatcacgaaagctcgtgttcaaatcttttgtgaagaactgcatgtgtattctactcaaccagtattaccatgaagctaaagatgattatgaagacatcataccttctgaaagagaaactgaatcaacatcttatcacaatttctccctaaactatttgtcctttgagttaaaaaagacactcatttctctcaggaaattatttgtgatggttatgaaacttgacttgaccaggaaagaagcagacacattagggttaacctcaagagctgacagattcagaaactctatcatggatattattttggatgaactaacttacaacagcagttatttatccccatttctcttggcctttgtggaacggaagtggaaattggagattattttgcagtacttttcaaaatattgtggcaagggcgcagtccgtactcgaaggtctgataattcacaagaagatttgaaactggaaaatgttctgaatttctttgtgacagccacaagtgcaaaagctattgtcagaaagatgagtgcagaaattgcccagcttcttttaacacatgcttaccaggcgtgcctttctgctgaagatgccaacagcaattctgctgatacacccgaaaaagttggagctactctccaagagatatcttccaacttcatagctgcttttcaaaacatcaggaaagttagcccggatatccagatatcaccgttcgagaaagaagctctgtttactgctgcaacgttggttaggaaattgaagagcaaagaaaggtagagctgaggcccccgcttagggctggtttggtggacatggaattggagaggatccaacgggggagtaatcccctccttattcaaatttaaatagggaggagattcctcccacgtggattccctcaaattccctgtccaccaaatcagcttttaggatgtgataggttcagatggtgtagctttctggccactggtatcatcaagttgtttcatattttgggttatgtgtcacggttacggaattaccccgcctccagtagccagtgtccgcctcccctagtagactagcggtactggtctactggaaagttgaaggtacataacttatgcggctgttgcatatttacgagtggtggcatgtgtcgggaatatggtcttagaacctgattgtgggtcatctgatcaacccaacctaacccacccaaaacatcctgatttagggtgagtttgggtgaagagtggagaagaatgaagtcctattttctaaatctttagttctcaacaaagaacagtggagcgacttcgtgtttgatttaaaaaaaa

SEQ ID NO: 27074 - DNA, 2027 bp, Zea Mays
aattcactcctttcttcttctcctgcatcaggatcatcatcaggttctccgttccactccatggccttccctgctgtgcccctcctcgccgctctgctcctggtcgccgccacgcggctgtgggactacgtcttcgtgcgcctcgtatggcggccgtacgccatcaccaaggggttcagagagcaagggatccatggaccctcctacaggttcttcaagggctgcaacgaggagatcaggagcatgaaggagaagaccgacggtctcgtgctggacgtcggcgaccacaagtacctcccgcggatcgcgccgcactacctcgaatggagggctcagtacggagaaccatttctatattggtacggggcacaagcccgaatttgcatatttgactacgaactagcaaggcaaatcctttcgagcaagtctgggcatttcgtgaagaacgatgcgcaccctactttgttggctctggtcggcaagggactcgggttcatggaaggctctgactgggtgcgccatcgcagggtgatcaaccctgctttcaccattgacaagcttaagcatggcaggtgagttggaagctgaagcatcccagaacgagaacggagaaacacaagtggatatatacaaacatttcagcgatctgacagttgacaatatcgcctacgccatctttggaagcagctacaagttaggcaaacaagtgttcgaggcacaaactgagctgctggggatcaccatggctactttccttgacgtgcccataccaggatccaaataccttccaacccaagcgaatcggcgaaaatggatgctggagacgaagctcaagagcttactcacgcggatcatacagccacggttagcaagcggtgagcacggaaacgatctgctgggcgtgatgctggactcctgcactgagaccaagcaaggagggaagcagcagcaagtggatcgtctgcgtctcagcttgagcatggaggagatcatacacgagtgcaagctgttcttcttcgctggccacgagaacacagcccttctcctcacgtggtccgtgtatttgctcagcatataccccgagtggcaagaaaggctccggaaggaggtcttgagggagttcgggagggacgctcctaaccccaacgcgctcaacagattgaaagagatgacaatggtgttgttcgagaccttgaggctctactcgcctgctctcttcatgcaaaggaagaccctggccgacatgaccgtggggccaataaaactgcccaaaggcactgcaattgtgatacccattccgatcatgcatcgagacaagcaggcatggggcgacgacgcagacgagttcagtccgatgagatttgcgaatgggatcacgggagcagcgaaagttcctcacggcctgctggcgttctcgatggggccaaggtcttgcatcggccagaacttgtcgatgctggaagccaagtcgacgctggccctgatgctccgcaagttctccttcgctctctcccctgactacgtgcacgcgcccgtggatctcttcactctcaaacctaagtttggccttcccgtcattctgaggccactggataatgttttgatttgagttgggcatatagtacaacaggaagtaacttaggtacatatcaaatttgctagctggtcaaaacgttatatgatgttctcaaccctccgttgttctatatcgttgaaaacaagtattttaatttaggtgcggtttggtttggcgctgcaagcgaaaatggggacgtaaatccggaattaattatagcaaaacatctcttcaagcttgaagtagttcataaatgaagactggtaaagtgtctgtaagttgctacagattctatttatgtctaagtatagaacataaaacataaaaacacggctgatttgttagctaggtggatgtaaatataggtttagagccaataactatggttcaaatcaccatttgtgcataattttaatatttttattatttaatcactactggaatcttcggc

SEQ ID NO: 27075 - DNA, 839 bp, Zea Mays
gagagactcgagtactagactagagtctcaactcttgagcagggaaaacgagagatccttggagtcagcaatggagtctaccgcgctaatgaccgcgagactaccactgctgacctctggctcccgttccaaacccctcccctttgcttccttcaccagggcggcttgccgtctcgcctccgcccccttctccggcagcggcagcgtcgtcctgctgtcgcgccggagccgcgactatgctggcgttggttccttggtctccgccgcggcggatcctggggatacggcggacgccggatccgagtccatcctgctcagcgtccaggggatgatgtgcgacgggtgcgccgcgagcgtgaagcggatcctggagagccaagcgtagcaccgtgccgcggagttggacgcttggaagctgctgtagccgtgacttcgacgccttggacagtgtcgtcgcgacatcagcaacctcgttcagtgtttgcctaagagaataacagccacagctgcatctgcaacacaactacaacagctgtgccgaccacctagcagtgtttactgaatacttgcagaagctgaaaacaacagtgtttactgaatactgctagtaatactgtaatagtagtgtttattgaatactgctaattcaatgtttcggcacaacatcctatttcggctgaactttaaaaaaaaatctgcaactcctacagaaaagcatcgacattcactcatacaaggttctcattttggtctagatgcttagtaatagccttggcagcatatgcatggattggatcgagactatattttaattcaaactagcacttttgagagcacgg

SEQ ID NO: 27076 - DNA, 1712 bp, Zea Mays
aatcccatgcagtccggtcggtggatccaatgcgatcaggccggcagctccctggccggctcccagcccgagcccatcattgcgccgccgcctccagctccagctcatccggatgagggggaaggaagacgataccagacgctactcctacaactcaccaccactacactatcccctccgctctctctccgcactactgcgtattaggtagcctctcgcattgacaagccagccggtggtttggttcgctttgctttgcttacgtgctgcgctgcgcgctccgaccaggcccgccccgaccggcgatgcagcggtggctcccggcgctcctccgccgcgcggcgcccggcggcggcgcggcgcggctcctcgccacgtcctccctcctcttcgacgacacgcaggagcaggtgcgtcatgcgctcgctctctccacttcccactcggcgggcccgccgccattgcgcctcgccccatgcctgatcgacccaattcctcgcccgcccgcccccttgcaccccgccgccagttcaaggagagcgtgcgcaagttcgcgcaggaggccatcgcgccgcgcgccgcggccatcgacgcctccaaccacttcccgcgggacgtggacctgtggaggctcatgggagacttcaacctccacggcctcaccgcgcccgaggagtacggcgggatggggctcgggtacatgtaccactgcatcgccatggaggagatcaccagggcatccggcgccgtcggcctctcctacggcgcgcactccaacctctgcatcaaccagctcgtccggcacggaaacccggagcagaagctcaagtatctgcccaagtggggagcatatcggggcactggcgatgagtgaacccaactctggctctgatgtcgtcagcatgaagtgcaaagctgagaaagtggacggtggctatgtccttaatgggaataagatgtggtgcaccaatggcccgtctgctcagacactggttgtttacgcaaaaacagatctagctgcagggtcaaaaggaataactgcattcataatcgagaaagggatgcccgggttcagtactgctcagaagttggacaaacttggcatgagaggaagcgacacgtgtgagcttgtttttgagaactgctttgtgccatgcgaaaatgtcctcggtgaagaaggcaaaggtgtttatgtcatgatgtcagggcttgatctggaaaggcttgtattagctgcgggccctattggccttatgcaggcatgccttgatgttgtacttccatatgttcgccagagggagcaattcggccgtccaattggtgaatttcagttcatacaggggaaaatggctgatatgtacacttcgttgcagtcgtcaagatcatttgtatactcagttgctagggactgcgataatggcaaagttgatcgcaaggattgtgcaggagtaattctctttgctgctgaaaatgcaacccaagttgcacttcaggcaatccagtgtcttggtggaaatgggtacataaatgagtacccaactggtcgtctcctgagagatgcaaaattgtttgagattggtgccggtactagtgaggtaagaagaatgataattggccgtgagctcttcaaagaggactgaaacttctattttgcaagccagatatcagagcatattgttagctggaggaggtcagggcctgcttagagtgag

SEQ ID NO: 27077 - DNA, 1028 bp, Zea Mays
ttctgatgaatcagcttgattcgtttgcatgttgttgatggaatttataccagaatgggtgattagttctatcaacaaggaataagtaccttccatgaagagatgaaggaagcttcaaacatactgcataactgctcatctcgatccctagttatcatcgatgagcttggtcgaggcacaagcacacatgacggtgttgctattgcttactctactttacactatcttctcaaagagaaaaaatgcattgtcatttttgtcactcattatccaaagatccttgatatacagagagaatttgaaggttctgttggggcataccatgtttcatatctagccactaggaagcttttggaagtgaccgataaacaggtggaaactagcccagaggcaaatgatcttggagaaattattttcttgtacaaacttgttgctggagcttcagatagaagctttggacttaatgttgccctgcttgcacagcttccgtctagatgtatcaagagggcatccgtcatggcagccaaactgcaagaggagttaagtccgcgggaggaaatcaagcttcggaggacaacggatgcacaaactgtggacggaccatctgaaagttccgcagaagaaattgcacagaagacgatatgatgcagcggtccatttgacaactgacatattcttcatcagtgtgaagggaacttatcaggtatcatgtacctttttttgctacggaggatccctaatggtggtaagcattttgctggagccgtttgtgtaacccatactctgccaggatagcgtggttaagcattttggtcacaactcaaagcagtgcctgtgtgtagttggagtgaactccgtgatatatactggagtacttagtatgtaactctatattccgttcattaatttatctagaactcgtttcgttgatgtaaatgcagagaagggacgtgtttactttttttatatctcgtgctctacccgttttctttggcatcctggaccagggctggacaaaaaaaactcaa

SEQ ID NO: 27078 - DNA, 2815 bp, Zea Mays
tagttggatgcaaaaaaaagcattattttattatataaattgaagatatttgatgtcatttttatgaattttcatgtaagccgtaagcacaaatgcatggtatatcctgggcttctggataccagcagtgagtaggaaaagaacaagatggcttgtgtgcagcacataggcatcagaattgctgatgatcgcatcagcagcgacgcatgaaacagagctcaaacgacgactccaaaaccgagctagtgtggccctgcggacagatctgagcctgggagcgtctcgtattcgtagtttacgccactgccgcgagtcaacagcactctctcggcgttcccttgctgccttgtttcttgcgatggcgtgctacaaagtacaagaacgttgctctcgccctccttgtcgtgtggaacgacggccaaacaatgcagctattggcgcgtccgccgccgcacccgcacgcatttatatgagccgccgtggcgcctggacgattgccgtgtcatgtcccagctccctaatcgttgtgttgacgacgcccgcaggtgacagccgatatcgggattcgacgtcactaagctcgtcggtgggccagccgtcgcggagtgtgcgccgctagctgttggtacatacgtcgtagccgcatggcgtgcaccgtctcctgctcgcgcgtcttcgtcgtcaggtgctcggcgtccccctcgggtggcggtggcggcggcaatgccgtgagggtgaacggcgcggcacaccgcgcgccgctgcaggtcggggcggcgctggagacgtccatcaacaggtcgctggcggagctgagtccgccgctgctgccgctgctgcccacggacgacgccggcgaggagcgcagccggcagaacatcccgacggagaagcagaccgtggacccgttccggcaggcgctgatcgtggagggcggcgtgcggtaccagcagactctggtggtgcggtcgtacgaggtcggccccgacaagacggccactctggagacggtgctcaacctcctccaggagaccgcgctgaaccacgtctggatgtcagggctgctcggcgacggcttcggcgccacgcacggcatgatcaggaacaacctcatctgggttgtctccaggatgcacgtccaagtcgaccagtacccgatctggggagaggtgctggacatcgatacctgggtgggctcgtcggggaagaacggcatgcggcgggactggctcatccgtggccgcaactccggcgacgtcttcgtccgcgcaacaaggcaagctagcctggtgacgaggaggctgtccaagatgccggaggaggtccgggccgagatcgcgccgtggttcatcgaccgccatgccatctaccaggaggaagccacggacaagatcatcaagctcgacagcaacgccatgtacgtcgactccgaccttaagcccaagcgaagtgatctggatatgaaccaccacgtcaacaatgtcaaatacgtgaggtggatgcttgaggtaaagaaaaccaattttctacagtgccaaaacattgctgccttgacgttttacttctggtacaacatactctctccgtcccacagaggatgtcgtttgactttttcggtatgaagtttgccggctcgtcttattcaaaaaatttcataattatcatttattttcattcagatttagtttatcatataatttactttaactatgaactgaatttttctatgttttcacaaatgtttgaatgagatgagctggtcaaacttgatgtcaaaaaattcaaacgacatcctttgtgggacagatagagtacatagctatgctggtgagaaatcaagagagtatggctcaagcacaagaatacctcatgttacacacatacctcttctgtgctatgcagactcttcctgatcacttccagcagcagaaccagctcagcagcatcatcctggagtacaggaaagagtgtgggagctcagatgtcgtgcagtccatctgtcaacctgatgacgactcgattccaccgcaagaagatgtcagtatggccatcgggccttcgctctcgccggaactcatcagtggccaccacagcttggcaggtgcgctccagcacagcccgatgaagtacacgcaccttctgcagctgaaagcaggcgacaagtacgaggagattgtgcgagggagaactacgtggaagaaaaaatcatataaagccccctgacgtgtctctttgaaatgtgctttgctatactattaaaaaaagaaggaaaaggttggattccactactatttcgtagttaggccctgcccggtttcgtttataatccacctatggatgaaaataaacgagaatcccaccaaacgtctaaattattttcgtttcttcacagaatcaacagttcaactgttgaactaataaacgagaatcgaataatgaacacaaattccagcacgagtagctgagtgcgggctcccaagctagtccccatcaagtccagctccagcatcagctattcgttgccaaattgatatgtctcatataatgaagactaaatgcaaggatcaactaaccggccttctcttgagaggcatttagacgactcttgatccatgactcaagataaaagggaaatatgcctgtacaaatgcacacggaaacttcagatcttgggtactggcagcaactcagctcaaatagacataccgaaggtcctttcaagtgaagaaaaaggggagcattacagaaagctaccttgaatcacagttaacacccgtactctgcaaaaaaaaatggtggaccagcttgaccggct

SEQ ID NO: 27079 - DNA, 3077 bp, Zea Mays
caccccctctgacgtgcttgccggcgagttgcgtactggcctcatttgccacaccaaagctcaaccaggatgttcccgtgggagatggacattgatggagagtcgagcaaaactctgggacagatggaagacctggaaaaaattccattggagaatgagagttgtggcatttgtagagacatcgtcatcgacagaggagttttggattgttgctcacactggttttgctatacatgtattgacaactgggccgccatcacaaatcggtgccccctttgcaaaagtgaattccaacacataacatgcactccagtatatggtacgattggagctactgacgaagatgaatactctttaaccagctgtgatgatgattggtatgggcaagaggaaagcagcacactttccttcccgtcatactatattgatgcagaagccgtagtttgtttggatgatggtgattgcaagattcggaatggacttgtggcagctgaggatgattcaactttagatacatctattgcttgtgattcctgtgataaatggtaccatgctatttgtgtggcgttcaatgcaacaatggcatctgacagttcatggctctgcccaagatgcaagtttaacgaagtggaatatgaggcaaatgtaatcttgaagcaaaaccttggtgaggactgtgtgattggttctgataggacatgtaccaacgcatcattttctgggagggtgtcagtatctgttgctgatgagggagaaactgcccttgttgtatcaatggtgggtgcacattctgaaactaggggtggtctatcagaagcttcactaggacttgagacagcacatgaaacatttaactgcagtccatacccaagccattcaaaagatgtccttgttgcagatgctagttccttgaggaacacagatattgtcagtagatcccagaataaaccttctgaaataaatgttgtccacactctttgttctgagcctacagaaacatcactacaattttcaccaatacgtgagccagcaacaaccatatttagctcagagcaggataacatgtcaactgaacggttggaagtgccaaagcttgtgtcatcttgtccagtagtagataacagcaaggaggctaaaagtactggagaggagaatgcagcgcagcaaagcaataatgaattatcttctgtaatcaaatctccacaacctgcctcatcagttcatcagatgaaaactgcacaaaacctacagttgccacttaggcatgatgagcatagtagcgatgacaggaaagaagaacacattgaatctggaaatgaaatgatccatcctgcgaagaaagcaaaactggaagtgcaagaggacattaatgtaatcggaaactttgatttttcttcaatacatagtcatactactagtcctgcaaaagctattaccgacgacattatgtcagagtctgttgcacaacagaaatccattcctgatataatgagcattgttgacggtgaggtttacagaagggatcctggtagagagctggctaaacctgtaggaagaagagcaggagataagcctggtcctagagtgaaaaagatcttccgaaaggaagaaggaaaagaatcatctgccttggttcaaaagctacagaaagagattaaggaagtagttagagatacaggcacaaatatacttgagaaggatgaatcttttgatgaaaaactgttgactgcgttccgggcagctatagggaaatcagtggatggaccagccaaaagtactaacaccaatcaattaataagaacaaggaggtcattgcttcagaagggcaagaaacgtgagaatttgaccaaaaagttgtatggaacatctacaggaagaagaagaagcgattggcatcgtgattgggaagttgaattctggaaataccgttgctccccaggaataaatcctgaaaagattgagacattgcaatcagtacttcagctactaaagaaatcctctgaaatggacaaggaaagtgctaaggggaaaagggaagagaacaacaacagttccattttgtctaggttgtatttagctgatgcatcagttgttcccaggaaggatgatattaggcctctctctgcccttgcaggatgtgcgccattagaaaaaagtagccaaattaaagctagttgtaacaaatcgtctagcatacctgcaggaggcaacgagacaatgaaaatcagttcacccagcagcactgggaaagcatcaagctattcaattctgaataaagaggcacctagcagaagagaaaatagaaatagccagccctcccaggacaagagaaaccaatcctctggtgatatcaagcaggacaaaagaaaatgggctcttgagatcctggcaagaaaaaatgccagttctattacaaataaagatcaaactggaggcaatgatgctcttaagggaaacttccctctactggcacaacttccggttgatatgaggccgcagctggcagctggcagcaacaaaaaggttccggtatcagttagacaggcacaatttcaccgaattgctgagcattatttgcagaaagcaaatttggatgtcattcgcagatgtgcagatactgaattggccattgctgatgctgtcaatgtagaaaagggtatttatgaaaggtcaaatagcaaatcaatttatgtgaatctttgctctcaggctactcgccagcatgccaaggcaaaatctgataatgacacttcaactctaaccaaaaggactgaatcaggcagtgatcagatatcacaggaagctacatctgagggtaccaatgttagtggcagtgatatggaagaggatctaaacagagcagctatctccaatcaaaagaatgaactagaggatgatactgccccagaacatattgtgcacaaggatactgttagcttcaacagtgcagaagacgcactaaggaaagcgggcctttttgattcccctcctaacagtcctgagagagggaacacggcggttgaaggtaactctgaatccacggcagtttctaattgtcctaagttttcacaaaagaa

SEQ ID NO: 27080 - DNA, 1353 bp, Zea Mays
agtctggaacatgttattgtcgagtcggcaagaaaggaatagataccagagaaattcctggcgtgaaccacgggtgttgttcacatttggtaccagagccaatactggatcctccacacgggtactggacgagatcgcaatcgaagttgggcggcatggcgccagcgaagacggacgatcctttgtcccagcttctggcgaagatcgaggagggaaacaaggagactcaccgacgcatggaggcgattcagggggcggtgggaaatatggaggcggcggtcaaggtggtgatgacggagcagggagatcttcagaagtggaaaccggaggtggaagcgaaagtgacggagatttctgatgctctaaaggcgatccagatccagatgggaaagatggagaagaagccgctcggtttcgggtcgagacaggaagaagaaggagaagacggatttctgaagccgccaccatctgattcttcgaatttggagtttcgtcgtgaagaagggcggacccaattctcgcatggagtattgggcatgaactggatccagcaatacagtccgatgaaggtggattgggcgaacaagtgggcagtcattccatataatggatcgccagcatacttgcaaggtgtgcaggtgacattaccagccggcgctgtcaccgaacttttgctcttgtcagtggaatcacaggctacacccgctggacaatcggtcgatccaaaagtccaagcagttctggatcagttcgtggaggtatttgaggatccagtcggcttaccaccaagcagaacatgcgaccacactataccattggttccagggacaaatgtgtgtgtactaccactgtccagtaaggccgagtagtcagaatatcttgatgctgaatttgatcttgtaaatgccatgtggtagctgtcgcagtgccagaccatgctgaagatgacaacaccatcaggggctgctctataggttcgggcacaacttcagactcgtcatctgttccctgactgaacatctcacggaaaagctcttccggattgtgagtactagagcagatgaaaatgaagtgagcagagtggaatatgtaataaaaaatagattgcagccacaaccagtttgccctcggttgcttgatgcatatgtgtgaccagaccaatctgatatccaaaaacttcttgccataataaatgaggctatcctagaaaaaagacaacaaacctttatcctgcacaacgctctaaacattagacctggtgaacataaatggccaatcaaccattctgtatttatcttgtaacacatcgaaccttactgacaggaaaccacgttgtgtttgttcagagacggc

SEQ ID NO: 27081 - DNA, 1922 bp, Zea Mays
atcactcaaataaataatatgaatctgagctatactacgagaacttctggattcagcaagaactagcagcaatcagaacccaatagcatagcaacaaaccgaacaatcaaccatatattaggagacggtagatagaaccacgttaacattaagggggtgtttgaatgcactgaaactaattgttagttggctaaaaattgttagttgaattagctagctaacaaataactacctcactattaactaattttccaaaaatagctaatagttcaactattagctatggtgtttggatgttttaactaattttagccactaactattagttttagtgcattcaaacacctcctaagtaagaaacggtagatagccagtacctgcaggcaaatattaggagacaactgaaagacagaacataatgagcacaggctttaatttcaaacatcaaacttattcatgatttgtcatagttctgggtagtacgcacacacaacacaaccggtccattattaaaccaacactgacacgactcatgacacgaacagcagatactttgacaacctccatatggagagagggcaccagacgacgcaggcacatcggcagcttaaacgacccatgacttactgaccaccacggagacggagcacaaggtgatggtcttgccagtcaatgtcttcacaaaaatctgcatgccacccctgaggcggagcaccaggtggagagtgctctccttctggatgttgtaatccgccagggtgcggccatcctccagctgcttgccggcgaagatgaggcgctgctggtcgggtgggatgccctccttgtcctggatcttggccttgacattgtcaatggtatccgaagactccacctcaagggtgattgtcttgccagtgagtgtcttcacaaagatctgcataccacccctgagacggagcaccaggtggagggtgctctccttctggatgttgtaatccgcaagggtgcggccatcctccagctgcttgccagcgaagatcaaacgctgctggtccggtgggatgccctccttgtcctggatcttggccttgacattgtcgatggtgtctgaagactccacctcgagggtgatagtcttgccggtcagggtcttcacgaagatctgcatgcctcccctgaggcgcagcaccaagtggagggtgctctccttctggatgttgtagtcggcaagcgtgcgcccgtcctcaagctgctttccagcaaagatgagccgctgctggtctgggggaatgccctccttgtcctggatcttggccttgacgttgtcgatggtgtctgaagactccacctcgagggtgatagtcttgccggtcagggtcttcacgaagatctgcatgcctcccctgaggcgcagcaccaagtggagggtgctctccttctggatgttgtagtcggcaagcgtgcgcccgtcctcaagctgcttcccagcaaagatgagccgctgctggtctggagggatgccctccttgtcctggatcttggccttgacgttgtcaatggtgtcagaggactccacctcgagggtgatagtcttgccggtcagggttttcacaaagatctgcatgcctcccctgagacggagcacaaggtggagggtgctctccttctggatgttgtagtcagcaagcgtgcgcccgtcctcaagctgtttgccagcaaagatgagccgctgctggtctggggggatgccctccttgtcctggatcttggccttaacgttgtcaatggtgtcagacgactccacctcgagggtgatagtcttgccagtcagggttttcacaaagatctgcatcttgaagcggaggtgccgacgggtggatttgggggagatctggttgtgtgtgtgtgcgctccgaacaacacgaggttggggaaagagg

SEQ ID NO: 27082 - DNA, 2150 bp, Zea Mays
gcgattttctttctcaaaaacagtgaagatgctcaggctgtctgtgactctgggtgactcttgtcttccacacatcgccacgccactgattggctcgcgattatgtgattcttgaaccttcttgccatggggatgtctgcagcgtctcatctctgtgcttcttcgtccctgcgagctttaaccgtgttgtttttgttggcagctcttgtttcagatgtagaggggcgacatcatcgtcatgtctgtcctcatttctcctgcggtggtttaagcaatatatcgtatccatttcgtcggcaaggtgatccatctgggtgcggtgtccaatcgtatgagctggtttgcacggatacagatgctacaattcgcatcggcagtggaacatacaaggcatgcaggtgccctggaatacaagctatccagatgttgttaagttcatgaggagtggatttgcccttggatttcccgtttggtatggtgataacatcagagaatgtctcgcaaacaatatgcgtactttccataaagaaccaagaaatagtacaggcatcaggcaacagatcttggacattcttacgttcgagacattatggttttgtgttattgaacaacttggatcaactaataatggtgtcaaatctgttctcatccacatcatcgaagaaataccatatgttctttccggtctgaaatctgcacatgttatttgcaggttcatattgatgccgctggcagtatttgtcttcctagcctataaatactggaaaacacggataacaatagatgcagttgagaagttcctgcgaatgcaccatatgctcgttccgatgagatatgcatacacaaacatcattgctatcaccggccatttcagagacaagctcggacaaggaggctacggtactgtatacaagggggtgctacagccaggtgaagttcatgtcgctgtcaagatgttgggcaactcaaactgtaatggagaagagttcatcagtgaggtcgccaccattggcaagatccaccatgtcaatgttgtgcgcctcattgggttttgctccgaggaaaatattagggcacttatctatgagttcatgccccgtggatctctcgataagtacatcttctcgtcggagaagacattctcatgggacaaactcaacgagatcgctctgggcattgctagaggtcttaactacctgcatcacgggtgtgatatgcagattgtacactttgacatcaagccacacaacatccttcttgatagcaactttgttccaaaagttgctgattttgggctagccaaactgttcccaagagatgacagtttcgtgccactaagcgctatgcggggaacgataggctatatagctccagagatggtatctcgaagctttggtgtcatctctagcaaatccgatgtgtacagctttgggatgctactattggagatgacgggcgggcgaagaaacgcagatcctcatgcaggaagctctagtcaagcatactacccatccttggtgtacaggcagctcagccagggtgatgcgaacaggatcagtgaaggtgttgatatgcacgagttagagaagaagctatgtatcattgggctttggtgcatccagatgaagccgcaagatcggccgacaatgagcgaggtcatagagatgcttgaagctggtgtcgatggcatccaaatgcctccgaggccatacttttgtgatgaagagggtgaaagttcttactctacaatctctgaactggatacaatagaagagtagtagtagtaaaatgcacttgtgtctatgtgctcttaatgtatcagactattaagattgcaaggttgccataagctaaggtattggttgtatacttttattgagagtgtgataatgtgatatcatataaaatacctccatgaagttttttacaaagaattcctcaagaacattttgtttgcctacaagcagaggatcagagtcccagccgttgtatcttccaaagggctgcagttcctatatacgaatccttgcaaaggcttagtgtacaatttctatgttatgcataataaattaagtaaactagtatattgcttgtgctaacactgcaatagtatttggcaatacaaatcaaataaccaaaatattcaaaaa

SEQ ID NO: 27083 - DNA, 182 bp, Zea Mays
agagggaggcgagctagaagctgaaattggggctgggcgtcggccgttgctgaatcacgaaagcagcgcgccgtccgccagcgccgccaccacgaggttccactggatcttgacgtccagccggactgcagcatcgtctgccgcggcgtcgagcagagaaagagtagacaaccggacttggg

SEQ ID NO: 27084 - DNA, 3359 bp, Zea Mays
tttcgctgctctctctctctccgagcacagctgggggtggtgttcacgggattcaaagttcaaacggggtccaaaccttcccgacttccagtacagtcttcctcagacgaggccgcaagacaggaggagacaacgccgaggcagccagctagggcgcggtcaaccgcagtaagccaataagcaatgcagtagtgggcgcagctccggaggagtggaatgacggcgccaccgaatgctagcatgggaccgctcagtttgggtggctgcggggctctcctctccactcctcagcctaattcgtggcattgccgcgggttctcgattcctgagaggagcgtctttatgttgccactgcgccggggtttgtcaaggaagaggggctgggttcttgattcaagaagtaacggtgctgtggctcgtgatgaggtcggtgccgggtcgtcagagcttcggcacatcgagaaggagctgacgttcagcccgactttcactgactatgttaaaatcatggagtcggtgaagttggacaggagcaagaatttacatggcgccgatggccagagtttgaggagaaggttcgcgggtgatggccgacaaaggaataggaggtctggtgatgcaaggaataaatcatttgaaaggaatcaggggcctcagagggacttggcgaaggatgagaatcagaaggatgttacaggctttgtggataaaagagcaactggtcatgtaaaaagtagcaatcgcaggcaaggggaggttgaagactatgcacagagaagaataattcgtggtggtacaagaggaaatggagacaatgggcagttctcatcacctgtgaaggctaaagatactaggggtagtatgtctgttcataggttggtgacgaacaaacagactcagtcagttgcagggaacgatttacaagggcgagcaacttatactccatctcggacttctgcccttccaaatagcagtattccatcaaagaatgctaaggttcaaatgagaaaatacgactatactatgacaagtagcagaatagacttaaaatatcctagagagacatttcccaatactgaggtcaacgctgacagtaatgttcaaagaaatcagcaaagagtggagaccttagggagaaactttgtagtacgtaggtttggggagattggcaccgactctaagaagtctaccgtaagcaaaatttatgggagtacacaggcaatgcctgagcatgatagccattcaagtgataatttggagagtgatgaacgtaggacagttcaattgcatagaggagcaaatgttaaaatggggaaatttgttagtagggatgctgaaactacagattttgatgatagagctgctttcaaaacttttgaggtatttactgatgtcaggaataggccacggatccttcgaatggaaatggaagagagaatccagaagttagctagtcggctcaatgctacagatgtaaatactccagagtggaaattctccaaaatgattcatgatgcaaaaattaaattctctgatcattctatcctaaggattgttcaaatgttgggtcgatatggaaattggaaatgtgttttgcaagtggttgaatggctccagtcacatgaaaggttcaaatcctacaagagcaggtatatttacacaacagttctcgatgttctagggaaggcaaagagaccattcgaggcgttgaatgtattttataccatgcagaaccaattgtcatcttatcctgacatggcagcttatcattgtattgctgttactcttgggcaagctggtcttataaaagaattatttgatgtgattgattgcatgtgttctcctcctaggaagaagttcaaattgagccctcttcagaattgggatcctcgcttggaaccagaccttattgtatacaatgcagttttgaatgcttgtgtgcaacaaaagcaatgggaaggggcattttgggtactgcaacagttgaaagagaagaacatttgtccaacaaattcaacatatggtcttgttatggaggtaatgcttgtctgtggaaagtacaatttggtttatgagttcttcaataaggtggataaatcatcaatacctggtgctctgaactataaagttcttgtaaatgcactttggagagaaggaaagattgatgaagcagtgatggctgtgaaggatatggaaagtcgtggaattgttggttctgctagtctgtattatgacctagctcgatgcctttgcagtggtggacggtgcaaagaagcacttctccaggttgaaaagatatgcaaggttgccaacaaaccgctggttgttacctacacaggactcattcagacttgcatagacaatggtggcatggaagatgctaaatacatattcaaccacatgtgcaactactgttcacctaattctgttacttgcaacatcatgatgaagtcatatattaaacatggaatgcttgaagacgcgaaagacctgctccatgatattctgaattgcaggataaggagtaaagcggattctaatcaagtggcaaccgctgacaagtttactttcaatactttcatggaggcctgtgctgcagcaaaaaggtggaatgacttcgagtatgcgtttcgtgagatgttattgaatgggtaccatttcgatgagcgaagacaccttcggatggtacttgacgcttttaggcatgggaaggaacagctgttggatgatctatggcactacctgtgccgtcacagccgtgtcccgccctcccctgtcataatggaaagattctgcctaaaactgatgcagggagatacactggcggcgatctcctgcgtcagcagcttccatgagggcaagatatgcaacgtctcctccatgtcatggctcaatctgctgagccgcaatgcagataggctgaaggaggagcatgttaccaagttagctcatgaactcaacagcctcattagcttgaggagttcctctgatagcattagtcttagcctgtaccaaaaaattattagtagctgtacggcattcctctctggagccacagttgtagaaaaggcaccttctggccaataggtggtgttacagaaattataataaccacagttagtaaattctagtactccaaatcataattaccacgactgatggagtgtattgcattcaacgtttggttatcggtacaaagttagaaatggaaaattttcacgtaaggaattagttctttttttagtataatacaaaggctgatttgggagcataagcgataaagcttgctttgtttgattaattttatactggttactttcaaattcacaagtcataataccatgagcatcatttattga

SEQ ID NO: 27085 - DNA, 2399 bp, Zea Mays
ctccactactgccttcgatcgtccctccgcccccatgcatgaagcttgtgcgcctttgactgaagccatcaaccctagtaacgccatgtgccgcttgctctgcctccgatccaacccaacccaaggcagcagcagcagcgggtacgttcttctcggccatgcatggaatggaacgaagaccgcccaccgccggcgccgcctagatctctgcatccggtggccgccattggcggttcttggctccgattcggtgctgcctggtgacgagtaaaagcgaaggaaaaaaaaagaaggaagggacggcgattcaggcctcactcttggcctgtgagcctgtcgtcgacatgaagtacatgaagcttggatccaagccggacgcctttcagacggaggggaacagtatcaggtctgttgcaactgagctggcagtggatattgtcgtcactgtaggggatgtcaagttctaccttcacaagttccctcttctgtccaagagctcccgcctacaaacgctggtggcctcgacaagcgaggagggcagcgacgaggtggacatctccgacatcccgggcggcccggcggcgttcgaggtctgtgccaagttctgctacggcatggtggtgacgctcaacgcctacaacgtgctggccgcccggtgcgcggcggagtacctggagatgtcggagacggtggagaaggggaacctggtgtacaagatcgacgtgttcctgtcggccagcatcttccgggcctggaaggactccatcatcgtgctgcagtcgacgaggccgctgcagcggtggacggacagcctcaaggtggtcaaccactgcgtcgacgccatcgcctcccgggcgtccacggacccgtcggaggtcgactggtcgtacacgtacagccggaggaagctcccgtcggagaccgacggcgacgcgcgcggctggaacggcgtcaggaagcggcaggcggtgccgagggactggtgggtggaggatctctgcgacctcgaggtgtgcctgtacaggaaggtgatcctggcgatcaaggccaaggggaggacgggcggcgccgtcgtcggcgaggcgctgcgggcctacgcgtgccgccggctgttcgggtccctggaccacgccgtcagcgacgggctcgattgcaccaagcaccgcgcggctcttgaagccgtcgccgacctgctgccggccgagaaggggtcggtctcctgtggcctccttctcaagctgctcagggcctcgtgcctactggagtccggtcaggcctaccgcggcgagctgatcaggaggatcggcgcgcagctggaacgggcttcggtcccggaccttctgatacctgcggactccggcgacggcgacggcgacgcgacgtacaatgttggcatggtggctgcgatgctggaggagttcttgctgcatcacaaggtaaatggggccgaggcggagaagcgggaagatggcgaggacgacgtggatgttgccgctgacgacccggtcacttcttcgaagctggccgctgtcgcaaagctggtcgatggatacctctccgagatcgccaaggacccgtgccttcctctggagacgttcgtcgccctcgccgaatcgatgccgcccctgtctcgcccggtgcacgacgcgctctaccgcgccatcgacgtttacctcaaggagcatccgggcttgtcgaagggcgagaagaagcggctgtgcgcgctgatggactgcaggaagctgacggcggacgcgagcgagcacgccgtgcagaacgagcggctgcccctgcgcgtggtggtacaggtcctcttcttcgagcaggtccggcagtcggcggcggcggcggcagcctccgccgcccccgcgcgctcgctcatcctgcccagggacgacggcgcgtcgtacggcagctcgaggtcggcgaccacgacggcgacggaggacgagcagtggggcagcggcgccgtggtgggcgcgcctgtgacgacgtcgacgtcgggcggcgccggcgacgccggctcgctccggtccatgagccagctgtcggccaacgagaacgggagaagcggcggcggcggcgacaggaagaaggccaagggcggtgcggtggcgccggcgccggtgaagagagtgctggggaagctgtggtccggcaaggcgagcagcggcgggtccgacgacacgtcggccagccccgttgggtccctcaacctggaggagaccaagtcaatgtcgtcacagatcacgaggcattctgtgtcatagttactatattactgtatatgttctctttttttttgggtgatggttttgttggattggatttgacttacataattatggagggtgtttggtaattggtacatgtggtaatggagaatttctcgtcacgaa

SEQ ID NO: 27086 - DNA, 2874 bp, Zea Mays
cccatccctccctgatctctcccatccccttctcctgggctggctggccagtgacggaccagccctctcccacctcgcacgcccctgtggctcctgaccttcccaccaccggagttaatgccgcctggcctggccgtctcgctggcgcggcgtgggacgtggtagcagtaccgcgcgtcgcggttgggccaatgggacgggcgtaagtgcgtaagcgaggacgcgaggtgagcggcgtgcgtgttccttgcctagattggcgtgatccagctctgctccaaccgtagaagtgcgcgcacttgctgctagctaagaagcatctgcagtgatcgttccaggctcgtgaggaaactcatttgctcgaatcatgtccgactttgtcgggagcagatataccaagcaagaagatttccatgttttgttgagcaagaaagatcctggagaaccacctgaacataagcacgtcctgtggatggcacactggaccaaagcaagcagcaacaatggcagcagcaatcctttggagggtaccaccaagggcactactacgaaagatagcgagaccttgccttatgaattcacggaatctacggttgctaaaaggctcatggtaggagtaagccatggaagcgcctccatgcagcatgaccgacaattcaattctagtgtgtggggtatggcacgccatatttccaacgaattgggaccgaagaatagtgaacatgttgatgggtcttttgaaaaatttgtgaagaaggatgctgtgaacttgagagcaagggcagttgtgtcagaaacatactctgttcacaagctttcagagttaccgttggattttcagcaccttgggaactccgacgatccaagtccagattggagccactttccaatgttcgaaattaatcgaaagattgacagtattctcaaccgcaaacgaaggtctgcacctctgaatctaaatgcgtctgcatcccatgtattggccctatcgtcacaagaatacatgatgcactcacatcaaatagctgacgagaacttggatatgtgcagacctgcagaaggctttgcatctcacttagaagatcctgctggcctcaattcagatccttcagggccaaagttaaaaggacagttattggataccgtgtcatgttcttgcagcaaggacgacaccaattcagcagattgtctaatagacgagcagcatacaagccactattttgcaaactcaaagcatgaactgccctctgtatctaacgaaaagaagttcaagtttgcaggaaacaaccacaatcgaattcttgcaagtgcgtcccataaacatgaaagtgttgcagaggcaatgttctgtgcaccagtacttggtagtgagcttcagaatgaacctataactatttccaacatcggcaagaaggatggtgaaaacttccatgagatgtataattgtaatagcaaggctgttccttgttctttgttagctcatgagcaccatcgtcatctgaaaacacagagaacggaatctgcaggaaatttgaaagtctgcacgttacctgatcaacaaactgcaaatgaattggcagacaagagtaatggtgacctgctgacatatggaccaaagccaaagaagggctcttgcaaccgaagaagcctctatttattcgaaaagttaacgattccttccaaatcacaaagtgcatatcctaaaaattctgcgtcttcaggaaaatctagcggctttggagtttgtatgtacggcaccaatattggaagccagttattcggagcacagaatcaatcttcatctaagactgaaacattgcacagcgatgctcttattgggtccaaatcctcagcaggcattgcttcattatcggcacaaaaggacaacggttgcccagccccagccccagccccagccccagacgaagcgaaaagcgagcagctagcagctccgtcgtccaacaccaagcagggaggagaatcagcatacagtaaagaagatggatctcataatctcaacgaaggccacgatgtttcgtccaaagcagctatcggtagcaagcaaccatgcatgcctggagcaggaatcacgaacctggatctcatactctcccagatgagcaggatgagaaaccagattcccagtggcggtgtaactcagccaccaataggcgccgagccaagtgatagatggctcaagcgcctgcagctcggcgtaccagaccctgacgtccttggttccaagaccaagaggccaaaagtcggagacagtcctccgccacccaggcaaataaaccggtcctttgacgtggcactcccttgcaacccaggaaaacaggaggagcagagcttgaatggaggggggaaagtgcagggaagagcccccccgattccagagaagagcgtcaatcgctggatagggagatggtgccagggcggcactcctgttttccgtgaaggcccaggccagggaaggcaggcaacgaaacctgctggccggttgtccgaggagcttgaaggacagttctttccaagcactgcggcgatggcgatgatggggcgcgcgatgcacaagctccggccgtgcgagcagcagcagaaggggccattcgtggtgtggaagatagattgacctttttgggtgtgatatacttgtttctttaaaaaaaataaaatgtaaggcaactatgcattttgcctggctgtggctcatggtttattgctttctggtagtggaagtagctaggtgtagtgcctactgattgtgtaatgctttgctgtaccaaaagtgtaatactatactgtttactgtgtcgttcgttatggtgatgtacaccatggagtaatcgaatgggacagacgaatgaactggaa

SEQ ID NO: 27087 - DNA, 1445 bp, Zea Mays
atctccagcggaaccgcatgccccaaaagcgaagccaaccagcacaaaaaggagcacaaagctctctctccctcccccctctctctctctctctcctgttccccgcgagagtcgctcagggccgcgacgaggagaagcggcagcgcgtcacctctccaatggcatccccgtccctcctccgtgcaacctgcaccctcatgaggactagttcactccctgctgtcattgaggcttctggcaatgatgactggaagaaacgaaaggaagcacagagcctgaagaggctcgaggttaagaagaagaggattgagaggaggaactctctcgcctgcaacacttcaaaagaagctgctgggcagagtccaaaagagatgaatgcaaacactgacaaattagtaagttctgatgaaactattgtcagcgctaacgaaagtcatagcagtggcaagcatctggtgaaggggcttccaccaaagtaccaggccacaattacatcagaagacagttcgtcagcaatgcgaaagaagccaaactcggccttcaaagccatcactgaggagcagaactcatcatcgtctgttccttcctccggtgaagctataagtagcgtgacggcaccaagtctgcctctgttgtctttggtccccataacagcaacccttggttccagggaagaccaaagcattttaggcagggctggtgcaagggcaaacggcatgggggacgtggaaaggaggatgatgcaggagatgccgggcgtgttcaccaagggcctgtccaacggcagcagggtcgaaggcttcctgtacaaatacagcaaaggagaagtgaggatcgtatgcatctgccatggaagcttccttactccttcggagtttgtggagcacgccggcgccggcaaggtagataacccgctgcgacacattgtcgtcagcgctaccccgaacctgtgactgtgaggccaggcagacccgtgcacaagctatagtgttctgtagactcaggacctgagcctagcgtcagagcaatgtcaccgttagactgtgtggtgcggtgcttatgcccgattaaattggtgggcattgtggtaacataacctgttgataatgttttgacaatgttttgatccttcctatgcgtgatttagttctgcagcttcttcttctttttttcttttgtgttcctatcgtggtttcatacctgggcaagtagatttgtaggttagtgaggggcttgcggtgccactgtcccaatggccttgctctgggtgagctcgaagagaagttttttagactcatttgggcaagttttctacgtccaatatggtactgaagtttttgttgctggtttcgggtgttacaaagcagagtctgaactcttcgtgcttatgtgagatgaatacagactaagcatgcttgtgtttttataggaggccacctgtattc

SEQ ID NO: 27088 - DNA, 607 bp, Zea Mays
aagggccaacatcttagcccatttgattgactccaaaagtaaaaaaaaaacaattcacacagttttgtatccattttctatttttctcctctcgagtagcgtggcgggcgtggacgcggcggcgatgctgcggtcggcgctgcggcggggaggggcgtccgcgaggcaggtcgcgttggcgggagaagcctcgccgagagacctcctccggatgcgcgtggcggagcgggagcgcgcgaggcggcggcgtcgcgacccgggccgcgacgagttcttcgtgcccacgccagagtcgctggcgtggctcgactcggtctccctccccatggtgctcaccgccgccgccgtggccctcttcaccaagctcctcatgatggaacatgaagctacagatcaagaaaggagagagcgcaagataaagaatagccaccctgatcaaggaacagtaaggatgctatctcgtgaagaatgggaggaggtccaagaagtcaggccaaggaccccttttgaatcaaagttagctcgtccacatgcccggataagaacgggggagccagtgcgactgcttgttgctctagtacttcccacatctggatttagatatttc

SEQ ID NO: 27089 - DNA, 232 bp, Zea Mays
cttaccatgagtaaactcgacgcggtgtccgcgaacacgacgatggtttgggttcggtctttctatttgacacttagcaaacatcacacgccttgcttctcttcacaaacatgaaattcctctcctcgcaaagcacacatatacatataaatgtaatcaacaactaaccatctaggccaagtgaaaactaaattgaatatataaagaaaaggatccctcacttgcaacgcac

SEQ ID NO: 27090 - DNA, 5675 bp, Zea Mays
cgaggatcgaaactaacctttccaatctattcggcaggatctgctttgcgacgctgtcaaaggaactcgctcgaccaccgaaccccccttgccctagcgctccccgcctccgcctctcgccgccggcgagatgatccctgtcagcgccgatatccctgtggagctgcgcttccttctcgaatgcgccaccggctccaacttcgactccattcggctcgagctctgccagttagttgacagtggcttggatggatgcattttggtgctccgagtatgtctgaatcaaatgttgctaaatgctggggaggtcaagaacctccagttgcaacaaaagcttctatctgatgttttcagatattgtttacataagacctgcttcacaactagtttttgtgaggcgctggcaacgatagccttgacggatgattttcttgaaagcttgacaaatctgctggagctctcagttgctgagaaaattggtgttggacttgcgctgtcagattctgaggactcagagatgaagcaaaaagggcaatggttttcaattgctcaaattgaaaagctgtgtacgagtcatatccaatctctatcaaatggtcaaattcatgaaattgtcatgtttctgcatcagtctgatggcctgtcaaagcatatggacacttttaataatattatatctctactaaaagtcacggagaggccattttttgtacctgttacgaatggagattttgatagccaagcaaatccttcaagacatttggagatgtactttggtagcacaaatgatgattttgagtcacttctgtctgaaattgggaaagagataagcatggctgacattgtagccgagttaggttacggatttactgttgacagcactcactgtaaggaaatactttccattgtggagcctcttgatgatatcgccatatctaagttgcttggggctgttgtcggcactcatattggtcttggagaggcccataacacatatgcaacatttgtatctgctattcgtaatagccacacgaatgactcacctcagccgactaaatggaacacagatgtccttgtggactcaatcaatgaacttgccccaagtacaaactgggtgcgtgtaattgaatatcttgatcatgagggtttcaatatacctgatgaagcgagcttttatctattgatgtctatatacgagtgtgcttgcaaggatccatttccacttcatgctgtttgtgggtcattgtgggaaaacacagaaggccagatatcgttcttaaagcatgcagtttgtgctccatctgataaatttacatttgcacattcttctagacacctggcatttcaggacttggcaggccctagtcaaggcaatcatgcttggttctgccttgaccttctagaagttttatgccaactagctgaagttgggtacactgcatctgtacgatcaatgcttgagtatccactgggacattgccctgagctcttacttgttggtgttagccatatcagtaccgtgtataatcttctccaaaatgaagtactgtcctgcgtatttcctgctttactgaaggatccaacaaagcgcaatgtagtgaattatctctggcatacaaactcatatctcacacttcaaggttttgttgatgctcataatgatccagattgtttgctaagaattgttgatgtttgtcatgacttgaagattctgtcgactgtccttgattctactccatttgcattttccattaaattggctgctgcttccttgaggaaagactatagtaatcttgagaaatggctgactgaaaagctatctctttatggaaaaggttttgttgaggaatgtgtgaattttctgaaagcaactatgagcaacacagattacgtcttagagggcacgacacaacctcaatctattgtcagaaacatatattgggagtcttcttatgccttcataaaggtctacatggttctccagtctcactcggggcagctcttgtcagatgcaatattggatgaaataaggaaactgtgtgtttcgtttgaatcgaggaatcctagctctgctgtaagagagcttgctaattcagacggagggtcagatgacattgaagtagaggctaatgcatattttcaacacatgttctctggacagataagtgttgattccatgatacaaatgcttgggcgcttcaaagaatctacagataagagggaggtatcaattttcaactgtatgatctcaaatctttttaaagaatatacattcttccccaagtatcctgataagcagcttaagatagcagctgttctgtttggatctcttattaaacatcaacttgtggctcactccgaacttggaattgctctgcgtggtgttcgtgatgccttacgcaaacctgttgattcaaagatgtttatgtttggtacatcagcactggaacagtttatggaccgtgtcatagagtggccacgatactgtaattacatattgcagatctcacatcttcgtggaacacatttagaaatggtttctgttattgagagagccctagccaaaatctcctcaagtcaaaatgagccaaatgttggcaacctgctttctgcagagcagcatgtttctggttcatcatccatggaaggcatagaggcatctgaatcatcatggttgatgggtaccatcccaagtcaactaggaaggcctctttcttctcctttgcaacataggcagcagggtcttctctcggagaggtctgaggtttctatgaattcactgaataagagcaatttatccagtcagcctccccttgcttcatcgtctgctgatttgactattaattcaaagacaactgctccaccctctttactagcttcacctcatcagtctatcagtgtgtcaacgagtgtgcatgttggatttctgcgttctcgaagtaccccaggattaccgaggcagccttcatatactactggatttgggactgctttgaatatagagacgcttgttgcagcagcggaacaaagagatataccaattgagacacctccacctgaagttcaggacaagattctttttatgatcaacaatatatccatctcaaacatggaagctaaggcaaaggaatttaatgaggtcatacaggaacaacattatccttggtttgcacaatacatggtcatgaaaagggcaagcattgaaccaaatttccatgatctgtatttgaagttctttgataaattaaactcaaaatccttgaacaaggaaatgctgaaggctacgtatgagaactgcaaggtcttgttaagatcagaccttatcaaatctagttctgaggagcgttccttgctaaaaaacttaggcagctggttgggcaagttcaccattggtaggaaccaggcactaagggctaaggagattgacccaaaatctcttattgtggaggcgtacgagaaaggattgatgattgcggtcataccattcacttcaaagattcttgaaccttgccagtcaagtatcgcatatcgtcctccaaatccctggaccattggaattctaagtctacttgctgaaatttataatcttccaaacctgaagatgaatctgaaatttgatatcgaggttctgtttaagaatcttacagttgacatgaaggatgtgaaaccaacttccctgcttaaagatcgtctgcgcgaggtcgaaggaaatccggatttttcaaataaagatgttactacctctcaaacccctgtggttccagaagttcttccagggactattccttcatcaactcatgttgaactgcagcctgagatcaatattacatcccgagctatgagtcttccaaatatactcaatcagtatgtggctcctgtccgtctacccacaaacagcacggtagaagctgacaaagttgctctgatgatgcctgagcaagtgtcctccttgacccaggttttgccagcacaaacacaatcaccatcaccatctccattctctgttaatcagcttatggcagctattccacgtgatgagatatgcttcaaaataaacccaaagcttggctcaattggtccacaattgcagtatagcaaaattatggatttggctttggataaggctaacagggagataatactccctgttattcaaagaagtgtgacaatagcaagccgaactacaaaagaacttatcctgaaggattatgcactggagtctgataacaatatgataactcgatctgcacatttgatggttggaacattagccggaagtcttgcccatgttacttgcaaggaacctcttcgtgtcgcactatattccaatcttcggaatctcattcaaaaccttatgagtggcagtgaaactatcgagcaaattattcacatgctagtcaacgataatctggatcttggctgtgccatcattgaggctgtggcaacacgtcaggctgttgaattgattgatgcagaaatagcccagtcattttcacaacaaaggaaacaaagagagggcggtggtcctacatatcatgaaacttttgcttatgctcaagggccgtttgctcgtgtacctgaagcattaagttctaagcctgggcatttatctgcttcccaacagagagtgtacgaggactttgttcatgtatggcatccccacaatcaaaatgtgggagctacaggttctggtctgtctggtgttgctactgtctcgagtactcttggtgtacttcgagcttacagtccaaattcgacatcagcatcctccagtaatttgtcaactgtccatatgggtggactaacatgtataactcagccgacagaactggggtctgaggatactgttatcgcacaatttttgagtaatcctgcccaagttggaccaagcgagtctcctgtcctatttagtggaacagttggtgctgcatctacattttctccattggcatctaatgaccttcctgaaataagtgctatggtgccccctccatcaacatctgctgatcgtctgggatctattttacctgaacctttgaatactggggatgctttggagagatacaaacaggttgctcagaagctggaagccttgattgctaatgatggtaaacatgtggaaattcagtctgttattgcagaagttcctgatatgttacgccggtgtgttagccgtgatgaggctgcattagtagtagcgcaaaaggttttcaaaagtttgtacgataatgcatcaaatagtgcttatgtctcctggcttctagcaaccttaattgcaatacgagatgtctgcaagcttgttgtcaaagagttaacaagtaatatattcagatgaagagaagaagtttaacattgaaatcatttttggccttattcattccaagttgctgaatcttggggagtacaacgttcatttgacaaagctaattgatgggggaagaaataaggttgcaacggagtttgcaatgtctcttgtccaaacattgattacacaagatcctgttagcatatcagagcttcacaatgttgttgatgcaatatcgaaacttgcatggggaccaggttcacctgaatcgttgcaacaattgattgggatcgcaaggaataatgttctagctgcccaggtaaacaaagaggaaagcattgctaatgaaactacactaattgatccaaat

SEQ ID NO: 27091 - DNA, 480 bp, Zea Mays
atggtggtggtggtggcaggcccatcacaaacggccaaaatctccgtttctccagagccaggctccactcgctccctgtcctcgcagctcagagcacgcgcaggccccttccctgtgtcctggcgtggagctcgcgcagccgcctcgcctcgcctggagctcgcgcagccgcctcgcctggatctcgcgctagggttggagccagggtcctcacagccgcctctatcctcgcctggagctcgcgctagggttcctctcgcagccgccgctgttgaggtgctacttgcaaaagcgtgtactgaacagctcaaaaggccctgttgtacgtgcactgcgtgctcagactgataagagagagtatgcaatagagatgaagaacagtgtggaaaggtccatatggtaaaggaaatcagtggcgaagtctatctttttctcctcctgccgtacgtccgttccagcttgcaaagcgctcgcgagctg

SEQ ID NO: 27092 - DNA, 1382 bp, Zea Mays
ctaataaaccctgcacctccatcgcaccctctccgccgccaagaccatcctcgcatccgggttgccagctctccttgagcccagaagcacaccgcgcgccatgcgaccaccgagagggcgaggcggtggtggccggttcggcggaggaggaggccggggccgcggcgggggccgattcagcggtggtggccgaggtggcggcgggggccgcttcggcggcgggttccgcgacgagggcccgcccgcggaggtcgtcgaggtttcgacgttcctgcacgcgtgcgagggggaggcggtgacgaagctcaccaacgagaaggtgccctacttcaacgcgcccatctatctgcagaacaagacccagatcggcaaggttgaagagatcttcggccccatcaacgaatccgtgagcacctcctcgcctccctaatctaaaaaaaactactcttttttacgtcctcgtgggtactcgaggttgtggtgcatttctaatgtggtaagagcaataatattggcgtagcttgttgaaggtgttttgcttagagacggtgaggatttggtgcgcgattttgcatatttgtagtcttgtagtgaggtccttgttgtaatagcagtgcaccaagattttgggatatgttgccacatttgtactgtaaaacgacgacacggagcatgatattctgatgtgtcatttagtaaggcaactcttgttgagggaactttggaatttctgctttagctatgctactaatgttatcgtgaatatgatctttttttgtatgtgtagtatttctctgtgaagatgatggaggggatcattgcaacatcgtacaatgaaggcgacaagttctatatcgacccaatgaaattgctgccgctctcacgcttcctgccacaaccaaagggaaatctcaaggagcacctagaggtggtgggcgtgggggaggaaggggttttgggcgaggccgtggtggtggttctttccgcggtggaagaggaccaccaagggggggtggtcgaggtccaaggggtggaagccgtggcggttttatagggcgaggaaggttctaggtgcagtttgagtttgatgatgttttccccttgaagcatcatagctgcacaattggaaacttccatgttattgtaaccagatatgtttaaggtagcagagcactttatctgtggaacttggattctcaactgaaacaaacggtttgtacctgttccgttcccaatggccattatgtgcttccttgttctgaattcaacttgtactgatcatgggcatgcagttacagtccttggtttatgagggcgcgggggagtacattttgccatccttgtgttggttctgtgttggctgtctcgattttaaattcact

SEQ ID NO: 27093 - DNA, 4361 bp, Zea Mays
tccagccagcccctccacgcccggccacaggcgtggatgtacggatgtctcccctgggatgccccaccccgcccccgcgatcctcctccgtctccgttccggccctccgcctccccgccccgtccgtcaaatgattcccaggccctttttccggtaaaaccaccgcaccgaaagggcagcagctcagacgcgcctcgatgcctcgtgctccataaccaacgcccacagcccagccattagccgtgctagtcatcagtaggcgcgcacactcgctcgctcgcagcgcttcgctcgttgccagttgccaccgccattttcccctcgtcggactgaaagagcgctcccccccacccccaccgcggcgggagtgggaaagagcggaggagcatgcgggagggttttcaccgcggcccgagaaaggaggacctgcgccgcgcgcatcgcgacgagccgctccccgctggcacgcacgccaaaaggcgaagaatctctcggctgagcccccccgtcccctccgccaccgccgttgtagccagtaggaggtagctaccccagatctgctcgtctccgcgcccgcccgccagattcgccccaccctccgccatgcggttgccgccgccgccgctctgactgggctctcttctgctgtgagagggaggaataaaaagcggttttctttcgggcggcaggccggtcggtcgccatggggtgcggccagtccaagatggaggaagagtacgcggtgcgccactgccgggtgcgctccgagctcctcgcgctggccatccgccagcgctacacgctcgccgacgcgcaccacgcctacgccgagtcgctgcgcgccgtcggcgccctgctgcacgacttcctccgcggggtccagtcgctgccgccgccgccgcccgagcccgcgctccgcctcccgcagcagcggaagggcgacggcctccctgccgcgtcgccgccgcccgcgatggcgtcctcctccgccgccgccgccgcgccgcccgtcgccaagcaggtccgcatcgcccccgacgacgggcatatccagttctccgacggcgactccgattccgaggatgggcacatcaagttccactccgacgaagagcccgacccggctcgccgccgcccggaggtcgtccgctccaccggcgcgccgggtcctccgccaccgcagatgggacagccgtatgcctccggcggagggtatgctccgccgccgtatggtcctggatacggttacgggtacgccactgggcctggtccgggtcctggtcctgattatggcggtattggcatgaacggcggcggtggttatgaaccaggccatggtgtcatccagccacctccaccatctgtctcgcacgagcaacgcctggaggcgactaatgccagggtccactactattccggcaatggcgagcagcagccacccccgcgtggctatggtggtgggtactcctacccaccacagagttcaagatcatataatcagtatgcctatggtggttactatggaggtggttctgctcctgcaccaccagcagacatcccatcctcctccggtgagccagcagcagtgccaccgcctccatctccgcccagggtgtccacctgggagttcctggacccgtttggaacttatgagagctactacgagcaaccaactgctacagcagctccatactctcctggcaggagtttgaaggatgtgcgcgaggaggaggggattccagacttggaggacgaagacatggaggtagtcaaggaagcttatggtgatgagaagcaccctgtgaagggttacatggggaacgggaaggccgcaaagggagagggtaggagcagcacgggggatgaattgccccgcaagtccaagtcatctgaggccagtggtagtggtagcagcttggagcatgacgttcatgtagtggaaaaaagtgttgtcggagaacaagttcgacactcggagccacggcagcatgttgccggtctaccacccacaggatcggaaaagctatacattgatgacactgaggtggtggtggagatcaggactcaattcgagcgtgcctcacaatcagctggtgaggtatcaaagatgcttgaggtcggaaagatgccttactaccagaagggttcaggtttcaaaggaggagtttctgcgttttgaagaggacaaggcgatgggctctggcaacctctcctctacactacagaaattgtacatgtgggagaagaagcttcttgaggaagttaagacagaggagacaatgcgggtactgtatgacagaaaacgtgaggagctgaaaatgttagatgagaaaggtgccgaagctcataagcttgaggccactgaagtttacatcaggaagctatcaactaagattagcatagctatccaggttgtaaacactatttcagaaaagattagtaagttgagggatgaagagttgtggcctcaaacatgtgagctcattcaagggttgatgaggatgtggagcgttatgctagaatgccatcagatacaactgcatgccatatcccaagctaaaaacatagactccatgatagacactgcaaagttcggtgacgctcatatggacttgatcaagcggttagagcttcagctattggattggattgcttgttttgttgcatgggttagcgctcaaaagaattatgttaaaaccttaaaccggtggctgacaaatggtgttatctatgttcccgaggaaaccgaggacggggcgcctccattttctcctggaagattaggagggccaccgatcttcgtcatatgtaataactgggctgccagtgtggacaggatatctgagaaagaagtagttgaggcgatgcaggcctttgcatccaacgttctgaacctctgggagaggcacaggtcagagcaaagacagggtctgatggcgaacaaaggcatggacagggatcttagggtgatggaaagagatgagcagtcgatgcgcaaggccctggaagcgcagaacaagaagctcgtgctcgtttcgagtcagggcagcgtgtccttgtccgcgcaagcgttacatgagcagcgaggccctggcgctgaggttggcagtttgcaatcaggcctgagaaatatcttcgaagcgatggagaacttcacttctgcatccgcgaatacatacagggagctccatcttcgcgccgaagaagagaaagcccgagttgcgcaggagagcggcggcagtgttccctaactcctttcaacgcttaggttttacacgaggacatgagcgtctgtcaatgcaaagggaccgccaccagtgacccccctgcggcacagtgacactacaacccttgtggcagctgatgcaccttgctcgccaggtgccccaagtttcgggtttcgggtttcaggctctggtgtggagttaacaggttgcaacacgggttttgttttactaatctgtacatgagttgggctacgtgatgcattctttgatctggatggccagcagttctcctcaaaccggaactgtgaagcacggttatggaaataggtatatcaccaggcatgttctggtagttgtgagacccctggagcgactgagtgaagaagaggcaggcccttgtgcatctgggaagctgaattatgacctctagttggctgtgcaaccccagaagataattggaaggaagatgtaagccgcacgatcttggttcagatcaaagggtggggcatataagatcctgttgtcatgaaatccaagatccatggaacgctgctctccaccccatgtcactatgccagcgctcaaccgtacatacaagaggccaggctatcagaaggtgttccgtaatcgcagcactttggcatgtcattgtacatttgtacagagaggtgatgcgggatgaatcgagctggagcctcttgtccgctgccgagcgcccgagacatatgtttgcttagagtttcctctgctgcgtctggactctacttcgccgtgcaaccgagctggaagtactcttacagggtagacgacgccctgacccgttctgcagatcagctaaccgctccggccctcaacctttttttttgtttattatatatacatattattaattcatttgtagcaccccgtgtacagctgccggcgaacttaaacctgctgcgccatattttattcatttttttcaccacgggtttgccgtgcttgtgaattgctgaatgctctgagcccacctgttgtgatggtctgatggataggtgtaacggtggttagcagtacagcatcgcgatggtgagtttagttacgggctgatctcgccataccaattggataatttcaagcatcggaaaacggcga

SEQ ID NO: 27094 - DNA, 847 bp, Zea Mays
cggcggcggcggcgccggaacgacgcccgccgccgcgccggcctgcgtcgcggacgacggcggcgcctgtgggtgtggggcgaacttgagcgcgcggagctcctgcagctcccgctgcagccgccggttctcctccgtcagcgactcgcagcagcgcttcagcagctcgcagtccacctccgtctgcttcagcttcgtccttgctcgcctgttttggaaccacacctccacctgccgtggcctcagcttcagttgcttcgccaacgcgactttctgcttcatatactgtacaatatatatgtgtgtggctgtagtaataatcagccatgtacgcagccagtgtcgactagtaattcatcgaggtgtagtactaggcaaggcaagtgcagccggagccgcagccgttttgtggtgctggttcagggtgctgtgctccttgaagcggtcctccaggagcgcggactgctccttggtcagcctcagcttcttccgcgtgctcccgtcgtcgtcgtcgtcctcggcgccggcgcaggcccgcggcaacgcggccgtagacgacgcccgctctccctcggcgtcatccacgcgctccctcttcacgcccgccactgacagcgacgacacgctgtgcgcggccccgcccccgccggacccggtcgcggtcgcttcgtccggcaagctcagcgtcagcgacggctccagcgggtgcggcgacggcagccgcacctccctgctcagccggcggctgataccaccgtggcgcgccgcaccagaggcgccgccgctgccgctgccgagggacaggcccagcgcgaggcctgcgtcgtccaggtgcacgtcctcctga

SEQ ID NO: 27095 - DNA, 2085 bp, Zea Mays
attgagcccaatgccatcaaagggtccgagcctccgagggaagaaaggtccacacaggacactcctccttcgtctttctccttcctcgccgctctctgctgcattcgcgaacacgcatcgaccctacgactacgagtagcgagagaggattgatggcggcgcagctgcggaggtgatccaagatctgtactacgccttgaggacaaagggaggtttgacccccaaggaggaggagacgctcctggcttgcaatttacttcctggtgtttatttcatcgtgggttcagtactgggcactttcgcgatgttgttgggttcccacaaaggactcaaattgcttgggcgtccacctaattctccattaagatctttgactgtttatggtaaatctcaaggatatttgacctggtggtgatccctgtacaataattcatgcaaaggcatatccaagctatgtttagatgagagacaaattaataatttctgcatcattaatagtgaatgtggctcttttgtattgatggcaggatgagtgagtcaacatgattaggaaatacctacaatgaaacctacacagttaacaatgatgataattattcacatatctaatttctatctaacattgtgctggtaggccccagatgaacagttagccataaacaatactgctatagtactattggaatgtaataccttttttataaacattcaatacttatacatcttaaaagaggaaacacaggtagtatgtagaatacaatgacattaaatgtatgttactgattcattatgtatgatagtttttatgttcaaagtaatttgttgccactatttgctcatgaagttataacagatccatgctgtagttgaaagcaaacagatagcttgttaggttaacagagcagtagatggaaccatttggcataaaatattggatgcatcgacccttcaacattgatacgttgctgaagaatattttttttcatcctttcattgcaaatgtgaatttattgaagctacttctcaggctacggttttattgtcggaaaggcctgtgctaatgaaacctggcatcaattgcctgaactgcttttagacagggaagaaggacgcatgaagacagagctagctaaaataatactcaataagcatagtgatgacatatacctggttgaagttgtgagaagacacttttttgtcgagcatctgttcgatgatctgcatcaaggtcaaccacttttcaggtggcgcctacgacatacgtatgttgacagcacctttgtagaaagaacgaaggaagttgaagccagcaactctgatgatgtggctagatcaatttcaagagagacaattacaaacactacaccatttggagaaatgatggaggattcactggcttgtatactgggttctcccggatgcaacatggaaagcaacaatcccccagaaaagacagctaatgtcctgacgcgaagtgatctgcgagctcgcagaagaggtcgcaggcatcatcggcatgctgatgactagtttcctattgtgaatgttgtgtagaagtgctgtggaataccctagaccattaccattttatttgggcctcatgccccacagttaatctgctgtgcctggtcaaaatttctaggctggacaagagctgcttttgtaagctgggcaatcctgtatcgtgatgtatcccatggcccctgcattcttcacaaagcaaccaataagacggtatagacaagcgaaacgacgctgggtggtgtgatgtttgcagttcgtggtccacaggctgccggagcatacagcagttcattttcaattcttattatcatatattatggaagaagaaatgaacatcttcaggattgaacagtgtcgcgaaattgtagatgatggttccacaatcccaatgggaccgacagacaaagagacatgctgcttcctgctgtgagttttgtattgcagacgacactgtttatgtggagtttgaattctgttgtgagttttgcacggtagacgacactgtttatgtggagcttgagatgtgagaaggatgagtaagctattagagatagtttaaca

SEQ ID NO: 27096 - DNA, 790 bp, Zea Mays
gaagaaaagcactagtagcagcagtgctcagaagtcagaaataaagcgagagtgttactgcacggaacattccacggttcaattggctctcaattttttgtcacctgagagtttgccagagtcagtccggctgtcccaagagatccgttgcctgccaaatggccatcttgcaaaactgaagatgcttgaggtaaaaaagatctccttatacgcagcaagttctgctgttagagaaattcagagaataacccttgatcccaagttcaatcttgatcctagttttgaggatcaaaatttgactagggcggtttcagagaacttggcaagagtaaacaaacggaaggtatcttgcagttgagattgtgggggcctggtgaaattatgacatgccattcagaggattgaagtagatatagtgcttgtacatgtattatattgtgtcatatgaaaggaacacattctaattcttattgggttacacattgactttacctgtatattgtgggttaggaagagtaacagttaagcttctgaggaacaagataaaaaggcgctggaaagctcatgtagaattgttagcacaataatctctgttggtagcatctgaagaataattaattagaccgaaattgttacattgtgaacacagggttcaagatttaaatactatattttcaccacggttttgcatttgtgtcaacctgcacgtagtaacgtctaaattactatagtgtttcaaaccaagtgccttttttatatatagcatgatttatctagaaaaatcaaaata

SEQ ID NO: 27097 - DNA, 3612 bp, Zea Mays
cgccgcgccgcaacccgcagcctccccgcatacgcccacagccgccccacgcgcgcatcccgcagccgcgcgatccgtccgcttcctcctccccgcgcccgcagcccccgccgccgatgccagccgccgcgcccgcgcaagggaagttgcttcccaaatcccgcagacaagatttaatcccgtgattcttcccatccatggcagccgtgcccgcaaaccgcgcctccccacgactcccacttccatggcgtcgcccccttccatccatggcagtcacgctccctctgcgcccttccatccatggctgcggctccctccgcgccgcaattcttcccatcctctccttccgcgcggtttgcggctaccaatcctctccctctgcgtcgtgttcttcccatcctctccctccgcgccggatctcgccccatgtccaccaacgccggtgtccgtgatggcgcgctcggggcagcggtggacgcagcctttgccaggcgtgtgctccaggccgaggccctcctcgggtacctctccgcgctggccaccagcccgcgtgccgagggcgacagggtggaccccgccgtcgccgcggcgcagctcggggcgctcggccggtggaagggctcggcgaggggccttcccgagtacacggtcgtccacggcatcgatggtgccgtcgtcgccgcccctgggagagccaaagccaagcagaggaggccgcagtcgaccggatttgggaatcctgctcctgccaaacgggatgaacggaaggaagcaaaatctttctggggttgatttggcttgaaggaagcgggatctttctggacaatggctgtctagcttcatccattctggtacagagggatggagtcttgtaagaaggtagctgcaagcttgaagtcgtgtgagccatgggggaacagggcatcctggacaaacgccgttgggccaggttggaagttgagctttgctgttgagccatggactaagggctttagcgcgtcgtgtgcggcgccatattctgctggagccacagagcatcaattatcgctcgatgagaaggtggataactccaccgttgcatctggttttgatgggtaaagttatctatcagctagattcatggcaggaaaggttttttctattgtcggtatccagcacctaagtaggcctaggatttttttcttctatctttaattagcaattgcctttttcagcaacccgttcttatgaatttcttttattgacaacatgaattagtctattttagttcatctctttcttgtcacaaatttaaatgaatataattgtttgtttcagtggcaattctgtgaagcccaaaggttccaagtcaccatgaaaaaattgaaatgacgagatctcttaatctaattgttgcaccttggaaggtctgaaccatcatagtttaattgtatcacccatttacacaagttcctaccatcagagttcaactgtatcacccatccataagcaattccttttgttgaaatttatgagaagacatatgcctctgttaagtctcaggaacttttttgctgggaagccaattccttactgatctgagggacaacatttttgtttgcctgatataaggtaaagtgtgaaagggaaacgcgaaaagaaacgtgtcctggtcccaagtcacctgccatactgaacacgattgatcgcagaaagaaacacgttctggtctagactgacagttttggagctggagccggccatgcgctcgatcagagttccgctgcagccacgacctctctcccgaacgcgcacgaggagaccaggtggaacatatgcaagcaggttctagagcaataaccccatgaatccagatcgggggtctgcatctacacgggcgtgtactccgcaccgctcccctccggccccgaccgccgtgtgctcgttgtagccggggtcgacctcaaccacgacgacgatgcggtctcctcgccccaggctcgacctcctcgctgacctcgccctgctccacctcaactcgcgatgaggattgtcggcacgttcacaccgcgccgttgcagaacgttggagcctctcagaactctagaagctgcctaccaccacgcaccctaagataggggcatatctgtgcatggtaccatcttcatcatgtagctgggatgagctggcaccatgaaagaattcaagtggttaaatcatgcatctgcagaaatattgtactctcaaatggtgggttgctgcgtcatgggagtttgggtgaaggcctgaaggatgtgatgcaaaacgtcgatgcaggtctgggatgtccgcctcattatggatcaaaattcatgacgttctaaaggtgtcggatgagtacctatatactccctcccagaaaacaaggcgcctcattacactattggaagctggacgacatggatgactctggcaagatgcggtgggagcacgacgacatggatgactccgaccatgagttcgacaggaagcctagcaacagtacgcagtagcaaggttgaccagaggggcagtggagactaacccaacaccccctcctccgaccgtcatagcgcttctttcctctggcttcatttcttacctatgtatggatggtcttcaccactggttacatctagcaagtcctcctagggtgacatgaaggagattgtcatgctgccaaagcacatcaaggacaatgcaaacaaggacagaggaagaccggacatgccatttccaggaaatggaggcagcatgctgctgacaagcgattacttagggagcagaagaatgctcttgctgttgcagcattgtgttctctatcacttggcccaccagttcataaaagtacaacggtgtctaagctagcagttgaagaactagatattggccacgcctttaaagaaagacaagcaagaaagcaaaggtcctggtcacggctaaatgtttcggagttgtctggtcccattctaaatgaaaataaccctgatgctagatgcctctgctggatgttgcttgtacttgttccaccgggtatggaatcccagaccaacagttttgtctcaaaatggttacttagaaagctcatgggttatggaaccggatatattggattggttgtttcttcagcaggcctatcaatttggacagagtggatcagttttccaaatgcatgttgtttgtctgttgttagggccagcgatcagcaagttattgataatgatatttggtcgtgttttggtcagtatgacatggcggcagtggtatccacaatgttgctcgtcaccggggtgactacattgctgcacatgtttgttggaacgagactatccacttgtgcagggtccatcctttttatacctggctcctgcccttgcgatcatcaactcacaagaattctttgggatcaatgataatgttgataaatccagtggcgatgagctccacctgctgctgcttataaggtaggtggagatggtcgagaaattgagacacatggttctgctgtcctgggtaacttctgcgacaagcgcattcgatggtacaaaagacataatggaagctcttagcaacaaacatactaatctagccaatgagcttgaggtaaatatcata

SEQ ID NO: 27098 - DNA, 766 bp, Zea Mays
atgaagcatgtagtagttgtttcaaaaaggatagtgacaactttgcaggatgttcagttaaattcagtagtcctcgttgttcacaaaactataaagtaccaagctccagtgtatgttgaacaaccaaggcaacagcaggtgccaccaccacagcgccaaccacgcagaccaccagcacaattccagcagctagagtacgaagattcttatgcacggggtcgaggaagagggcgtgggcgtggaaggggctggggtagaggtggctacggtggctatggtggatatggaaacaaccaaggtggctatcatcagggtggtgggtattatgacaatcaaggtggttataatggctatgataatcaaggtggatatagtggctatgataatcaaagtggatatggtggtggatatggctataaacaaggcagatatgggaactatcaagaaaatggtggatataaccgagacccaggaagtggtatgcgaggaagatgcaattggggttaccaaggagcgcgaaccccttggtggccgcctccagctgcgcgaatgtgaactctccagggggtccttgaacgatgacggtccgctccgcttccgcgtcatcacacgcgacagctgccaccggaataggatgcgcgcccgcgacccgtacggtttgtgacttcaaaaataacagcaagaagcctcgaagacattcttttggataaagttaggaaagtaccatgcatcccactttcagatggttcatttacctctatttcag

SEQ ID NO: 27099 - DNA, 232 bp, Zea Mays
tttatgtactccttgtctatttgtatgtattgctatgaatagcggtgaggtcacgagaatctgaagactaacttggtacctgggatctcaagtctaaggcaagttgtgcccttgatcacttttctttatctatacctaataaggttcctgttaatcactgtgacatgcttaggttaatttgatgggacctaatagtttccctagcattgttatcccccaccttgcaaacaga

SEQ ID NO: 27100 - DNA, 3996 bp, Zea Mays
cccgcagcagcccgttccaaaaataaaactgcagcccccctccagaatccaaacacaaaaggcacaaacgcgaaacgcccctcgccggtaaccttctacactcttgctgtgcggcagccgtcccataaccggagttcggaggcggtgtcgtgggttcgcggcgcctgggttcagggttttggccggcgcctctctcgccagcgagcacgggtcgggatggagtccttgtcgtcgggcggcgagctggcgcggcgccagagtagcggcggcggcagcagcggatggggtagcttcagtggcgacgccgacccgttcgatatccccgcgaagggtgcccctctcgagcggctcaggaagtggcggcaagcagcacttgtgctgaatgcatcaaggcgctttaggtacactcttgatttgaaaaaggaggaacaaaaggaggagatcaggagaaaaatccgtgcacaggcacatgttataagggccgcttttcgtttcaaagaggctggccgaatccatgtacagtccgaagaaacaaaagtaccatgtgctgatggtgcacttggcttcggaatcaaagaagaccagattacagcactgacaagggatcacaactactctggtctgcagcaatatggaggggtttctggtgtagcacatatgctaaaaaccgatacacagaaggggattagtggagatgactcagatttgctggcaaggaaaaatgcatttggatcaaacacatatcctcgtaagaaaggaagaagctttttggctttcgtatgggatgcttgtaaagacttgacgctaatcatcctcatggttgctgctgctgtttcactggccttgggcataacaacagagggcataaaagaaggctggtatgatggagcgagcattgcctttgctgttcttctagttgtatttgttacagctatcagtgactacaagcaatcactgcaattccaaaatcttaatgaagaaaaacagaacattcgtttggaggttgttagaggcggaaggcgaatcacggtatcaatatatgatttggttgtcggtgatgttgtccctctcaaaattggtgaccaggtccccacagatggtatccttatcagtggtcactccctttccatagatgaatcaagcatgactggagaaagtaaaattgtacacaaagatcagaaatcaccatttctaatgtcaggttgcaaagttgccgatggatatggaacaatgctggtaactgctgttggaattaacactgaatgggggttgctaatggcaagcatatctgaagattcgggtgaagagacaccacttcaggttcgtttgaatggtgtcgctacttttattggaatggttggactttctgttgcccttgcagttcttgttgtacttttggccaggtacttcactgggcatacttataatcctgatggatctgtgcaatatgtgaaagggaatatgggtgtaggccagacgattcgtggaatagttaaaatattcacagtggctgtcaccattgtggtcgtggctgttccagaaggacttccattagctgtcacacttacgcttgctttctcaatgcgcaaaatgatgaaagacaaggctctggtgaggaggctttctgcatgcgaaacgatgggttctgccacaacaatctgcagtgacaagactggcaccttgacgttaaatcagatgactgttgttgaggcatattttggtggaaagaagatggactcacctgataatgctcagatgttatctgctgatgtcacatcgctgattgttgaaggaattgcacagaacacttctggaagcatatttgagcccgagggtggtcaagaaccagaggtgactggatcacctacagaaaaggctatcctgtcttggggactaaagctgggtatgaaattcagtgaaacaagatcgaagtcatctattcttcatgtatttcctttcaactcagagaaaaagcgaggcggggttgcggtgtacctggctggctctgaggtccatatacactggaaaggagcagctgaaattattttggattcatgcacaagctgggttgacactggtggttcgaagcattcaatgactcctgaaaaagttgccgaattcaagaaattcattgaagatatggctgctgctagcctccgctgtgttgcgtttgcctatagaactcatgagatggatgatgttccagacgaagatcggagagaagagtggcaacttcctgaagataacctgattatgcttggaattgtgggaataaaggatccctgccgtccaggagttcgagattctgttcgtttatgtcaggcagctggcattaaggtgcgcatggttactggtgataatcttcaaactgcaagagccattgccctggagtgcgggatacttgatgatcccaatgtgtcagagcctgtcatcattgaagggaaaacattccgggcgctgtcagacttggaaagggaggatgctgctgaaaaaatctcagtgatggggaggtcttcaccaaatgataaacttttacttgttaaggcactgagggcaagaggtcacgttgttgctgttactggagatggcacaaatgatgccccagcactgcatgaggcagatattggtctatcaatggggattcagggaactgaagttgctaaggagagttctgatattattatcttggatgacaattttgcctcggtcgtgagggttgtcaggtggggccgatcggtgtatgcaaacatacaaaagtttatacagttccaactaacagtcaacgtcgcagctctgataatcaatgtagttgctgccgtcagttccggaaacgtgccattgaatgctgttcagttgttgtgggttaacctaattatggacactttgggtgcccttgcattggcgacagaaccacctacaaaccatcttatggagagacccccagtagggagaagggagccattggtaacaaatatcatgtggagaaacttgattatcatggctacgtttcaagtttcagtcctccttagtctcaacttcaaggggataagcctcctgcagttgaaaaatgatgatccagcacatgcagataaagtgaaaaataccttcatattcaacacatttgttctctgccaggtgttcaacgaattcaattcacgtaaaccagatgagctgaatatattcaagggcatttcagggaaccatctttttattggcatcatagtaataacagttatactccaggcgcttatcgttgagttcctcggcaagtttgcctcaacagttaggctaagttggcagctgtggttggtatcgataggtcttgctttcttcagctggccactggcattcgtgggaaagcttattcctattcctaaacgtccattaggagaattctttgcgtgctgctgtaactgtaaggggagcaaacaaggccctgatgacgcaacctctaatggtaaggaagacaacaagcttgagccatgagatatcgcaaggtttggtggctggcaacgatggccttctgctgtttcttgccagggtttgacgtgttggatttgtaattgcccctgattgcgattgtatatatatatacacacacgggttgctcctaggatctgttatacgggcaacatcaatttcataatcatagagattttcctcttagtcttcatttaccgagttcattgcgaatatgattaaacttgtcttgtctgaatctgaatctataacgagagttgggctatggtacccttctggagctgaccatgagtaggatgtcctgagatcttggacatcctgtgatgaaagtctgggaagattttagggccggttttaggttggcttcaaagcttgagctgacctcaattgtctattaaggagagtagcatttacgagtctagtgatgaatttatttggtctataaactggttagaagacaatctgtaatttgtagtctcctgacatccaatagaattcaggagtggtgtaccgact

SEQ ID NO: 27101 - DNA, 1329 bp, Zea Mays
aaataagtgtcatgtacaaaatattttgtaacaaagagcacgggtcacctcgccgggatcccacctcgccagtgccgcctcgccgctctcccacatcgtgtcctccgccccttcgcacggacgcacacgcacctcacctctcacaattccacacctcacctctccgcttcgcttcttgtcgctgcggcgcgcggccatggtctccctccgcttccctaccgctgccatcccccgcctcccgccatcccaggcccccaacggcgtcgccatcgctgccacggtcgccgctgcagccgcggccgcagctgcagtagcggccagcttgaccctcacgggcaagtccactggccggccagtcccgcaccctgcccctctctgggcctccctctccctggccgacgcggcggcccccagctccgtcgaaccccggaccggcgcgacattccccaccgaggccgccgttgggcgccgcctactcggcataggcctccggaagaccagcgtcctcgggctcaagtccatcgacgtctacgcattcggcgtgtatgcggatgacaacgatttgaaacagcagctgaaggagaagtactcgaagttctcggtctcggaactgaagggaaacggtgagctgatcaacgatgcgctagagcgtgacataccgatgacggtcaggctgcagattgtttatgggaggctgagtattcgctcggttcgcagcgcatttgagaagagtgtgggaagtaggcttcagaagttcggtggacaagacaccaaagagttgcttcagagttgaaggcgaggaagtggggagcattcagagcaagctcttgtgcaagtctctcttagatctctatatcggagatgacccctttgacgaaaatgcgaaagacgacatccatgaaaatatagctagcattcttaaaagttaaatgggatgcttaaggaaggttacatggaactgggagatttttcagggaagatatttttaattccagcaatacctcgactgtgcctagtaagtagcgcacaagtttttttcagtagcgcgtgaggaaaaggatagatccttccaagtacagccttttccaagtcgtgtgtgatgttgttccacgtcctccgtgaaagcggcaaactcctggccctcatatctcgttggttctgtcagcgtaagaaagaccagcaagctgttgcaatcgtccttcaggaactgtttctcatacggcaaactcaagacctgtcggtctcattgcagcccggagttggcaggcatgcacacaatggatgagagcgtgcatcactgtctccctctctttcccacaaatctcacag

SEQ ID NO: 27102 - DNA, 1269 bp, Zea Mays
gaaacagtttattcacatctggctcccattttcttatccttccatttaatggtatgaaagcaaacagatacatgtgcatcttgtctactttttgagttgtgcataattttctgatggacatcaatgcacatgtatatttgtatcaaatttgaacaaatgttaatttatttgaatttcttttttaccttgagaatatccctgagtcaatgttggatctattttttttctatccctgaatttgtataggaattgagcaagaaagtatactttacgaagcagactgttggtaatgcttgtggaacagttggtgttattcatgcaataggaaatgcaacatctcaaatcaagctagttgaggggtcctattttgagaagttctataagcaaacggctgatatggatccagctcagcgtgctgcctttctcgaggaagatgatgagatggaagatgcacattctgttgctgcatctgctggtgacactgatgctaatgttgatgttaatgaacattttgtatgtttctcctgtgttgatggtgaactttatgagcttgatggacgaaaatcacaacccacatcccatggcccttcatcacctgaaaccttgttgcaggatgctgcaaaagtcatcaaagctagaattgcagagaaccctaactcgatgaacttcaacgtcatggctctttcaaagaagtgaagtgtactgtgatggatggattttctttggcagaatacgggcctcttttcctttcgcttccgctgggctgcaccgagtggaaggtttgcatgggcaaacatagggggaaaaaactttatatgacctgagatgtttggttgatgactcgatgtattctcgtgccttcatggagagagaaatgactgttcacgatttcaactttttccggtgtattagtagtcgaatggagacttgcattggaagagtttcactttgctgtatctgaaccattctagcttcctcggcaggttgattccataaagctagcatttctatgttttccgtgcaaacgcatgtagttttctgtagaatgtaacttattaaacggaattggtgacacctggctaacgaatggaaacattatgtgggggattgcatacatttacaaagggtaacaagtaacaacagccaaaaacaccaggacttttttttgtggtcttattcgtatttgtattttctctctgtgttctgtattctatgaatctatgtataggtgctagagacatgaaaaacaaaatgccaacgaaaaaaaga

SEQ ID NO: 27103 - DNA, 2857 bp, Zea Mays
atgctgatgttctctacccactctggaagaattaaaatgtttcctgaaagaaataacaccagaggacaattgggctcctctcaagagaatgcccgcaagatctatccttaaaaggacaatcagtcaaaggaagatcaaaagtaatgctacattaagcaccatcaatgaagaaaacatagatgatgctgccaccatggattctgttgcatcaggaaagaggattataaactcgaagtttgcatcagagaactcactggaagttagtggtggaacagaaattactttggatgctttggctgcttacctaaaatatcttgaaggcacaggaaatgctagttggcaagagttgcatgataaagtgcgtttagctgaaaccagatatggtgcttcattctacatcttgtttggtcctgcaattcaacttggagtcatatctaggaggaaagcttacactgagactatccaatatgaaaaagatcgcaatgcaggttttctatcaccatttgggtactcaacacctacagtaacatcagcagtagatgctatatgttcaatggagtggtattggctcttggcatcaaaatcccaagtatgcatcgaggggaaatattctataagaatttggagatggaagggttatcttgtacagtacacctttcttggcaacgaaggtccacctgttcttcttgtgcatggttttggagctttcctggagcattttcgtgacaatatagacaagattgctgctacgggccaccgagtttgggcaattactcttgttggctttgggaaatcagagaaaccaaatgtcaactattcagaacttttctggtctgaactactgagggattttattgttgaaattgtgagggagcctgttcatcttcttggcaactctattggaggttatctctgtgctattgctgctggtttatggccttctcttgcaaagtctctggttcttttaaactcagctggttcagttgttccaaattactccttcatcccactgagtgaagaaagacgaacatcatggatttccaggttgcaggcacagctccttttgctcttcttgaggtcaagggcagaaggcattcttaaagaatattatcctacaagaactgaacgggtggacaagccacttctggaccagattgtaagagcttcatatgatcctggtgctgcaaaagtccttgagagtgtattcaacttcaatctttcaattcctcttaacttcttatttgattcttttggagggaagatattagttatccagggtatgaaagacccccttacaaaatctgaggcatttgtcaccatgctccgagaacattgcagcaaggttcaaatcagagagttaaatgcaggtcatgctccacatgatgaagttccagatgaagtaaataccatactatgtaaatgggtggagcagattgaagttaagccagccctggagaagaccaaggcaatataggtaacatttagaattatggacaccctatccattggttgattgtttaacatgatcttcaggagcaccttggtacattttcagtgacctaccaaaacttgtgtgattaaagcattgtgaattgttagccctatacaaattgtgattaaagtattgtgaattgttagctatatacaaaacttggtacattttctttcagctgatgttgagatgaacatacatgaaaccaaaaggacttttttttgggggtggggggtgggctagcatttgagcatgtttctgagtaagtttgcagagccgagatgcattctaagttgcacataacatgcctggttctgcttcttagggcttgtttagatagagggactagagctgatccctgttttatgggatgaaaagattgggtcagatccctgccaattcagacaagccctaaatgttgcttttgattaaaggctgaatctgaccggaaataaaccttggaccctcaacgacatataatctaaaatcacaatagttgcgcttgtgatcccattgtgcaagtaatgtttaatcatgctacttctatacttgcatccactgtactccactcctgcttgttttattgagacagcagcgtcacacaattattttttatctcacgccaactggtgctttatcatgtcatttatgtaattatgtgcaatcagcaatttcatgagagaagccaattgtaatcaccttgttgaactattctccagcaaggtgagctgctggaacttttagtgaaggatttgaactggatgtgttagtattcttttgttatagtgcagccgtgaccctctagagcttgatctgggttctaagtttaaacgtaggatcagagcagacccggacgcctggtttcaatatcagcacatgccatcataggctcacgacgacgaagagctgtcactttggccaccttcccccagcaaaaagaacgcgagcattacctctagggccaggcggacagcgaccactcagagtgaatatcaatcccctcatgagcatgaccgccacgcatcacgcatgctgtcattgtttttttcgctttgctgaccaaatattcagtgccttaattctttcttttttctgtcccagaaacaaatcagcagtgcttccaccagtcatgagccctggtgaccatccgagaaatctttgggcgcgcatcagtgaggccataaaacaaaagcgctgattgggatcgcccaaccaacgcaccttatcagctttccccctctctcttggtttcaccaaatctgacggtgacgcgcccggtgcatggcctccggaagatgtcaagttgcaggtgattttttaattcagagggaaaaaagagacgtacacgcggaagctttttactct

SEQ ID NO: 27104 - DNA, 2882 bp, Zea Mays
gtgacccactagcagtctcgtacaacgaactatcctgttagccagccctaaacccttctgtcccgatggcgtcgtcgtcgtcgccgccgccgccgaagctgccgattcccggccgccgcaacatactcatcactagcgcacttccgtacgtcaataatgtcccgcacctagggaacatcatcggctgtgtgctcagcgcagacgtgttcgcgcggtactgccggctccggggttacaacgctatctacatatgcgggacggacgagtatggcaccgccaccgaaacgaaggccatggaggagaagtgcacgcccaaggagatctgcgataagtaccatgctatccacaatgaagtttacaagtggtttaacataaaatttgacaagtttggacggacctcttctcctgagcagacagaagtctgccatgcaattttccataaattgatggaaaacaattggctcacagaaaatactatgcagcaggaacatgcccgaacaaagtctgcaacgcatcagcaagaggagatcagtgtgaaacatgcagcaccttgttgaatccaactgaacttattgacccaaagtgcaaggtttgtaagaacactccacgtattcgtgacacggatcacttatttttggagcttcctctattgagagacaagctggtaaactacatcaatgaaacttcagttgctggtttgtggagtcaaaatgctattcaagcaacaaatgcatggctgaaggaagggctaaagccacgctgcatcaccagagatcttaaatggggtgttcctgtcccccatgagaagtataaagacaaggtgttctatgtttggtttgatgcacctatcggctacgtgtctattacggcatcctatacacctgagtgggagaagtggtggaagaatcctgataatgtagaattgtttcagtttatgggcaaagataatgtgccgtttcacacgatcatgttcccttcaacgctactcggaactggggaaaagtggacaatgatgaaaacgataagtgttactgaatatttgaattatgaagcaggcaaattttccaagagtaaaggtattggagtctttggtaatgatgcaaaggatacaaatattcctcctgaagtatggcgatactatttgcttatgaatcgccctgaggcatcagatacactctttacttgggctgatttgcaagccaaattgaacagcgagttgctgaacaacttgggaaacttcattaatcgtgtgctaagttttgttgcaaaaccagctggagctggatatggttctgttgtacccgatgcacctaatgcgggcgcgcacacattgacaaaaacacttgcagaaaaaaccagtaaatgggttgaacaatatctcgacgcaatggaaaaggttaaactgaaacaaggactcaagagtgcaatgggcatttctagtgatggaaatgcatatttgcaagagagccagttttggaaactttacaaggaagatcctgcagcatgtgcaatcgtgatgaaaacttcagttggccttgtttacctgcttgcctgtctgctggagcctttcatgccctctttttctgatgaagtgttacgtcaactaaatttatctccagaagaaaatctgtcattaagtgaagaaaagggagaaattgcgaaggcaaaaactccttggaattttgtaccagcaggtcacagaatagggaaacccgcacctctgttcaaggaattgaaagatgaagacgtagctctccatagagaaaaatatgcagggagtcaagctgagagaagctcaaaagcagcagctgatgctgaagccaacaaagttgctaaccagctcaagggcacaaaattatctgatggaggaacaaaaaaggaaccgaagaaacaatctggtggctcaaaatcgaagacagctgaggctgacattacagttgcaaagttggatattagagtggggcttatcagaaaagcagagaagcatccagatgctgattccctttacgtggaggagattgatgttggagaggacgcgccgagaacagtagtcagtggccttgttaaattcatacctcttgaagaaatgcagagccggaaagtctgcgtgctctgcaatctgaaaccggtggcaatgcgtggcataaaatcacatgcaatggttctggctgcatcgaatgaggaccacacgaaggttgagttggtggaacctccagagtctgctgctgtgggggagcgtgttacctttgctgggtacgcgggtgagcccgaggcttccctcagtggcaagagcaagacgtgggagaagctggccgccgagttgcacagcaacggtgagctggtggcgtgctacagagatgtgcccttcactacctcggctggagtctgcagggtgaagacaatagcgaacggagagattcgctagtaccaccacatcaccgaactgcagccagcggagccagtctgtgtctggtttcgctgaaagcgattgttcctgattttcatcttcgaaaattttggtatttccatttgttcaaataccgcaaagcaaccatgatttagaaaaatacagagagtgccctttccgcatcctcttttttatcagttagtacttggctcctgttgtctcactcggaggctccatgcttcttgctctatctgtatttccttagaagtgattctttacctgctcttatttatagttccatatgaaaggaacgaagtgtatcagaacatcactttatatataggagggcctgtctgtcactgccccctgtcaatgcatggaaaggagcaagcaaggaagcttgaaggaactgtaaacagagcttggccaatgggcagcgcccgctagattcacgaacgaacgaccatgattgccg

SEQ ID NO: 27105 - DNA, 6511 bp, Zea Mays
gggtgaattcacgatgagcacctctgctagtagcgtgcgtgcgtcactcagctgcagctgggctgctagcttgagctgagcttgccgttgggcgcgcgcgtgcatggcgcccaagagcaggcgtgggaaggccaagggcgagaagaagaagaaagatgagaaagttctccctgtggccattgacatcactgtcaacctcccggaccagtctcatgtcattctgaagggtatttcaacggacaggatcatcgatgtgaggcggctgctctgcgtcaacaccgccacgtgtgccatcacaaattattctctcacacatgagatgcgtgatggtgcgttgaaggatgccgctgacattgctacactaaaaccctgcactctcacattggtcgaagaggagtacagcgaggagagcgcggtcgagcatgtccggcgtctgctggacatcgtcgcttgcaccacctgcttcggcccagcgccgccacctcctcctccgccgtcccccaaggacgccgatgccgctaaggagacatccagctccagctccacatccaaggccgtcgcatccgcctcctcgggtgggcgccgcacggcctcaccgccgccggcctcgccgtcctccgctgccgcgaaggagtcgtcagccgcaaaggaggcagcagccaaggagtccgcggctgcggtagagctggaggccgagatgagcggcgcgtgccctcgcctcggcgccttctacgagttcttctcactagccaacctcacgccgccactccaatttgtaaggcgagtgttgcagcctcgacaggaggaacagccttcggatgaccatctgttctttcttgaggcaaagctatgtagtgggaagttccttgttgttgaagctcggcgaaagggattcttcagtctaggaaagcagcgagtcttgtgccacaacctagtcgatcttctgaggcatcttagtagagcatttgacaatgcttatgaagatcttatgaaggcatttttggaacgaaacaagtttggaaattttccttatgggtttcgtgcaaatacatggcttgttcctccaattgctgcgcagtcaccatcaacgtttcctcctcttcctgctgaggatgaaacatggggaggcagtggaggtggttggggaagggatggaaagagcgacatggtgccatgggcagatgaatttctctatctcacatccatgccttgcaaaactgctgaggagagggaactccgtgacaggagagcattcctacttcacagcctctttgtagatgttgccatctttcgggctattgcagcagtaaggcatgtaatggagggtacagagttatcggcatcaaccaatatagatgaagtcttgtattctgagacagtgggacattttagcatcactgtcacaagagattcttcagatgcaagctgcaagatggacactaagatagatggaaacagagccacaggaatggactctaaggatcttgcggaaagaaaccttttgaaaggaataactgcagatgaaaacacagctgctcatgatgtcgacagtttgggcattatcaaccttagatattgtggatatgttgcagtagcaaaggtggacaacatcgacaaaaccaaagtaaatgcttctatcaagcctatgaatatcgcagatcaacctgaagggggtgcacatgcattgaacattaacagtttgaggatgctccttaatgaagccacctctaccggggagaaaaagatatcaaacctttcacaaaatcataggcaggaagaactaattgcggcacaaacttttgttgagaagttattgaaggaaagtcttcaaaagcttgaggaagaggaaaatgtaaaacattcatttatgagatgggaacttggtgcctgctgggttcagcatttgcaggatcagaaaaattctgataaggataaaaagcaaggtggtgagaaggataagaaaaaaacactggacaaatctaaagaaccaaagattgaagggctagggaagcctctcaaagctcttaagaatgcaaaaaatgttgattctgctgacctgggttcctcagcgggacccaaaagctctgcagaaagccagaaagataagccatcagatgttaaattgcctcaaggagagtccagtgcttctgagaatgaaaatctgctgaaggatttattaccagaatctgcttttaccaggttgaaagaatctgaaactgggctccaccagaagtcaccacctgagttgattgagatggctctgaagtactatgatgaagttgcacttcctaagctggttgctgattttggttctctggaactttcacctgttgacggtaggactttgactgatttcatgcataccagaggcttacagatgcgttctctaggacgagttgtcaagctttcagagaagctttcacatgttcagtccctatgtgtgcatgagatgatagtgcgtgctttcaagcatatcgtccgttctgtgattgctgctatttcagacattcgacaattagcactaacaatagctgcagcgttgaacttattgcttggtgtccctgaatctgatgtctctggaagttctcctaatgtgcatcccctagtatggagatggctggtgatcttcttgaaaaagagatatgaatttgagctcacggagaaacattaccatgatgtgaggaaatatgctgtccttagaggactgtgccataaggtgggcattgattttgcaccccgagatttcattatggattgctctttcccattccataagcaggacattattagcctggtacctgtacataagcaagttgcatgctcatctgcagatggtaggcaactgctagaatcctctaaaactgcccttgacaagggtaaacttgaagatgctgtcaattatgggaccaaggctctttccaagctcataactgtatgtggtccctaccaccgaatgacagctggagcttatagtctgctagctgttgttttgtaccatactggtgattttaatcaggctactatttatcagcaaaaggccctagacatcaatgagagagaacttggacttgaccaccctgatactatgaagagttatggagaccttgctgtgttctactaccgtctgcaacatacagaattggccctaaagtatgtcaagcgtgcgctatatcttctgcatcttacgtgcgggccatctcatccaaatacagctgctacatatatcaatgtagctatgatggaagaaggattgggcaatgtgcatgtagctctaagatacttgcacaaagctttaaaatgcaaccagaaattactagggcctgatcatatacagactgctgccagctaccatgctatagccatagctctctcgttgatggaagcatattccttgagtgtccagcatgagcaaacaaccttgcaaatccttcgtgcaaagcttggaccagatgatctaagaactcaggatgctgctgcttggcttgaatactttgagtcaaaggtaattgagcaacaagaagctgcacggaatggaactcggaagcctgacgcatcaatagctagtaaaggacacctaagtgtatctgatctgcttgattacataaatcctgaccaagagagcaagggaagagattctgaatttggaaaaaggagatactcaagcataaaggttttatctcattcaaatgaaagttcaaatggagcaagccctgagatatctccaagagattcaaatcccattatagatgaggaacagcaagttaaagagccatcaaaagatgacagcactaaaagtatttctgaagctgaagttaaacagactcctgaatcatttgagcatccagcaccttctgagccacaactagagatagttgaggcgaacattaatgcacctaaggaagttattgaagttgaaaattcagaacctgaagatggttggcagcctgttcaaagacctaaatcagctgggggttcaggaaaacagatgaaacattatcgcccaaccaccagaaaggtgtatgaccctgatagtcatgatccaacatatacttcacaatacaaggcaaggaattcctattcaaataaccggtattatttcttaaggaagagaacagttgtacctacaacgtacacagatcctcaacagcatgtgaaagttcagacatttggtgccaggtttggtcgcaagatttacaaggctgtgacctatcgggttaagccagcgactgcaacaacagaggtgctagatacttttaagagtacagagcagatgagtggtaaagcagaatcacaggtagcaaactcacaagcacacaatcctacctcaacagatcacaaaggaagtgagtcacatggaactttagttgcaagtagtggaaatgctccatcatacaaagatgttgcactagcacggcctggaacaattgccaagactcaaatacagaaacctagagacgatgtaccacagaaccaaccatcacttggtcagattattgcacaagaaatgaaagattctttggttgattcactccaagtggaacagggacctgtctctgcaaataccaataattctaaagaagaaaccaatgtgctaggaaaactccagaaattagaagaaacaaaattctctgaaggggaactggagattgagaatctgtgcaaagacagggtacaagatttgccaataccaaaggctgaggaatctggaattggaagtgagcctgtaaatagtaaaaaagatgccaatgtgttaagtaacacaagtcaagaactatcaagtagtagcaatgatggtgcagccattgagttttcggagtcaactggatctgtaaaaactgaacagactgagaagtctgatacggatttttttgaagctctaccccgcagtatagaaaatatttcagtttcagcatctactacaaacacagggagtcttggaggtgatggaagtgagaagtccaagcctaacttagtgctaagtaatattgatttgagagagatgcctaataagaagctatctgcttctgcaccaccgtttaatccatctccaccatctgtacttagcccactttctggcaatgttggtctcccgccaccaggtgccattccaggagtagcaccttggcctgtgaatgtatccctgcatcctgggcattcaactatggtgccaagtggtcctcctttgtgcacttcccctcatcatttataccctcctgctccccgatctcctaatctcatgcatcctgtgccatttatttatccaccatatagtcaaccacaggtggttccaaacaccacatttcccatgaacactaatatttttcggcctaaccattatggatggcaaccttatatgggcccagcgccatcagaatttgtgccaatgtcagcatggtcaagtagccatacaattgacttcattcccacaccacatgttgttgatcctatttctcaatctttagcagataagcatattcaatctgatgcagctgttgttagtataggcccttcactggacagtagcgctgtagtggccaaagaggagatggagactcctgcagtggcagtaagtggcaatttgataagcaacaaacatgatgatcaagataaacaattaaaggatgccactagaattgaactgagtcctgaaatgcaagaagacaacaagcatgatgaaggtagtttcaggatatatgtaaaggggaaaagccgtcggaaacaaactctgagaatcccaataagtttgcttaacaagacatatgggtcacgctcatttaagcttgtctataacaaagtagtcagagagaatgacatcttcaggccttcaagtgtgtcctttgctgaagttgtttcatctggcaactaggttatgcaaattctaaagcatctaattatgacattagtacccaaaagaaaattgtcatggatctccaattcaaatgtactgaaatgaagttattatttggaaggcagcattattctcataccatattccagatatgaaatcccaccactcgaaactattcaaaaaggataaatattttttcatttcaaatacggtaccgacaatcctgtgtagagtccagaaaagatgcaaggaattttgtgagatccagaactaataggagatggaagtattacgaataataatactagactgtctagacaggctgaattttcttcaattttgatagattaagagaaaggaatcctcttcaatttttggagctcacttttgggcttttgaagccgagcctttagattttgttcttttgttacgctgcggcacctaataaatgacttgccttctatgttttcgagaaacttacattattcttttttatataacaataatactgtctattcagtaaagctgcttgtttgtggatgcgatttgcccccccccccccacccacccacacacacaagcgccaatttgatatgattaatccatatgttttgaatttgaagacttagtgtcacgtttactatgaagtgcaaactgcatcgg

SEQ ID NO: 27106 - DNA, 1916 bp, Zea Mays
cggcaattcaggtggcgagggatgagctgttgcgaatatcatacaactgtgtgtgtgtctgttcatgcaggttcttcaagcgatcaagctggttccagctcaagtagttctctgcaaatttcagaacctgaaccacaacaaaaccaagaagaagattactatgtggaggatgattgtgatgcctatgatgaagatgattatgactttgatgaagctgaatttaacctgcaccttgctgataaatttgatgatttggatcttcctccaggcgtggaggctaatgtaccatggctgcaaaaaattccacccaaggaagtagtcaagcagccacctatatcaattactgcagacgagaatgctaataaatatgacaagttcaaacagtttgatactgttcagacattctctgaccatcactatgctaagaattctcatgaagaggtgagaagctgagctagtatgtgttatatttttttttgcttggtttgggtgcttacctattcttccatgtatatattgtttcagccaaccagagcctggtcaaagagagttcaacatgactggaaacttttggagaatgatctaccagcatatatttacgtccgggttgctgaagatagaatggatcttcttagggctgccattattgggcccaagggaacaccctaccatgatgggcttttcttctttgatgttcacattccctctgcttatccttctggccctccgttggtatattaccactctggaggacttcggattaatccaaatctatatgagaatggaagagtgtgtcttagcctgttgggtacctgggatggtagaggttgtgagaagtggaacccagcacaatcaacaatgctgcaagttcttgtctccattcaagctctcattttgaatgagaagccatattacaacgagccaggatatgagtccttcgccaccactccgaatggacagctgttggctttgaaatataatgacgatacctttctgtactcatgcaggactatgttatactcgcttcggaggcccccagagcactttgcagaccttgttgctggccactttcgggtgcatgggcacactattctcgcagcatgcaaacactacatggcgggtaatgatattggctcagtagtgccagaggaggaggaagagtcagcatcccgcagtgcaccaaaggcaaagccaggagtgatcaggacaatccctctgaacagacgctacgcaggctcatttgatactagcttgaaggtgctgtacgaagatcttctgatggaattcaatgtgaagggtgctgacacgaggaagttcatgattgagaagttgaagaaggaccaacctgcaggcacctgagaaaagcttggacagcttaagatagtgtttggttgaagagtcaagtagaacgaagccgttctgttccagttttgttgttgtttggttacaaagtaagtagaacgaaatatctccaattagagaatattctcctcagatccggaaccatttcgctccaaaaaatcaaccgaacggagccgctccgttctcatcccgctctcacagtcacgctccattccgttcactctgcaaccaaacacagaacagagcggctccgttccagattaccaaatacagaatagagcggctccgttcctaaaatcagggatggaacggctccgttctacttggctcctcaaccaaacactacctaagaggaagtagaggtagagatgacgagtctctggaagtaaatagtaggaaatggcatatcgttttttttgtgtgaaacccttcatcttttgctgacattatttgtgcttgttgtcgaacagtaataaagaggtcatttatctagtatcaccgtaagcagagttacaccattttgcataaacattacatgttcagtgatatgcttg

SEQ ID NO: 27107 - DNA, 5279 bp, Zea Mays
gtctgcctctcaaatctcaccgcctgctcttcttcggtcccggctcgggctcctccatatgagcgcgcgctaggttctctctcgtcgtctctcgtggcggctggcgacgactggggaccgccggtaggcgcccaggccttcgtcgcgctggtctttctagggcccttcgccggcgacgatcaccctccgcgaccagcattgtctagatccccaccgtcgctggccttcttcgaggcccagatccccattgtaggccccttgcttcttctcctcaaccggagcttccaaaactcccttgcagagcttgtagaggttatggaaggtatgggtgtgccttcaccaccgacagttgggactccgtcggcctcgccctgccgcattacgtcccccgttgatgataccaatgcgtcgcttggccaagaaccagagtgcgcattgacatatatcagacaggacgatcctgacacattcattatctcgggaaattttcatccaaggcatcaaatcgattgggattcaattgaagtagaagaaaggtggaatgaggaaggaagacaggatgttactagtgaacgaggattgtatattcaactcggtttgcataatgaagatgagagggtatttaagcaaagggaagatgattcaagtgctcattgtgctggaaataatagggaagaatttcacgatgaagcttcaactgccatgccttgttctgattttgtattagatgggacaaggactatctatgatatgaacaatcctgtaatggagcctggtagcttgtacgcatcaatggagcagtttagacttgcaattagacagtacgccataaataaagaatttgagttgggcattgaggctaccaacaagactagattcagagggtactgtaaagggcctgattgtccttggagcattcatgcgaggtctgagatgaaaggatcacccactattcaagttattgtcttaaacgatgagcacacatgtacatcgagcgggagacgcaagacaacgacaccaacaggtgcttgggttgcggcaagggctcttccactacttatgaaaaaaccacatatgggtgctaaggagttacaaagtatgttgcaagatacatttggatgcactattacatatgatacaatttggcatgggaaagagaaagctctgaagcaattgtttgggagttgggaagagagtttccaacttctatggtcttggagagaagcagttatacagaagtcaccggatagtattatcgagttggatgttaaaatggatgagggccggccattttttagcagatttttttgtgcacttggtccttgcattactggtttcaaagagggatgtagaccttatcttagtgttgactcaactgctcttaatggaagatggaatggtcacctgtgttgtgccataggggttgatggacagaattggatgtaccctgttgcttatggattctttgaggcagaaacaacagaaaactggacatggttctttcagcagttgcgcaaggctgtgggagatcttcctctactagcattgtgttcagatgcttgcaaaggtctaaaaaatgccatgaacactgttttccctcaagctgaaaaaagggagtgtttcagacacctaatgcagaactacgtgaagcaatttgttggatccgagtacatgtatcctgcagctagagcatataggagggaggtgttcgaccattacttttccaatgtccaagaaattcccaaggtgtctagttggttatatgagcatcatgatagtttgtggtatcgtagtgggtttaatccagccatcaagtgcgactatgttaccaacaacatagcagaagtgttcaacaattggattaaggattggaaagatctgcctgtctgtgacttggctgacaagataaggaaggaaatcatggagttgtttcataggaggagggaaataggacagaggttgcaaggtcgaatactaccctccgtggtccatatcctccatgtaaggactagaggtttaggtcacttaacagttaagaaagctgacaattacattgcggaggtgagggataataataatgtgcactctaagcacattgtgaatgctcaattgagacaatgttcatgcaacgagtggcagcatacggggaagccatgtcaccatgcccttcgcttaataacaacacaacaatttagagatgttcggatggaagattttgtggatgactactactcagttgataagttcatgaaggcttactcgagggtagtggagccaattggtgacaaatctttctggcctacagtgccatttgcaaaagaggtgtgtgcttctattgggaagcgtggagttggccgtcaaaggaaaaacatgattaaagggtgcctagagggaggaagtggtaagaagccaaacgaaaatgaaaatgtcaaaactaagaagatgattcgtgggaagttcaagtgtccaaactgtggtgaattgggacacaggaaagccagctacaaatgtcctttgaatggaacaaaaaaacggaaaaggagagcaaggaaaaatgttactaaaggttggttcccaaaagatgttgaggcatgatgatggtgcatgcactagccacacaaccacccccatgtgatgattgtgatgccagtattgcgaaaatctctccactttcatctcccagacctatctagaggctagtgctggaccagtgtaccctaggagctgggtgccaggtgcggtggcgggcggggcctagcaaagcatgacgctgtaggagggatccagtcatccgatacgtcagcactccggcacagcagtaggcatctcggaagctggcagggccacagggcaccacgcccaaggcttagccgcgcaggcactgagcagccaagtagtcaggcagtcagtgagcagcagcagacggcagcaaggctggaagcgcgaagtacctatataggcatataagtttagttcgaccgggagtttacttctctgttatctgtgacttgcccgaccccgacttgatgtgcattgtagattatcagaaattgattaatgatttaatcacagattttaatcaactcaacacgtcgagaagaatatttttgtgctcatagttttttagttcaagcaatgttaatactagtggtacttccctgagttcatatcaatgcttagtcttgggctcctcagaaatgcaaattctttctttggcttgcaattagaaacaagtgttggactgctgataatctggagaagaggggttgcagcacccaagcagctgccctttgtgtgaccaagaaagggaaacgatacaacacatcatcactacctgtgtttttgcccggcaattctggtttcttatctttgacactcgggatgagtcacctcgctcttagggctgatgagcggtcgtttgaggactggtggaggaaggccagcaacagtacaaggataagagaaaagggatcaactgtgtcattattttgggggcttggtgcctctggctgcatagaaatagaacgttttttatgggaatcatccattcagagggtgcagcaacatttcagtgacgagttctcctgttggctcttggtgcgcgccaggagtttgggtcagcttggtctccctagttccatgagtaatatcggatctaatccttttactcctctataacctttttgcttttcttttgtttcttttttctgttttagctatggatgtaagtcatgttttctctctctctaatataaagatgtgcagctctcctgcgcgttctagaaaaaatgaatgtaaaatttgatcttcaattgtttattggcccattataaaattgtacaaagcttctccaaatatgccaattgatccattacaattgtttcataactactgtttatggattttgggactgcagaactgatggattctaacagatgtaacagacctacagtagggatgctaggccaaggagttaaaatatatccacatgttagaatatttcgtaactgtagtaacttcaacattatatagattaatcatgaacttttagttgtattaaacaaataagctctgtatgttcattgttgtagaactaagtttattgtgaatttgtgaacacatatatttgttcatgaaactgcattggatttggactaacaaagtttgtgtatgtgatatgtttttagtctggatctgcccttggtcaagattcaaatatggcttctgcagggttggctcgggtgggtgagtggtgcgactcgtcctctcatgaggctcgtcaccttgagcaacatgccgatcctgcagcagctgcacctggaggagcagctcctgcgccgcacatcggacaactggtgtgtcatcaacgatggcatggcccctgctaccattctcatgggactgcaggagagtctcggagcttgtcgacatacagccggtcctctgggaccaagtgccgattgtgaggaggttcagtggaggtggcacgtcattgttgattggggaacggtggttgtgactttcatttgcaacaagaatgccgttgccgggctgcagatttatggcaaaaaatttgacagatttggtgaatttcatctgcgtgagaatgactatgcatttagtcactcgaaagtttggcggaaatgctcaatcaataacaaaaaatcgttgggttcatcacacgtcgttcttgtgggattatgatgtaaaaaatatggattatctcaaaatcccaaagcgtgcacctgaatatcgactggcaagaaaccacagatttcttgtgccgcatgaaggagtacataccttcgcggtcagttttcaccgatgaggtcactgcggccctgggagaacacttctcagttcagcccgtggatctacaagcagttctttccggtgatgaaggatccgtgccttctacaaagctgctgtcacaacaggacctagaaagaaattgtttcgtccaaagaatcccttaacaatatagaaagttgaagcgtgaccatgcttgtcgtttttgttgtgaaatatgagcagttttgtcgagctgtgaattcattcaaacattatggtcaacccagtacgtacatacgaatgcccaccaccatctttagtaacaaatggttatgttttggattgtaggtctaccgttccaagcttgggttacacgttatttgcctatgggctctagaccgagtgctaaaactatgagagactggctccaacatactctgtaaatggttatgtactctaaattataaagaaattttttgtcttcttat

SEQ ID NO: 27108 - DNA, 529 bp, Zea Mays
ctttcttcgttcttcccgtgtgatgtggcgtttggtgtggccttgtgcccgtcgaggtccaggcgtggaaccccagcccaggcacggcggcgccggcgactcgtgtgactgcccctgtcctagcccggcgcaacgttgcccatgcccctgcggccccaacgtccaaccatcttccttctgtcttctgatcggcgcagcgtaggcgcgcaccctttcctcaggcgccgctgctccctatcactgctctcatcaacaagcagtccagatcttcaggaaggtactattgggtggatcggctaactgatccagagacgtagcttgtggactgtcgatctccacagcaagcttagtccacgagttctgtgccttatgacatattaaccagtaaacaagttagaatgtgcccatactttttttatatatatagcaactctactggggaacattgctttgatttttgatatgtgtgtatatatatattcattttcaaactaaaattaattaatggctcaagttaattgttaagaaa

SEQ ID NO: 27109 - DNA, 2220 bp, Zea Mays
aggacatcaaactagaaaatctttggttggagcctttggtcaacttaaaattgctaactttggctggtccggcatcttcaacaggactatggtgtttggccggtcagtagaggaggttgatctgagtggatttctttctgtgaattccgagtggttggcataccttggctccttcaggtaccttagggttctgaagttggcggactgcaagaacatcaacaatgacgctgtctggtcgctctctggaatgaacacattaaaggagctggacttgtcaaggtgcaaaaagatttctgatgctggcatcaaacatatagtgaccattgaaagcttagagaagctacacttatctgagactgaattgactgacaatggagtgatgctcatttcttcactgacaaatctaagtttccttgatctaggtggaattctcatgacagacaaaaccctacagtctttacaggtattgacaaaacttgagcatcttgatatatggggtagtgaaactacaaatgagggagcttctgctctgaaatcctttgcaaggctgctatccttgaatcttgcgttgacacgtgtcaaccatttatcaattcctccaaccacaagctatctaaatatgagcaactgcgaaattcattctatttgtgatgtggattctgaagttcctgttccactagaaaactttattgtctctgcagctacatttggcaatattgataaagtattttctagcatccaagcaagctcactgatacatttggacttgtctagctgcaagttaagcaacttgtctttcttggaaaagatgaagaatctagagcatctggaccttagctacaacataataactgatggtgcaattgaacatattgcgaagattggaacaaacttgcaatatttgagcctcaagaatactggaataacttcccaggcactatgtattctggcagggacagttccaaacctcacctcactgtctttagctaatacaaaaattgatgactctgctctagcatatattggcatgatacctttgctgagaacgatagatttaagccagacaagtatcaaaggttttattcacactgaagtaaattccgagaagttgttgtctatgtctgcatttgagcatctcaaatatctggaaagtctaaatctggaggatacaccgctatcagctgaagttatacctcccttggcatcctttgcaacactgaaatatttgtacctgaaaagtgatttcttgtctgatcctgccttgcacgcactctctgctgcctccaatttgatacaccttgggttccgcgggaatatattgtcaagctttgggcttttacagtttgtaccccctgtcacactctgtgtgttggatttaagcggctgttggatcttaacaggcgatgctatttcaacattccgtaagcgtcatcctacgattgaattgagacatgagctcctgcacgaagttgaggaaaattttgttggtggttcccaatttcgtaaacctagacgcagacgatctcctcatgtgaaagcagaagttggaaacagttttgctggctcaagtaggctacacgatatccgttttgtagatgaaaggataaaatacagcaaggaggaatttgtggagctgcaaggccttgctaaaccaaattcgttaatgcttggcgtgtggcttccaccagaactgcgaaggcccaaatgatagttttggatcttgattccttacgcatttactgccagcatatcataatcttccttgagttattcttgatatgacagacttttgagaattaagcatcaagcatgtcactcagttccaaattatagttcactttggttttgtcctaggtcaaacttttctagctttgacctatgcattcgaataaatgctataccaaaatgtatttcgtgaagaatctaaagaaactgatttgatgttctagatggtggtacactttcctttaaacttggtcaaacataaagaagtttgacttatgaaaccaaagttaactataatttggaacaaagggagtacactggagttatctaaaacaaattttcgataaattagttttaacatttgcattgggctctcatcagttgatcctgaatccagttctccgatctgtgatataaaatatcattttctggagtttccttttggtcacgtgaaacttttacacactttggcctttgggcgctttctaactaagg

SEQ ID NO: 27110 - DNA, 2043 bp, Zea Mays
cctccctcccacccgctctccctttccatgcttccccaccaccacctgggtcgccgaaacgctgcagccgcgaagagatagggagaagaagaaaaaaaactcgcttgctgttcccgtgtctgctccgttgaggcctgcgttgttaattcgtgcggcgcttctcgtccggcggcggagagagcgtgctcttgctctgttggtgtgccgcttacttgctccaggaattggccttcgctgcatataaaaagaataagctggctccaagataatggcatctcttactccaggaatactattaaaggttctaaaacatattaactctgatgtcaaatttatatatgttgagaaggtccagtcaagtatacctgttccggttcttgttggggtccgcccagttccaggaaggaacccttgcattggaaacccaaaggatttgatgcaaatgtcaactccctctggagttatggaagcactggatcatcaacggacaacttccaagtcagctgatctgtctgaaagtgaaaaggaaaatttgcagagaaaggtagttatcaaagagcagaagacagttgtcgcttcccgttacatgcttggggtgtcaagcaacaacgggaaaattaccaacctcaactccagcattgatagtgaaaaaagtaatggaggaagtaccatatctgaatcaaataaaaaatctgttgccctgaaagtcagacaagaggcaaaacctcaggaacggtcaaataatacatctcctagtaacgctaagttagtttccacaaagcaagaaattagcaaggacacacgcaagaatattggcacttcacctagtccaaatggttctgctgtagtcaagaagcaaatgccaaaggagagcaaaaaggaagttgctactgagagaagatcaccaccaaagcttcataggagttcgccaacaccagcgaggacttcaccaacaaagctcagtccagcagcaaagcagaatggaaactctggtccagtttcttctgtatctactgttaaaaaaagagttagtgaaactatctcttgggactccctcccaacaagcctaatcaattcaggaaaggctgttgtccggaggaagaacattgctcttattgtagcggctgaggctcaaagggaggctgctgcagctgcgtatcttgtaaaaggccttggaattttttctgagataagggaatcttctgaagtagatccacaagctgcaatcaccaagtttttcgagctgcacaggcttatcgttcagcaaagtgctgtctggaaagcttacactcctgagcctagcaaagaatctcgaccggagaaggaaaaaccgtcgaggaaagcttctgcatctcatcatcaccagaacaaagctggcacacgcgacacagctaagaatcccgaaggtgcccagggcagtgagaagacggaatgggcccgggaggacggtttcaaggagatctgcaggtcatggattgttctgaggaaagaatcgcggtcgtggtttctgagcttcctggaggatgcacttgaatcaggattcatgtccgagggccaaaccaccaagaacacgagagaacgcgtgcggggacaacccaaacccaagggtggggacgggaggatcgcggtcctgctgtcgcagctcaaggagacgagcaactggctcgatcagctgctgcaggacgaggcggacacttccgcggacggtttggccgaaaccgttgaccagctgaagcagaaggtgtacaaatgcttgcttggaacggtcgaaaccgcggcgtcggcactcggaggaagataaaaaaattgatgtaatggtgacgaagacgagcattaagttattgggtgttcagtcctgcaacaggatgttggggtgaagaacacaatgaggggaagatgtaaatagtcgggttgctcatttttaagttataaactaatttatttttattttttgggaggtgggggtgggggaatttcctggtgttgcgtgtgaaatggcaattgattttcttgggtattcgaattgttacaaatgatcttgcg

SEQ ID NO: 27111 - DNA, 1954 bp, Zea Mays
ttgctgcctcgcttgttattccgttgcttttcggtgtccgatctgccgcggcggtgggtctcggtccatctggcggcgctgcccgtgtggatctgtgccgattcggtgggagtggtagtcattttgacggttctggattgagggacagtcatggcaggaatggcacccgagggttctcagtttgatgctaagcactatgattctaaaatgcaggagctgctgagcactggtgagactgaggagttcttcacttcatatgatgaagtttttgaaagttttgatgacatgggccttcaagagaatcttctgagaggcatttatgcatatggttttgagaaaccatctgcaattcagcagagaggaattgttcccttctgcaaggggcttgatgtcattcagcaagcacaatctggtacaggaaagacagcaaccttctgttctgggatcttgcagcagcttgactatggtctggttgaatgccaggccctggttcttgctcccacccgtgagcttgcacagcaaattgagaaagttatgcgcgcacttggtgactaccttggtgttaaagtccatgcatgcgttggaggaacatctgttcgtgaggaccaaaggattctcgccagtggtgtgcatgttgttgttggtacacctggtcgtgtgtttgacatgctgcgtagacagtccctccgccctgataacatcaagatgtttgttcttgacgaagctgatgaaatgctttctcgtggtttcaaggatcagatttatgacatcttccagcttctgccatccaagattcaggttggagtcttctctgctaccatgccacctgaggcccttgagattacccgcaagttcatgaacaaaccagtgagaattcttgtgaagagagatgagctgacccttgagggtatcaagcagttctatgtgaatgtggacaaggaagactggaagctggacacactgtgtgacctgtatgagaccctggccattacccagagtgtcatctttgtcaacacccgccgcaaggtggactggctcactgacaagatgaggagcagggaccacaccgtttctgccactcatggtgacatggaccagaacactagagacatcatcatgagggagttccggtctggctcctcccgtgtgctcatcaccactgacctgcttgctcgtggtattgatgttcagcaggtgtccctggtcatcaactatgatcttcccacccagccagagaactacctgcatcgtattggtcgtagtggtcgttttggtaggaagggtgttgccatcaactttgtgacccgcgacgacgaacgtatgctgtttgacattcagaagttctacaacgtgttgattgaggagctgcctgccaatgttgctgaccttctgtgatcaatttcaagaaaaaacaaaacaaaaaagggtggtgaggaacctggtaaggcttggttttgtcgaaataccgtgggagagggggtgataaggacggtggggtttctatgttgaagtcgtggtcatggacaatttgtgattttttctcctttatgccatgttttggaatttttgtagctgcctaggccttgtggtaatgtgctgctgtgggggttcattagtatgaagaggaagacgctgctggcgctgagtctttctctttattagtattttgtttaaaactatgtatgaccgaatggtggtatttatttgtgtcatccttgactcttattctgctgcaaccagatgtatcgtgccatgtctgcaccactggtctttgctatcctgagtaaaacctgtttactctgtcgagcttgtcgctgatacaccgatcctagctgttttgagtaaaacctgtttactctgttgagcttgtcacctggtgatgcaaggtgcttattgactggtaatgtattttgaagtcgttatactatctgaaaccccttcctgagcatttgag

SEQ ID NO: 27112 - DNA, 3054 bp, Zea Mays
gtattctacaatgatcaatacagatcattgatccctttcatgtcatggtctattcaaaaggaaaatccacttctgagattaacagttgagaactgtgagttgtccagtattggtgtgattatacttctggactgcctcacaaatgcgaagcaactccttgatgtgctatctattgcagacaatcatctagggagtcctgtggcagctgcattggccagattcttgggttcacatgtacgagctttaaatgctacagatatcggcttgggaacagtaggcttccaaatacttgaggaaacattgccaacagaagtagctctttcccacatcaacatcagcgtcagcctcggctcagcccccgccatcgctgattcgctggccatcagagtcggcggccaggccatgtcgaggttctggaagccagggtcggagaagccgagcaccctactcgtcgacgacgaggagggcggagtcgtcttcctgccctcctccagctccgtctcctcctccggctttggttacgcgagtctagagagacagcggcaacggctgccggtgtacaagtaccgcaaagccattctctacctggtggagcggcacgccaccaccattgtcgtcggcgagactggcagcggcaagtccacgcagatccctcagtaccttaaggaggctggttgggctgacggtggtcggcttataggatgcactcagcccagacgactggctgttcagatggttgcatcaagagtagctgaagaagtaggtgtaaagcttggagaagaagttggttataccatccgattcgaagatcaaacaaacccgggtatgaccatgataaaatttctcacagatggggtattgattagagagatgatggaagatcctcttcttaccaagtatagtgtaattatggtggatgaagctcatgaaaggtccatctcaaccgacatgttgctgggtctcttaaaaaagattcaacgtcgtcggcccgagttacggcttattatctcctctgcaacaattgaagcaagatcaatgtcaaccttcttcaacattaggcgaaagaattctttgcttgggtcttctgataatttgcccagcccagaacctgctgtactttctgttgaaggtaaaggatacaccgtggaaatccattatgttgaagaacctgtctcagactacttacaggctactgtgaatactgtacttcttattcacgaaaaggaaccaccaggggatatcttggtattcttaactggtcaggatgacatagaagctgctgttaagttgttgaatgaagaaattcagcaccttggaagacactatttggacttgctgattttgcccttgtactccggccttccgcggggagatcaagatctcatttttgctcctacatcaaaagggaaaaggaaagttgtgttatcaaccaatattgctgagacatcgctgactctggagggtgtggtatatgttgttgatagtggattttccaagcagaaatgttataatccgatttcggacatagagagtttagttgtcgcaccaatatccaaggcatctgcaagacaacgagcaggcagagctggaagggtgcgacctgggaagtgctttaggatctatacagaggaatattatcttactgaaatgcagtcagaaggaattccagaaatgcaaaggtccaacctggtctcctgcataatacagttaaaagccctaggcatagacaacatcctgggctttgattggccagcttctccatctccagaggcaatgattcgggctcttgaagttctattctccctaggtatcctcgatgaagatgccaaattaacagtacccattggcttccaagttgctgagatccctctggaccccatgatttcgaaaatgatcttgtcagcgaatgattttggatgctctgatgagatattgaccatagcatcatttctgtctgttcaatctgtatgggtttctgtgaggggagtgaagaaggaatttgatgaagcaaagcttcgatttgctgctgctgagggagatcatgtaacattcctgaatatctacaaaggatttcaccagtctggaaaatctagccaatggtgttacaagaactttttgaattaccaagcactgaagaaagttgtcgacattaggggacaacttctcaggatagtgaagagttttggtatacaactgaaatcatgtgacagagatatgcaggcagttagaaaggccattattgctggttcatttactaatgcatgtcatctggaggaatacagccaaaacggaatgtataaaacaattaggacattacaagaagtttatattcatccatcttcagttctctttagggtcaatccaaagtgggttgtctaccagtctctcgtctcaactgacaagcattatatgcggaacgttattgccattgagccatcatggcttacggaagctgcaccacatttttatcagttccgagcattcaatcctgctccccactaacattactgtggtaatttcttttggctactcagttatctttgccttacattcaacaaatgtagtgaagttttaacaatgattcaatggcaagattatgttttccccccagttggcttatcggcccagttggatatgggatgaaaggtgtcctgtggatcagaatggatctggctttattgctaaaagcagtttcaatgaaagatgttttgtgtgaaagtatttgtttgattattggctgatccgtgtcgttgatgttgatttacagggcaggactgcacgtcgttttgtaattttagagaacttaactttcctagggccacaattttgttgaagaaaaggattgccaatatttgtatatgctaagcacttgtggcattattctattccagtgatgatgggacggccaaaatcacacttgtcggtttatcccaaaatcacagtagcgagaaatctgtaacttgtacaacctcttgaatttgcccacattttgttcttgtcagtttatgggaggatgcagtttattggactatatagatgagttgtctctttttt

SEQ ID NO: 27113 - DNA, 290 bp, Zea Mays
ggaccgttgatctagttggttgcggctcggattagatcacaagtttattaaatccagggcgtccattcgtaattgggcggtccagatcacgtaccgattcatctcagggttgatctaatcgtgttcgtctgtgcttgatcgtgtggtccacagtcaaagataccccttcggccatgccattatgcaaaagagaccccgtataactctataaacaacccgcggtccatcacagaggagtgatgagtcttagaactatttgcagattaaaccctgtacttatctgttttaat

SEQ ID NO: 27114 - DNA, 1145 bp, Zea Mays
gcacgcgcggcagcttctgcacctaaggtagcatacgccggcgagcggcaggcagcagcagcagggctatagtttcggagcaccaccgcgtgaaggggtaggaaaccggcggcgaagaaggggcagaagcgggcgcggcagccgcggttcgcgttcatgaccaagaccgagctcgatcacctcgacgacggctatagatggaggaagtatggccagaaagctgtcaagaacagccctttcccaaggagttactacaggtgcaccaacagcaaatgcacagtgaagaagcgcgtggagaggtcctccgacgacccctccgtggtcatcaccacctacgagggccagcactgccacagcatcggtccattccagcgcggcggcggcggaggcgcagccgcggcgcggtaccacagcgcggcggccgtcgcgctggcggagcaaatgtattcgtcgtcgacgacgtcgtcgttcatcccagcagcgcggcagcagctcttcagcttgccgccgttgcacccgcagagctccccgccgtcctcggagacgacgccgccgccggtcgttagctcggtgactactacatcttttcagcgtgctaacgacggcgacgagctgtggcggacaggcacaggctacggctccggggtgtccgtggcgcagtcgccgtcaacgccaccatcagtgcctccgccggtcgtttcggttcagaaggcggggctgctggacgacatggtgccccatggtgtaaggcatggcaccccatgatggtggcaaaatatgacatatatatacctgtcggccgtaccagcaagaggcggataaagtgatcaaccagctagcagctagggttttctcctgctggattcatcagtagtagttagatttatctattactctaccagacactgcatgcatatatatactcagcttatctgttcagatttgcttatattcagtgtcactctccaacaatctccattgcacctacatgtggatgtgtagcagtacttgtatttcttgtcaaaaaatcagagaggtatatctagaagcttcgcatgctcccttcctctataaaaccaacgtctctgtatttataggaagggttcacccttttacatgaagaattatgcaactagcaggaccgc

SEQ ID NO: 27115 - DNA, 3382 bp, Zea Mays
caactttactacccgtctcgcgcgagcggaacacattccgcttgtcctctctcgccgctgctccgacgagctcgccggcgccgactcccctcccgtcggaccagcccgccgaaagcggccggacgaacgagaggcttccctcccctcgcacttgcctgcctcgtcgccttcctgagcctctttctgcgcccggccacgggctcgcggccccacgcccgagcacgtgcagcaggcgccgaacccgcctcctgtgccaccccatcggagctcgccggccacgtggagggattccttttcctcgcagcattcctcgtcgccgacggcttcgtcgtgctccaggggttggattggcgtggagcggagagcagtgcaaacctgggattgaattctggtgtagctcttcaatatgaaaaccaaaaattggtgcaacaactggaggtacagaagtccgaaatgcatgcattggagcgcaagttcaaggagcttagtgatgatcaatgttcttatgacaagactctgatttctttgaataaactgtggaatcagctgattgatgatttggttctgcttggagtacgggctggtggggatttggataatttgcaagcacttgaccatgaagagttatcagaagaatctttggagtcgtgtccttccgaggagatatttctcttaaggctcttgaagacaaacaacatcagagataatagtgacactagcttgttgaaatttgttgaagaagctcttgcttttcggtcttcagcaactgttactttgatgaagtccctgcaagagactatttcttcgcagcaagctagaagtgagtctttgtctttagctttgaatggacaaaagtcaaatgaagatgttattgttgcccttcgaaatcataatgattgcttgaaagaggtggcagagaatgcgagtcaagccatctctattatcaacgagaagcacaaaaggtatcttgatgagattgaggcttttaaaagcaaccattcaagggagctacaggaaatcaagcgtatttcaggtgagctagaggaaagcattgcagagcttgaggaaagtcaaaggaagttggttgtgctccagttgcagaggcatggttctgtaatggatgcatctggggcaaatgctgtgaatggtggtatttctactcataaatcttcagataaaagtatgagctggcaagacctcaaagatgctgttgacgcagctaagaccctcgcaggaaaccgtctattagaactccatcagactcaagaggataatctgatactatccaaggagctgggagatcttgaggggcaattgaaagatgagaagtatgtcttggtatccaaaccgtacatgattcttaatgataaactacaacatttgaatgctgagatagagcgttatagagggttggttgaagttttacagaatgacaaggaccagctcatgcaaagggagaaagaaatttctgcaaaagcagaatcgctcgacagtgttaaacaaaccattatcacatatgagaaaaaaattgaagaactggaaactcaaattcagatactcttttctgaaaagaatgatctcgaaaccaaggttgaggagactttgcaagattcaggtaagaaagacttcaagaatgagattcatgttatggctgcagcactctccaatgaactgggtatgatggagaatcagttgagtcgatcaaaggatgcagcttctgaagcacttgcattgcgtgagcaagctgaatcattaagatcattggtagctaaaaagattgaggaacacaagaagatttcggataaatacaactcacaagtaattgagatcaagtccctcaaggcattggttgaggagttggagcaggaaaagcaggagctggagtttattgcagatatgtacgtgaaagaaagttctgagtctaggacaattgctgatattgaagaatcagaaacccgagctcgcaatcaggctgaatatttgaggagcaatctagaggagcatagtcttgagcttcgggttaaagcagcaaatgaagctgaagctgcatgccagcaaaggctttcctttgctgaagtggaactagaagagttaaggaccaaagtagatgcatctgaaagagatgttgtggaacttaaggaggcaataagaattaaagaggctgaaggagacgcctatatttctgatatcgagacagttggtcaagcatatgaagacatgcaaacgcaaaatcagcatcttcttcaacagcttactgatagagatgactttaacataaagctagtatcagatagtgtgaagatgaaacaagcttgtagttcccttctctctgacaagcttatgctagagaagcaactccagcaagttaacacttcactggagtcatctaaactgaaaattgcccgtggcgaagagcagatgaagacttgtgtagcgcaagctataaaaacttcagctgaaaacagacatcttactattagcctggaaaggattgcgctggagttatccaacacagataaggaactcaagtggcttcggtcctccgttggatcctctgagaaagaatacgagcaaactcagcaaaagatatctgagctgagagcgttactggagcacgagaggagtgagaggcggcggcttgaagaacaatatgaagaggtgaaaaatgaagttatggagctgacctctgagactgaagagactactgtccggaaacttgaggatgaaataaaagaatgcaagggtattctcaagtgtggtgtatgctttgaccggcctaaagaggttgtgatcaccaaatgtttccacctattctgctcgctatgcatccagagaaacctcgagattcgccaccgaaaatgtcctggctgtggaaccccattcggacaaaacgacgttagggaggtgaagatatgaacctcaccaaagtgacagtgacaaaaccgacttgcgtgtgaacagcagcaacaaactcccttgtgaatatcgtctgttatgttggcgaacatctagatctaacttgctttattactgggattaaaattaggataagaactggaagaagtgaagttcctaatttatttgctatcgtgtgtgctatgtatgattacccttggcagcgagtggtgtatctgctgggtgtcaatatgctcgaattctagctcctccctgctagcgggtgcatgccagttttattaaggctattccatgtacatggtgtcacactctttaatacataccacataggatgaaaatctgatgtgacatgtgattgaaacatagggagacaccactcatgcaccagattatagacattgaaatctgaaccatctaaatgaactgtaactcatactcttatatatatctaacattttgtcttgtg

SEQ ID NO: 27116 - DNA, 1231 bp, Zea Mays
gatgcgttctaatgaattggctcttttttcattcacgtcggccccgcctcttctccccccgacgcgcttgccgatccgcccattccgccgctaccactctcccgccgccgccgcgcgcctcagccgcccgtggcccggacatggagggcgccgccggggaggagggcgcctccacgccggcggcgagagggggagcggaggcaggggcaggggcaggggcaggtggagggatgctgaaggggaggtcctgcaagggctgcctctactactcgtcaaagctcaggtcgcgagcgcgcggccccgtctgcgtcggcgtcacccgcgcccttccccaagtttctgagcgtaaggttggaaaacttgaactggaagctatccaagaaggtcgttatcttgcagatttcagatatgcatgcattggctattcaatgtacttaaatggcaaggaaactcctacgggggtacgagataagccacgtgcccatctgcctgtttgtgctggagtcgagctccaaaaccacgtcaatataaaccagggcatgcaggagatgatttcttaacgaaatttcagaggaatgcaggtcttgtggccagtggtgtggctaagaacctgaatagagttgggacctacatcaaagacactgtcagtgatatgatgcagcctcaccgcaagcgtcccaaataaaacataggcctgtctctcctaaatcctgtatggaagtaaacattagaaattagatgatcggggaacatcggatcaatcacttcctcccatacacacccagcgcagcagtagcttagctttctgttggtttcagaaactctagagaattgagagaagatctatggttaggaaaaatagccacttgaaacatgttatccactagctcatggggcttcgattccccctgtctcgccccattttgggagccattgttgttttcactaggcccctccggcaaaacaaccacgttccgccccttctgacaataacgtggtgccgttgagaggtccagtgatgcattttttgttggagcattgaagtatcagtgtacgtagatgatatactaaactcttattctgttactactagatacgtgccctcttattctgttactagattagtgccctcttattctgccttttttatctgcttctagtgctgtggcaagtcatggtccagcacgtcactaagcgccctggatgcttgtacaagctcctctggactgaa

SEQ ID NO: 27117 - DNA, 475 bp, Zea Mays
taattggtagcaccaactgaatctgaaccaaaatattattgtttgcagcatgaaccttattcaagtgtgtttctctgaaattgtacaaatgatccttattccttttctgaaccttattccgtatgtattgcttccgatgttccattatcttaaataacaattcatactcgcaacaatacaaccaatgacttagttgcggtaggaagaaaaaagtaaacgaaaaagcagaccaacaacatgtttggttctgctgcacctaacgatatcattcagtcaagcactacttgccacaactattcatgctatcagattattcagctcaagctatcatttagaaccaatagcatccagactccagagctattcaggctgctgcatcattcagttcatggacattacaatagtaattgaagaagctgccaacaaatacaaagcaccatatctctgcaaccatatctctgcaagacaaatcaag

SEQ ID NO: 27118 - DNA, 1972 bp, Zea Mays
ccctaaaaatgaatttcagcaaaggaaaacataagattaggactccgaaaataactcccaatttatttccactgtttccaggcagagaagccacgttggttatttatttgaatacatggatttatttttttatgccaaaatgcctccgtttcaggtcgtagtatgtaccggtacattactgggtcatcgcatatgcaacaagagcagctctggcttctccacgaggctcttccattcattacagaatcttgcaaccgtggccccgtcaacaactcggtgatcggctccaacacatacattgattatggatgaagggtaaacgttttcgtcatcatcgaagcgaggaagcttttgaatccgcccaagggcaatgatggcaacttcaggtaggttcagaagtggagagccaaacttgccaccaatggcacctatgttactaagtgttatagtgccaccttcaatatctgcagcgcttagcctgttttgtgatgccatctcatgcaatcgcgccaattccttcgtgatctagattgaatgagggttattctcaacggaagtattcttcagaggtttggctagaagataagttatttatctccaaagcttgagtacaagaatttattttcatttctgctgaagaaagaaataacttctgaaactatccaaacttactgtagttcattgttcgaactattaggacctagcaacaaaatcacagggataaatcttatagatcaaagcaacaaaaattatcatggattccgtagaaaaaagaagttgctactaacctccaatattgatagcgactgcactttcttgatgtttggcacgactaatccatgtgttgtagccatcgccaccccaatgttgtgaggccctaacaaaataaactatttttcatcaccttcaccacaaaataatgcattgaatagtcaaaatggtgtaatacatggaaagggaaatagcagagtatcattcatagttgaactttaaatcacacgatgtattgtcataagtgcaaaaaatacaatcctgtaatagaaccactggtattgtattcctgtcatatgaacatgaccccttgtcattcatgttcaaattgttgcacgaaacaattaagaagactatgctaagctactccttaaaccttcctgctacaataagtggatttcttggtcgtagtttgaagatgagaagggcaaacattgagaaaaaggagtgtacatgtttacagagtaaattagcagttgaatgggaaaatgggaaaaaatagatcaaatttctgaagttctgcaccagagccatcagttaaactgttttctgtatccttttctgggataaaaggaaacaagagcgaaacgaaaaactcaaagattgcatacccttgaacacaacttcgttagtttcctcaatgaaagaactgttcaacatagggtatttactcagtgccatagaaagtgactttatgaggaacggaaggaaagtgtgcttgatagtttgatccttgttctcattttgaaatgtggtttttagttgcacaagagaatcacaatttatctcctctagataatgaaaatgtggaacttttgctgccaggctcattgatttgaccattgatctctggtatcccctgcagaaaggaaagatcagcttaaaatcacacaaactaaagcaaccatgcatatgacttatcattacaaagtaagggcaggagcatggaagaccaagtgccgcaggctcccacgtgagtggggtctggaaaagggataaattaaaccgaagccttcccccatgaataaggagaggttgttttgaacctatgatctgatgattcaatgagacagctctcaccactgcacaaggatattttgaaaacttttacaatacctgagaaggattttcttatcttcatagaagtcctcatcgagtaatgctttcccttcctctagtaactcaacttgaccaatgttcc

SEQ ID NO: 27119 - DNA, 1800 bp, Zea Mays
atctcgcaagcagcagcagagcagaaactgagggaagcgagggacggcgatggcgggtgcggaggggagagggccgagacggagccgcgtggcgttcgtgctggtggacgggatcggggacgtgagcgttccgtcgctgggcgggcgcacgccgctggacgcggcgtgcgcgccgcggctggacgcggtggcggcggccggggtgaccgggctcatggaccccgtggagccggggcttgcatgcggcagcgacacggcgcacctatccctcctcgggtacgacccacgggagtactaccgcggccgcggcgcgttcgaatccatgggtgccgggctcgccatggcgcctggcgacatcgccttcaagtcgaacttcgctacactggatgagaacactggagttatcatcagcaggagggcagatcggcactttgaagaggaaggccctatactctgtgctgcgttggatgggatgaaacttcggtcgtttcctgagtatgaagtcagagtaagatatgctaccgagcatagatgtggtgtggttgtcaaaggaccaaagctgagtgggaacatttctggaactgatcccttgaaggacaaccgcttgcatctgaaggctgaaccgttggatggctcagaagaagctaaaaacactgcagctgtggtcaatgagctttctatggagattacgcgcatactggtttctcaccccatcaacgcaaagcgtgcagctgaggggaagaacatcgcaaatgttgtgttgctgcgaggttgtggtattcggattgaggtgcctgcctttgaaaccaaacatggacttgcaccttgcatggttgctcctaccaagatcatagctggcctgggactgtcactggggattgatatccttgaagcacctggagcaactggagattatcgtactctcttaacttctaaagctaaagccatagccaaggcactctctgcccctatggatacaccacctcgtgtttttgtgcctggagaggatggatacaaggctggaaaagaaaatggatatgactttgggttcctgcacataaaggctgtcaagttgaaagtacggggtctagaagctgttgatcgagctattggtcagcttgcgaggcttctttgggaagctgaaaaggccggacactatcagtactttctttgcgtcactggagaccattctactcctgttgaatatggtgatcatagcttcgaacccgtcccgtttgcaatatgcagactgagagattatgcaggagccattggggaggataatattatgaatacacagctcgacgattttcccctcccttcggtaaaatccggagaagatttgctcgacagtatagaatcactggagcacaagcctggtcaacttaaagctttcagtggcgacagtgtgtgtgagttcaacgagatcgccgctgcgaggggctgccttggacgattcccaggaagcgagatgatgggcatcattaagaagtttatcaaggccaagaatgattaatgctggttgaaatgctaacctttagcgtaatatattggccataaggtttattatcaatgtaataaactaataatgacagaatggagcaatatggaagaaccgtcttgattggagatgaataagagataccttggtgaaaaacaatgagatctgcttatgtacattgtacccagtgttgggtcactttccggccacatgaatgagaaattttgatggaagttttctcctctcttttttgcggggttgggttaaggagtccagacttgaagcttcttgcttagccg

SEQ ID NO: 27120 - DNA, 1947 bp, Zea Mays
ctccccccatcctccccgccacctctcaccccccgcaagcgagtcagccaagccaagcgacgcccaacccccgcctccattcccgggccggagacgcgcctgcctggccgcgacgccgccagccatgggaatggggccgctcgacaacgccgcgtcggccgcgctggaggccgccgccgccgccgccgccgccccctcgcgggcgggctcgtacgcggtgctgcagtgcggcgaggactcggagtacgtgcggcagaagtacggcggctacttcgccgtcttccgcgcgctgctggaggaggacggcgagaggtggcgggtgtacagcgccgtccgcggggagctccccgccgacgccgaggcagccgggttcgacgggttcgtcatctccgggagctgcgccgacgcgcacggcgacgagccctggatcctcgcgctcgtcgacctcacccgccgcgtccacgccgccggcaagcgcgtcctcggcgtctgcttcggccaccagatcctgtgccgggcgctgggcgggcgcacggggcggtcggccaagggctgggacatcggggtgagctgcatccacccgacggcggcggcggcgcggctgttcgcgccgctgaagctgcccgtgcacatgccggtgatcgagttccaccaggacgaggtgtgggagctgccccccggcgccgaggcgctggcgcggtccgacaagacccgcgtcgagatgttccgcctcggcggccgcgccatgggcgtccagggccacccggagtacagcaaggacgtcctcatgagcatcgccgaccgcctcctccgccacaaccacatactggtaattaatcataatagtaacgacagcgtgccgagtgttcgtttgtctctctgtctgtctgtctgtctgtctgtctgtgacatggaaaaaaaatatctgtccttgttttgtttgttgttggcaggactgccaggtggaagtggccaagacgagcttcgacgtgcggcagccggacaaggagctgtggagcaaggtgtgcaggggcttcctcaagggaaggctccagtcgtcgcagcagcaaggtgtggcgctatagcaggaggaaattggggggcattggatgcctaggttaatccgtcatattgtttgttttttattatatgtgcttcagaactcaagagttgtacagaaactgctatcttcgtccgaagcattaataaaaaaaaaggagggaaaaaattgttcgttggtttggttccatctttccgtggcaccagttcattctcgtagtgcctttgcatccacttcttttctttttaacacaccttgcatatgctgctttcatcttcggctcatttgtggactcaaactaaacgactacgacagcgctgtccgcttaccgtcggggtatctgtcgttggagctgatttttacggaggacaaaaaaaaatatctgtccttgttttgtttgttgttggcaggactgccaggtggaagtggccaagacgagcttcgacgtgcggcagccggacaaggagctgtggagcaaggtgtgcaggggcttcctcaagggaaggctccagtcgtcgcagcagcaaggtgtggcgctatagcaggaggaaattgggggggcattggatgcctaggttaatccgtcatattgtttgttttttatatatcaagagttgtacagaaactgctatcgtcgtccgaagcattaataaaaaaaaggagggaaaaaatagttcgttggtttggttccatctttccgtggcaccagttcattctcgtagtgcctttgcatccacttcttttctttgtaacacacgttgcatatgctgcttgcatcttcggctcatttgtggactcaaacaaaacgactacgacagcgctgtccgcttaccgtcggggtatctgtcgttggaactgatttttacggaggacaaaaaaaaatacaa

SEQ ID NO: 27121 - DNA, 295 bp, Zea Mays
gcgctgtgcagcagtagctgcagctgcagcctcagtcgaatggtaactacatcggcaacctctcacaacccttgccgccgccggctgctccaccctgctgtcgccatgggtaaattccgcaagctcgaccgcggttactcccaccgcctctccatgctcaggacgatggtgtcgcagctggtgaagcacgagcgcatcgagactaccgttgccaaggcgtaggaggtccggcagaaggtggatcagatggtgcagctagggaaggaggttcgtggacagggagaatgagcttcga

SEQ ID NO: 27122 - DNA, 1087 bp, Zea Mays
attggatctactagcagtaaaccatgagagggaggagataagaaacatgattgagcacgatggttctgccaaagggattgtcttcagccagttcacatcattcttggatttgattcagttttccttggagaggtccggcattaagtgtgtccagttgaatggagccatgaacattaccgaaaagggaagagccatagacaccttcacccatgatgcagactgcagggtcttcttgatgagcttaaaagctggaggagtcgctctgaatctcactgtagcatctcatgagcactaggtttgtgataaaggacacggttgaagagcgcatactgcaactgcaacagaagaagcagctggtgtttgaaggcaccgtgggggactcgccggatgccatgtcgaagcttacagaggcggacctcaagtttctgtttcagatctaaatgctgacgtagttaagcatgagtagggagggccaggctatgctaggactaggagcactgacttgttggaagttggaaccctgacgctgccataacaccaggacggacggggtcggcggtgcgtagatcgactgctgctgtgcctgttggaactgatgtacttttgcagtgtgtgtaacatcgatggcagcgactagcgaggctttccgttggagtagcccgtttgggaaagaacagaacagggtgttgtaggcctgtgtagtgtggggggcgtgcagcgtgctggtgccgcaagaggtgcggtggggtgggggtacagtctcagtacagggtactggtgtgcgctgagtgagcacttgagcccaacgcgctcaattgtttgcaggcggtcccccgcccccgtatctcgtggacaggcaggtgggtaggggaattgtagcagcgtgggaagcggcagtgacactgacaggaccatccgtccgaacgccttttgcagggcggattgcgaacaccgaccggattcatgtgttctttctcttgtgaagagaccgcaagagctgccgatgcacaggtgactagtggtagtagagtctggcagttgtctagtagaccgatctggccaaaacaggtgaggcggtggcagcatc

SEQ ID NO: 27123 - DNA, 1870 bp, Zea Mays
aaacaagagcagtcaggcgggataacaagcagaggtttagtctgttggaggaagatggcgagctgttgatccgggcgaaccagggacacacactaaaaaaatatagtctggaggtgacctcaatgtaattcaattagtgatggaacatttgggagtctactcattatgtatttcttctatctggaaaaacactcaagggatctttgtttagaggatggagacctaaatctgaccgaccttcattggtggataaatatgcagaaaaagattgcaacgtgatccgggtgtcagagattcagaaggtcttggacatcgccgacgagcgtagcctcattgacaccatcttcttctgctacctcgggtgcaatgcaagctaaggtggtcgacaatggtgttcgcggcggcgaactcgcagcgcagccaggtgatgaagccatcgcgctcgtcgacgagccaggcgacgggctcggccacggcggtgccgggggccggcgaggcgatgacggcggcggtggaggccatcgccgtgcgtccctcaccactgcgggccgcagcatagcccagccagcaatgccgaggttcctccaagagaatccagagtatgttgcacagggtgtaactttagctcagttttcgttccagatacctatacctctgcggcaggactatgtcaaaaagaaaccgaagttgataaatgcaagtgatgaagcaagtacaattacctctaagtcttctgaaccagacgaagtgaaccctatagcctgggcagttcctacaaaacatgagggcgatgccagtgaagaagcttctctcgccgatgagacacttgcatcagaagtagtgctaacccggaagaggaaaataggaagctctttgtcagtagagccaaaccatctctctgatgaacttgaaccaaagttggaggatgcttagaacggggagacgtctaactgaaaagtaaaagtgggcagcgtcgtgatgccaacttacccccctgccatggttttattggtcctctgcttgtttctcgttttccttgggagttagcttctctgttttatgtggtcgcacacggccttatttgtagtattacaccacaaaagctggctgacccccactgagggagggtgattgatgcaagcattgtgtatgatccttggacaagggaatcacggatgtttggttttgtcaccatggctgctactaaggaggcagatcactgcatcaaatatctggactgttctgtgttgcaaggtcaggtcataattgtttagaagtactctacacagaacattttattgttttgtcttcaccaccgagaatccaagagcgcctcccatagcctccacatccacaaggtcctgcttgactgcgacgacgtccaggctgatgccctcatcgtggatcgactcgcctcgctctagaaggagtggcccctctggagttgaatatgcagttataaccaatttttaccccttttatcctagaagagttgccaagacacggtataagaccatgataatagactaagagaggatttgtctctaattattatatgttttatttatgcagtcccatgagaactttgagtatttgcagattgatttattaatatattaaagttaaagattgtatgtgttgagtatgtatccattcttgttggaagtgtcttgcaattccaatccaaggatgtataaaagactgcatgggctaagtatgtgttttttcatgtatttggagtatatatactttttgttgcttgagaacatgtatgtacatacatagaagcttgtcaattgtgtgaacttgagttgatccctgtctaacctgagtatatatatatattttgttgcttgagaacgagtatgta

SEQ ID NO: 27124 - DNA, 1216 bp, Zea Mays
ccattcgtttctcccctccagcgccgaggccgagtacctcactgtggctaatggcgtcgctgaggcggcatggcttcgtcagctgctccaggagctgcacagtccgttgacatggagcacacttgtctactgtgataacgtcagtgccatgtatctctccaccaatcctgttcagcaccagcgcacaaatcatgttgagctcgacctctacttcgtccgcgagcgtgtcgccgtcggggatgtgcgagttctctatgtcccgaccacttctcagtttgtcgacatcttcaccaagggcctaactacatcgttatttgaggaggtttggtccagtcttaacatctgtcgtggctagaatttcgaccacgagagtgttagagttatttgtggctttgtattgtaatggggtgttttctatgtaatgggcttagggccaacaactctattataaatatagctcccccaaccctggttagggttagggtttccagcccactaacagattgaactatgactagattagtcatgcgaagattttaaatatttgtggattgatatgtctacaggtccttccgtgactatggagaatccgtcttgagacatttagagaatgcaatcagcaaagacccaaatctccgtaaagccccggtgaaccatgagggcgtaagggtttcaggatatggtgggtggttcttgctgaggctctctctgcatgatcctgttcttcccctaaacattgaggcacagagtaacgatgatgcgattaagctggggcttgcggttcttgctgctgtgaatgaatttccagcactggatgtgacggcactgaacaaattcgtgcatcagtgaatataagggacggacattggcatcataatgtgatcagcttcgcatggtgtcgtgttcgccccggtcgaacatgttctacatgtggcacgagtatcatacagaaatataccagtttattacttgcacaggctttttagtttggaaagacaagggagatttcagtgttgagatgattcttgtgtgtgtttataccagctatcagagtaagaatatgcgtgcgtactgttgaggctgatctttacttgagaataaggtttgagttacctgagtatttttttaaaaggatcaggaggcttgctgtgatgtgaggccacgaatttgccaataagtacctcgatttttctttagcgatttcacattggtttga

SEQ ID NO: 27125 - DNA, 1502 bp, Zea Mays
aggagcccactcttgggcatacctcagttccaaaaagctcgcaacagccagccctaggtctgaactctctcggacgggtgacaggctgacagccgccgcccgccagctttggagagccacggtgacaggccgccagcagccatcgacggccctccctccacctcgccgtcgtccctcttcccccatctcgccgagccatcgtccctccacagcaggaccacctcaccgagccgtcgtccctccacagcaggagtgcaggaccgcatcgccgagtcgtcgtctctccacaccagctcgtccggtccagctcactcgcggtcgcgaccatctccgtccacctcatccctccggcaagcagttgctaaactcatccagggtcagatcagcagctcttgccttatcccgctggctggccgcagcaccggtggtgtggtggaggatggcatcgaaatacgtggccagggtaccgtctccatggtgggcgccacaacgtcgtttggttggttcatgggtttccgtctgctcggtaaaatgcggtgcattgggaggacgggatgttgtgtgcgctgctgttagcttcagaccatgcatcgacattcacaaggggaaagttaagcagattgttggttctactcttcgggattcatccaatgatggcatggaacttgtgacaaactttgaatcagacaaatctcctgcagaatttgcaaaatcatataaagaagatgaacttcttggaggacatgttataatgcttggctcagatcctgcaagccaggctgctgcactcgaggcactacatgcatatcctggtggcttgcaagttggaggtggaataaatttgcagaatgcaatgtcttaccttaatgaaggggccagtcatgtgatagtgacctcttatgtgcttagcgatggcaagatgaacattgaaaggctgacaaaacttgtcgagctggttgggaaacagaggcttgtgctggaccttagctgtcgaaaaaaggatggcagatatactattgtaactgacaggtggcagaagttcagtgatgtgtttgtggatgaaccggcattagaatatctcgctgccttcgcagatgagtttttggttcatggtgttgatgtggagggcaaaaggttagggattgatgaggaacttgtggaactattggggcatcattcaccaatcccagtaacttatgctgggggtgtgtcaacaatggatgacctagagaggataaagaaggcaggcaaaagtcgagtagatgtaactgttgggagtgctctagatatatttggaggagatttaccctacaaagatgttgtcctttggcacaagaagcaaagtatggttggccaagtgtcaaggaacatgtggtagcgatcagtattgccagaatttattgtgtatcgctcgctaaaagcatatttattttcattacaaaacttcattgtgcgtttgaattactgagctttcttttgcttttgcttttggttgtttagac

SEQ ID NO: 27126 - DNA, 2285 bp, Zea Mays
gtgagccaaaccaaaccaaaccgcctccagctccagcctcctgtcctgctcccttcctcccctgcctgcctgccgcgcaccactccactcgagtgactcgagtcgtcctcctcccaccacctcccgtccgttgcgttgctcctgcccgcgcctcctccatccaccacaccagtccgtcgttaaagctgcggcatcggcagcacacgccgacgggtacaaggagcactcattgcctccccatctcgtgtaggctctccccctcctccgcgctccgtccgtctctcatcaccgttccgccgccgccccacctctccctcctctcgccgccgcctccgaacccgccacggcgcggcggagatccaaccggacggatctggatcgacctactccgacaccggtaaggaagccaccgcttgctagtccgatgcattgtccattctactctatgcgcaatcctgccctgccctgcgctcaaccgaaaatctctgtttccgcaatggatatcatgcatgtgatatatatggattcgtcagctcagtccatccactttacttctttgttttgctttcgctactagttttcgtatttccctccggttaattacaaggcctgactgttaacttctgggcctccttcttcagctttccgaagatagatagatagataacaaggttgtgctgtgcttgctgtctgttgggaagtggaggaagctcaataagttgatatccgcctcgagctcgagggaaccggtgggcaggtacctttaagatctgacccagttcttgtctccgctgttctaaattctcacaggttggttgcgcaacggtccaagaaatgagcctaaaccaaaagcaaaagaaaacaaccaaacctgtgcagcttttgttttgtttagcctgcgatgcgatgtgtccagtttgagctcgagtctcgagagcatgcatgtgttatcctttgtttttctcttttattctgccaccaacttgtcacattttgccggccgttacgtcgcgtagaatgggatcataatatatactccagtataaaacataaacaaacggctgcaaagctgcaggttttgtgttcctatcctagcacataggataggacatagccgctgcatgttgcgaaggatatgagcacgccaggtccagccattgatttcttgcttcctttttcggttgtagagtcagtgggcgcagcgcattgccttgccttgccttgcctcatgattctccgtttggtaaactcatatttatgaccatgaaggatgtggcctacattgctggatctgctgctacattggtggtgccactgatctgggccccccgatcacgagcatggacagaactgccaataatgcggtattggatatcgagagccttcctcaaccgcctgataaatgctgctctgggagtccgaagatgatcagggccttgtcgcgtaagggttcgaaccggatggagaggaggggcggcggcggcggcgagcaggagcaagaggatttggcgaaaaaacttgtcatcaaagttgtgccgtctcaactggagcagcagcccctgggtcagaacaaggcgctggtcgctccacattgcacacctgttcttgttgattctggggaagggaggagcaaaagattcattagccggttcacgtccatcaaccctcggaagattctcctcttgttcgcaacgctgtcgagcgtggggacaacgatactgatctacttcacgctggcgatcaacagcaaagcggaggcctagtcgcctggagacacccaccaccaccatttgcgtcggcgagcgggcggcggcagtacattccgagcttgagtttttatttttctctatttttgtttgtgaggtagctgccgcggcgagattagatgcagcctgccgctcaggtgtctgtatccattgactgagtgagagactgcttcagtgggtgtcattcttcctcgcgtgtatgtatattggtggaatcgttgatgtgacttttttagtcttcaattatgtgcagcagatcatgtatataacaggagatctgttgaagacagatcggcagagaagttcaattcggattaaaccggctgtttggactcctgcagttttaatgcatagagacaaaaaaaaactataacagtagaagctggtatgaattaaagccaagtaaatataagacaaatgaccataaattgaacagtgatatatatacaggagggctggtacagtgctatacatggcccttcttctagttataagactgtcactctaaaatagaaaacg

SEQ ID NO: 27127 - DNA, 422 bp, Zea Mays
gctgatgggaagaaacagaaaagtcaagaaaaggcagttcctgcagcttcaaaatcaagtccggcttccaagaagagcaaggatgacgatgattctgatgaggacgagactgatgattctaacgaggacgagacagacgattctgatgagggtgagggtttgtctcctgaagaaggcgatgatgatgattcaagtgatgaagatgataccagtgacgatgaggaggaagacacttcaactcctaagaagcatgaggcaggcaagaagagagctgctgaaagtttcgtgctgaaaactcctctatctgataagaaagcaaaagttgccacgccgtcagctcagaagacagttcaagttgcgttttctacatggccatggggaccatctgccgtcattttctttttgtgatttggtgaaaaagg

SEQ ID NO: 27128 - DNA, 1467 bp, Zea Mays
gtctttagccaatgatttgatttattgtaggttttgcaagagaagggtattcatatctgggatggcaatgcttcaagagagtatctcaacagtgttggcttggcacacagggaggaaggtgatttaggtccaatttatggatttcagtggcgtcactttggtgctgaatacactgacatgcatgctgactatacgggaaaaggttttgatcagctaatggatgtgattgacaagatcaagaatgatcctgacgaccgtcgaataattttgtcggcgtggaatccttcagatctcaagaagatggctcttcctccttgccacatgtttgcacaattctatgtggaaaatggggagctatcttgccagatgtatcaacgctctgcagacatggggcttggtgttccattcaacatcgcatcatattctctcctgacatacatgattgctcaagtttgtgatctttctcctggagattttgtccatgttataggggatgcccatgtctatagaaaccatgttcgagcactggaggagcaaattcagaagatgcctaaaccatttccaattttgaagataaatccttcaaaaaaggatatagattcttttatggcatcagacttcaagctggttggctatgacccccaccagaagatagagatgaaaatggcagtgtaatggtggcttggctggagccccccatcctatggactcggtggatgtaatcagtaggactggtactacataaaaattaaccggacaccgcactagcttgtttttggtgatggtgctgaatgttcagtgggagacgttttctctgatttatcagttgcgatttgcgtactatggtcgcttaagtcaactctacaaaatcggctcccttttatctggagccagttgattactcgattgcgagtgtgagggatgatctaggcataccctgttgcaagggcctactgggtgtgtgccggcccccatgaggctgtgacgattgcgccagtccagtacctcgtgagaattatgtaaccgaagttgccgtgtacctgggagaactcccgtactgtttggtgtttgattgcctatttcactttgcagtttggtcacaagataacgacttgctggtagggttttgagaacacattctgttgcgtttttcttgtgctttctggggggcagaaagcctagcgccgtgcttgccgaagtcgggctagcgcttgcacttgcagcggcggtgtacgatttggttggagcgtgaagtctcaagtgatcctgcaactgtcctgtcagttaaactcaaagatgttggaaattgtagtacgatgcgacccctgcgagttttgtagagttgaccctctttcatttcattgtttttttaattcaaatcaagtttcgttaggcctggattcctggttcctcttggctggagccatgagcctttgccatcgctcctagcactgtggatattcggag

SEQ ID NO: 27129 - DNA, 1949 bp, Zea Mays
ctctctcacacacacttgcctaatccagccacccgactcctatcggttaccggcgacctcaccggcggctaaaaggatttgacttgcggccgccgccgcgcgtcttcgaccgtgctctcccaccccaatctccgggttgattactaccagagactaactcgaatcgtcgatgagcgctcgatcgatcccgtgacggagcggctcggttgctccaaagctccgttctacgccatgctcgccgccgccgccgccatggcggtgaccgtccctcgggcggcttctcattgttttccagcaaatacggccaggaaatgtaggacttgctggagctgtcgtgcggcaagagtcgaggctgggcactcccgattggaggtgagaaaagtcacctatcgacctcctggaactgaacagaacttgttgaatgaaattaacctctctcttcaggaaaaaagttttggtttgatatttggacggagtgggagtggaaagacaacccttttgcagctgttggctggtctatcagaacctacctctgggtctatttgcattcagaagtatgatgatactgggaatcctattggcttgcctgaactgctaacttctcaacgagttggaattgtatttcagtttcctgagaggtatttcttagcggatactgtacttgaagaagttacttttggatggcctaggcaaaaggcagacctcctattaaaagaacagctcgctttaaatcttcaaaatgcttttaactcggttggtctgacaaccatctcattagatgaaaatccgcaagctctaagtggtggatttaagaggcgacttgctttggcaattcaactggttcaaactcctgatctgttgctgcttgatgagccacttgctggtctagattggaaggctcgagctgatgttgtgaatctcctaaaggacctgaagaaacatcatactatactggttgtaagtcacgatctaagggaactatatccactagtggatcgctcatggcgaatggaaatggggggaagtttgaaggaggaagctttgcctgtctaaacatgtgcttgtcagtatagctgtcagacagcatgtacatattggtcatccaaatctagtcacatcaactacttttacaaacttagattatgtcggctgggaaatttcttcaagatacaatggagtcagagatggttgtgaacagtcatttggtaatgcgtggtaacttccgagcacgaaaaaatgctagaaaaaatcagcagagatcgtgaatgttagcacggagctttgactactgctggaacggggaacagtctgacgcagacattgttgagctaccatgaacgttgaacattccattgaagtttaggttcaggaatcaggatccagcgatagctccttgttgcaaacatgaggattgcagaaggcctgtacactttgaaaggtggggggtcaagtttcaaaatggtgcggatgatggtttggaaatggtttcctttgttgaagtttcccactggagagattcagagaacatcatttacttgcactatcgatagtctgcatcattcacaatttgctgttccttacgaactcatttgtctggattctggaagaatatgttgtgcacatgagtagattcttgtttcctccaaagatctttgacctgctgttatcaccacttctggcatgcgaggagcaatctcagtcatgcagttatgtatatgaatgtgcacctctgtttgaaacgttcaaaaatgaactagtgggtgacaaatattcgagaacggaggtagtatatacaatattcacaaggcgtgctgtaaatatgtatccacttttacaaacgaagtaacctactgagagttacttgtgccacatagctacctacatcaatgtgtgcatgttcaaagcacgaaacttttctttgtcttctagactcctgttgtcgctttcag

SEQ ID NO: 27130 - DNA, 241 bp, Zea Mays
tctcaggaaagcaacgccttgtggagtatggaccgggagctttgagggagtgacgccgttcgtggctcagattactcagcgagggcctacaggcactgttgttaatcaggacatggacatgccctcattttggagttggtagccttggtgatcttacacgtgtacaagctaaggatagtcttgctaatgcttgtaaacaaattgtggtgtgagaactttttggagaaaaaggtgaaaaaag

SEQ ID NO: 27131 - DNA, 3764 bp, Zea Mays
caggccacagcctcactcatgcgttcacaatcacacctgctgtttttcttctccagttcacctcgcgcgcgtgacaactagggagcccgccgccgcccaggtcttcgtcgaaccctttgccggcaacgagaacccgccacgccagctccgtaattgtggcgatggttgctcctacgggatcttgaattcttgacacacacacacaccgatggtaatggtgatggagggaggaaggacggaaggcgacgagctgattgctgattatgtggattgccttatgtctctggacaccaacacccggcctgtccacagcgatggtctcatcctcggtgctccaggcgggggaggagggacggtcgatgccggaactgagccagatgccatgagagatatcccctcatccgaggaccccaatgagcccgtgctcggcatgacgtttgagtccgatgaggccgccaaggcattctacaacgactatgccaggcggcttggcttccccttccgcgtcggcaggtctcggcggtcgaagggcacagaggaggttgtcgtcatgaagaggttcgtttgctccagggaaggggtgtacaagaagaaacagacctcgccggatgaggcggcaaggaagcgtgagaggatgtctatgcgagagggttgcaatgctatgatggaggtggttagggaggcggaccattgggttgtctccaaacttgagaaggctcacaaccatgagctcggcacttgtagcgccaaggttgggtaccttcgtgcgagaagttctcttggtggctctgataaggccacaatggtggggcctgacgagatggcgtttcttaggcagaatgtcctgggggaaggaggagacgcccagggccttcttgattatctcaagaagatgcaagccaatgacccggcgttctgccatgctatacaggttgacaagaatggctgtgtggtgaatgttttctgggctgatgctagggccaaagcagcttatcggcatttcggggatgctataacgttcgacacgacgtacaagaagaacaagcatatgatgccctttgttactttctcgggagtcaaccatcatctgcagactgttatttttggatgtgcattgcttatggaagagactgagttctcgtttatatggctatttgaaacatggttagcggcaatgggaggtaaggcaccatgctcattggtcactgaccaaaacagggccatgaaggctgcaattgggaaggtttttccgaattcctgtcaccgtttctgtaagtggagtattctgagtagaaccaagcaaaagctgacccatacatactcagagcatccaaccctaagagatgagcttgagagctgtgtgcttgagactgaaaccatctcgacattcgaaaccacttggatgtcaatcattgatagatatgacttgagaaagaattcatggcttcaagcaatatacaatatccgccaaaaatgggttcctttgtacctgatggatacattctttgcagaaacgttccccacatggaaattggaaaccatgaatgatttctataagaaatatttcaatacaaaaacaacgcttgaagtttttcttaatcagttcgatttgagcttggcaggccgatatgaggatgaggcaaaagcagatatggatgcctacttaaataaggcaactacaaaaactgcatcgctaatagaaaaacaggcagcagggacctataccaaagcagtcttcagtaggtttcaggaggaatttacagagtctctagggtttatcattcagaaaaccgaagacggctgcataagtaaatacagcatcacaaaatatgaagatccatcagacacattctgcgtgacttataatgcttccaataagatggcaaactgtagttgcaagtactttgaattctccggtattctgtgccgccatattcttggagtatacataatagttgatccacgaacacttccaactgaatattttatgaaacgttggacaaggaaggcaagagatgatgatgctttgttagaagataataacaacaatactcatgatgaggatgcttctcagtccaccacaagccgctacaataccctatgtgctgatgccatcagatgtgctgagaaaggagctggatcggaggcagtatataaggcagcaaaagatatcttacagaaggcatatgaagagattattgcttatgaaagaaatactggccagggatctcaaagggatgttataaacatcaacgaggatgtcacgattgatgatgcaatgaatgataaatctatgccagattctggacgaaaggtgactaatctactaggccaatttgttaattccacttggtctccggtctaatccacgtttttgtcatctctttggagatgaaaatgtgatttagcagcattagcagctgtcatgatcgtcatgcaatatctattttggattgggtagcagcgaacaactcaacaacacttggacatttcaacatgaaatgatctccatgagaagaatgtccgcctgacttcagtagaccaggacaatttagtttgaagatgctggatcatttctgtgatgattaagtctttgtcacttcaataagcgtcctgtatggtgttgcctgtagccctgtatggccgaagctactaaaggtaattagggtttgataaagttaaagcaaccgagtcccaaacttttgatcttgattcgtgcaaacggggacgatgcaacacattttcaaggtattctggacctttatgaagcatgctctgggcaggtcatcaacaaagacaagtcttctgttcactaaaaatacgagaagtgagacgaagatggcggtcatgcaagctctaaatttaacacaagggactttcaacgacagatatctgggcttaccagttcgctttgggcagtccaggacaaaaacttcttagtacttaaatgataatgtgacaacgtattcaaggttggaaagaaaagctgctgtcaaaagccagtaaataagtgctgataaaggccgtagcacaaggaattccaacatatgctatgggatgctttgacttaaggaagacttgtctgctcaaatcagcaatgccatattcagatattggtggagtcaacaggacatgggaaacaaagtgcattgggtgaattgggctaaaatgaaaacgctaagggcttgttcgtttcacggttagtccatgtggattggttagtccatgtggattgggtggtattgagtcggtttaaatccataacaaatcaaaatccattccaatacacttcagtccacatgaaactggaataatcgaacaaggtctaaagagttgtgatggaatggagtttagagatatcgtagtatgttcttttataaacttagtcaaaactaaacaagttcaacttcaacttataatgaaattaaatagacgaataagtacattgctaatgctggtcttcagagagtgcgatggtttgtttcatatgattcactatgatgcttgtatcatatataattaattcatgttccgcattcagtgacagattattgggatgatgccacaaactcctaatttctgttacaccggatacttctgttcccatttgtttgctgaaagacagcttgccccggttgcaattaagttcattgctttaaatctgcagaactgagggtactgtacaaaacgaggacgatgtagctgcccagttcttcgaggacgctgatttcttgtttaacgccgatgcctccattaatccgcat

SEQ ID NO: 27132 - DNA, 3139 bp, Zea Mays
caaatcacaatagctgctagcctgttactgcaggcctctctctctctgtcctctccccagcccgcctccgcttctcgccggactccggccgccgcccgcaacctgtgcctagggctcccgcttccgccacacctgcgcactcggccccggagacggctccttgacgagaggcctgtgggaggagttgcagctgggacgcccggtcggacttgcgtctccgcagctgggagatgctcagctcgtcggcgtccaggagggacgccgcgaggagcggcgcggagctccctcggccgcacgcggtggcagggatggcgcggagcggggagctgcccaagggcgccccctccgcgacggcccctgatgcggtgcggtgcgagggatggatggtgcgccacggccggaggaagatcgggaggtccttcttccacacgcgctacttcgtcctcgacaacggcgtgctcgcgtactacaagaagaagccgagggaccacatgatcccactcaagtcaattattattgatggaaattgcagagtggaggatagagggcttaaaacacatcatggtcaaatgatttatttgctatgcatttacaacaagaaagaaaaggagaaccaaatcacgatgggtggatacgatattgaagatgccctagcctggaagaggaagatagagcttctgattgatcagcaacaggatactacgacagctaaaaaccataaagcttttgcttcgttggactttgatatagatcttggaggaccattttcgttctctgaccatgacagcggacccgaagatgaagaagagccccgacccaccttgcttcgcaggacaactatagggaatggccctcctgattctgtacttgattggaccaaagaggctgacagtgggctgtcaaatcagaatgccaccagtcaggcttactccagaaagaactggaggcttcttagatgccagaatggattgcgcatctttgaagaacttgtggaggttgaataccttgcaagaagctatagtcgagcaatgagggctgtaggagtggtggaagcctcatgcgaggccatttttgggcttgtaatgagcatggatgcatcacgatatgaatgggattgtagcttccaatatgggagtttagttgaagaggtcgatggtcatactgcaatactgtaccatcgtctacaactgaactggttttcaatgttggtctggccacgagatctttgttatgtacgctattggcggcgcaacgatgatggaagctatgttgtgctgtttcgatctaccgaaaatcagaactgtgggcctcaaccaggatttgtgagagcttctatcgaaagtggaggtttcaagatttcccctctcaaaagcctcaatgggaggccccgcactcaagttcaacaccttatgcagattgatgttaggggatggggcgtgaactatttaccatcattccagtactactctttgctgcagatgctgaactgtgttgctggtacaaagaacacacaactatttaacctgattgcgtgaatatttttcgcaaacagatgaaattcatacagttccaaggattccggtgatgcataccatggttaatgcggcctcaatgaaaaaggaccaaaaccttcaagaaccagactcgaagaccaaacaagctgataacaaacatttggatatggtagatgaagagtcggaagatgatgatgactatcaagttcctgatgctgatgtggaggaagaacctaccaaatctgacagtgatgctaagaactcagacccaatagatttgtcttggttttcgggcattattcgtcaggatacaaatgagaaaagtcgtaactgttgggcagtgcctgatagcaagatctttaaagttcgtagcaagaactttccacatgacaaatcaaaggtaccagcaggtaagtatctaatggagctcgtagcagttgactggtttaaggacgccaagcgcatggatcatgtcgctaggcggaaaggatctgcggttcaggttgccgctgagaagggaatgttcactttcctggtaaacatacaagtaagctcatgttctaacaatcctaccatgttaccatgtccatttatttctgtcctgcttcgatcttttctcacagaaaggtgaccgcacagagtacaagaaaaattacattggtaccttgcacaacgatctgcatgcctttttttttagtttttttgcgtggttgttatttgttacttccgcagctgattttgagaattaaaagataaacttatggctttcttccaagtttgttcatattgatgttttttcttctatacttgggttaccctggttaagtcacttctctcttgcagattcctggaccaagtcattacagcttggtcctttattttgtctcaaactccttgaagaaaggatcgctgttgcagcgttttgccgatggtgatgatgattttagaaacagcagactgaagcttatcccatctgttccaaaggggtcttggatagtgcggcaaagtgttggaagcacaccttgcttgctggggaaagccgtggactgcagctatttgcgtggtcctgactacttagaagtggatgtagatatcggttcgtccgcggtagccaacggggtcctgggcttggtgtttggcgttgttaccaccttggtagtcgacatggcgtttcttatacaggcaaacacgtacgacgagctcccagagcagctcctaggcgctgcgcggctgtcacacatcgaaccttctgcggccgtgtatcctgtccttgacaacatttcctgaacgggacggacaaatcaacctgtgcagattctttcgttctttccgtccgccccgccacaaaaaggctctcccaatttgttcagccactgcagcattgtgcagctcgatacatttgaggttcagacagacagactgcagcagtccacaagtgccttgtacccttcatacagttttgccatttttttaggtcttttcttttacattttactttactcggtgtagtttgagcttcctacagatattgtaatgcaatagacacatcaaagtgagatatacagatacagcatggttcagaaacaagttcgtgtactttccgattcccgacccactgaaactcg

SEQ ID NO: 27133 - DNA, 638 bp, Zea Mays
ttgagcgaggattacctccccgtcttgagctctaccctcagaccacagcaaagagtatgaagttcttgtgtccatactagagatagccctctctcccaccaccaactcggtcggcccttgtgcacagggcgctatctccctgctagtggtgacctcattatggccagaacgtaatcgcgccaccgcaaatcgtcgtcgtgtttagttttcatcgtcgaccagccagcatacgtcttccccgagcagtttcatgcacccaccgagaacatggactgtcagagctcctaaaggaagaggtggaaatccagaagaagtggtttctggagagaagtctacttctaaatctgttcctcaagtggattgagttgtctaactaattatgtggtagaaggatcctgaatcttatctacaacaaaggtaatcatgagctttctaggtgtccctgtggctggaagatgcttccagtcttaaaggaggattagttaggtttatgggtgagctttggaagggttctaccttcctgctttgtaattaagttatgcactttgagttctatcaggacttgtaataaatattactctttctatgatgtaaaacttgagttttgggaattataaagaatgttttgtaaaaaaaaa

SEQ ID NO: 27134 - DNA, 797 bp, Zea Mays
acttatttgtgcggtctgtcgggtggggtggattaagaatgtccatgaaggaactactagaagccaagcatccaacggcttggtcagaatttgagaaaggactgattgatgagaatgagctggccaaaaagttcttcaaggatggcagatcgtttgatttgcaaggtctaaaagagtgcatggtgagagcatatgaatacattgatggcgtcgaagatattctttgctgtttgaagaaaaataattatgaaatgcatgcttttacaaattatccagtatggtaccaattaattgaggataagctaaagctctcaaagtatttatcttggacattttgttcttgtagaactggatgataaacattgaagcagctcttagtgtaggaatggttgggttgcagtttaaaagtgctgaggcactacagaaggacttgtgtgctctgggagttgaattatctcctcttgtttgtgaaggtgaagcacaagtacaataaggtcgtgtgtgccctatcttatcttatgctcaaccaaactacaatacgaatgtacataatgtatggtgcccttgctttgtgagctatgtcaataaattattgtgctaatctgaatcgtctatcaaatataactgatatgttaactgcacatattctctcctatgaagagctttttgttgtcagttagtagaggtgaatttgttttatcacaaacatgtgctgtcaagcctcagccaataggccctgtaacttcaattcaggttaatgttcgtcgagtttgaggagtttttatcaaaagttataa

SEQ ID NO: 27135 - DNA, 1790 bp, Zea Mays
cccgccccggcctcctccgcagtcccatgagccaggccgcgcccgtggcgaaccctgctcgcgccgcgcctgcccattccccctccgcccccgtcggccaccgggccgcctcgcccgcccggcgcccgcgcggagccacaggcgtcggcgccacagccgcccgctcccctctgccgccggtgcccggagtgcagatccgtctgaccgcgccgccgccgctctcggatatcgctttatccttcgtataattgtattgtcaaactggcacccaccggaatcatatagcctggataaccagcaagctgctctccgtctcctctcatcagtatgtatccagcttttaaaggtgataaatccaagattctgccagtaaagatgccgatctgtagctgtgaagaaactatccatgagttcgagatgttaacacgcgatgctgggcgtgtacagaaggatacactgaaaaagatcctcgagttgaatgctgatgctgaatatctgaacaagttcggcctcaatggcaggactgatgtagagagctacaaatcctgcatcccgctgtgtgtgcacagtgatcttgagccatacatccataagattgctgatggtgatagctccccactcctcactgggaagcccgtcacctccctttccctcagttctggtacaacgcagggaaggcctaagttcttgccgtttactgatgaattgcttgagaccacacttcaaatattccagacttcatatgcatttaggaaccgtgagtatccaattggaagaggaaaagccttgcagtttatctatggtagcaagcaagtggtaacaaaaggcggcatccttgccacaactgcaacaacaaacttgtaccggagggcacgatacaaggaggggatgaaggatatccagtctcaatgctgcagccctgatgaagttgtttttggctctgacttccaccagtccttgtattgtcacttgctctgtggtctaatatactctgatgaggtccatcaggtgttctcgacattcgctcacagcttagtccatgcatttcaaacatttgaggaggtttgggaagatctctgtgctgacataagagatggtgtcctctcagagaaagttacagtgccatcggttcgtgaagccgtgacaaaaatcctcaagcccaatcctgagctcgctgactcgatctataagaagtgtacgggcctgagcaactggtacggtgtaatcccagcactctggccaaacgcaaagtatgtgtacggtatcatgacagggtccatggaaccgtatttaaagaaactgaggcactatgctgggcacttgcctctgataagcgcagattacggcgcatctgaaggatgggttggtgctaatataaaccccacacttccacctgaacaggtgacatacgctgttctccctcagaccggttattttgagttcattcctttggaggtggagaatagtgcctcctccattcactacttagaatcagaaccagttggcctgactgaagttgaggttggcaaaacctacgaagtcgtgataactaccttcggagaaagcgcacagttggggtgcatacatcaaagttatgccttaagcacatggagtaattattgcttgtatttgtggtccaagtccctgcaggctgcagcctatccattaatgtttgttggttcgtgctgtattaggtacctatagctgcacaatgttttgatgttagtagagtgtcaccaaacgcacctttatccatttatgatctcagatggttacttctaacacataac

SEQ ID NO: 27136 - DNA, 3817 bp, Zea Mays
attgccgctccctccatggcaaaagcctcgacacctccttgtccctcgccgttggcactcgacagggcgagtaggctaggaagagcagttagttgcagattctcgggctggacatgtgcgcggatatcatcgtcggcaacgagctaatgcgcggcatctccggcggccagaagaagcgcctcacaacaggggagatgctggtcggcccgaccaaggtgctattcatggacgagatctccacgggcctcgacagctccaccaccttccagattgtcaagtgcatccagcagatcgtccacctgggcgaggccaccgtcctggcctcgctgctccagcctgcgccggaggtcttcgagctcttcgacgatgtcatgctgctgtccgaggggcagattgtctaccagggcccccgggagtacgtgcttgagttcttcgaggtgtgtggcttccggtgcccgcagaggaaaggtgtccctgatttccttcaggaggttacatcaaaaaaagatcaggaacagtactggatacaaaatgaaaaaccatatcactatgtatcagtacctgaatttgttgcaaagttcaagaaatttcatatggggaagagcctcaagaaacaactttcggtgcctttccacaagaggaaaatacacaaatctgctttggtcttctctgagaagtctgtctctactttggagcttctcaaggtctcatggtccaaggaatggcttctcatgaagaggaattcatttgtgtacatcttcaaaatagttcagggaattctggttgcgctagtagcgtcaacggtgttcttgcgtacacaaatgcatacaagaaatgaggaagatgggcaaatctatataggagcacttctttatgtcatgatagttaacatgttcaatggttttgccgagtcatctattcttttggcaagactccctgtactgtacaaacatagggattttttgttctatagaccatggactattgtacttccgaatgttctaatgagagttcctgcctccatattcgagtcaataatttgggtagcagtgacttactacagcattggctttgcccctgaagctagcaggttctttaaacatttagttgccgtcttctttatccagcagatggctgcgggtctcttcagacttgtcactggcttatgcagaacagttatcataactaacacggcaggatcacttgcagtccttttcatgtttacgctaggaggattcatcctaccaaaggatgcaatttcaaaatggttgatatgggcctattattgttcacctcttacttatgcatacattgctcttgcctctaatgaaatgcactctccaaggtggatggaccaatttgcacctgatggtaggagattgggagttgcaattttagaaaactcaagtatcttcaccggcaaggaatggtactggattgctactggtgcacttttaggtttcactgttctgttcaatgtgttattcacactgtcacttatgtacctgaatcctgttggaaaaccacaggcaattctgcctgaagaaactgatacaagtctagaggacagtgaggaaggaaagaagatgacagatataacacagagaacgaaaatcccgacaccagaacctttatcctcaaattctatgatcaccttggataaggtacttgaacagttacgtggccagtccccgaatacttctgatagatcacacatgaatgcttctgtcagaattactccaggaagagggatgattcttccattcgaacccctctccatgtccttcaacgagataaattactatgttgacatgcctgcagagatgaagagtcaaggagtaaccgcggataagcttcagctgctgtcagggatatctggggcttttcgacctggtgttctcactgctcttatgggtgtgagtgggtctggaaagactactctcatggacgttttatctggaaggaagactggaggatatattgaaggagaaatttatatatctggttaccctaagaaccaagaaacatttgccagaatatcaggttactgtgaacaaaatgacatccactctccacagatcactataagggagtccctactcttttctgctttcatgcgccttcctaaggaggtcactgaccaagaaaagaagatattcgtggatgaagttatggaactggttgagcttaacggtcttaaggatgctattgtgggtctccctggtgtgaacgggctctcaacagagcaaagaaagcgattaacagtcgctgtagagcttgtggcaaacccctcgatcatctttatggatgaaccaacttcaggtcttgatgcaagggctgctgcagttgttatgagaactgttcggaacaccgtcaatactggacgaactgttgtctgcactatccatcaaccaagtattgacatttttgaagcttttgatgagctgcttttaatgaaaagaggaggccagatcatatactctgggccactgggtaggaactcacataaagttgttgaatactttgaggcagttcctggaatcccaaagatcaaagaggggtgcaaccctgctacatggatgttggatgtaacctcagcttctacagaggttcagttgaatattgattttgcagagcattacaagtcatcaactatgcatcagcggaacaaagcattagttaaagagctgagtaagccgcctcctggttccagtgacctctacttccccactcaatactcgcagagtacctttgatcagttcagattctgcctctggaagcaatggttgacttactggagaagccctgactacaaccttgtcagaatgttctttgcattgtttactgccttgctgctggggattatattttggagggttggcagtaagatgaagagttcatcagaccttttgatcatcgtcggatcaatgtattttgctgtcgcatttattggctttgaaaactgtataactgctcaacctgttattgccgtggaaaggacggtcttttacagagagcgtgcagctggaatgtactcggctataccctatgctttctcgcaggttgttgctgagataccatatgtgttcgtcgagagtgtcatatacactgttatcgtgtacccgatgatgtctttccagtggaccctagcgaaattcttctggttcttctacatttcgttcctctcgttcctctacttcacttactatggtatgatgggtgtcgccataacgccgaaccctcaggtggcttccatatttgccgcttccttctacactctctttaatctcttctcggggttcattgttccaagatcgagaatcccggtgtggtggatctggtactactggatctgtccagtggcatggacagtctatgggctgattgtgtcgcagtatggcgatgtggaggatttgatcaaggtgcctgggaaacccgatcagcaggtcaaagctttcatcaaggactactttggctacgatccggacttcatgggcgtagtggcagcggtgttggctggctttactgccctctttgcttttatatatgtttactgcataaagagatttaatttccaacagagatgatagtacaagtctcagtttgccatgtgccttgagggtgtatgttcgataaaataaaactatatatatctatctagactctaaagttgcaagagatgtacattgccgtttacttgttagttgtatgttgcaccaatcttgtggctgatgcaaagaacttagaaatcagtctttgtccgtctagctctatcggtacagcgcaaggctcttgaccttgtgatggtgagtttgag

SEQ ID NO: 27137 - DNA, 3798 bp, Zea Mays
cgaggccctatgctacgttcccaaacgctggcgctgcctggcaggctggctggctcggtgcctcccctgagttccatctcctgtcatgccgccgccgcagtagagctaacgagccacgggtagcatgcgccgcggcctgcgtcgcgggttgggcatcctcctcgtcccgctcccgcacgcacccagccgcctgccgccgatctctctcgcggctctcctcccccgacgcttcaatggcttctcccgccactccttctgcagcttccccgtcggggagcgcgccgtcgagcagttctcagacgacgaatacgaccacgagtacgaggacctccggccgtcgtcatcggtggcgaacatcgacgagtggaggtggaagctgagcatgctgcagcgcaacgcggaggaacaggagatcatctccagggaccggagggaccgccgggattatgaccagatagccaacctcgccaagaggatgggactctacagtgagatgtacggacgggtcgtggttgcgagcaaggtaccactgccgaactacaggcctgatctggatgacaagcggccgcaaagagaggtggtaatcccgctgggtttgcagaggagagttgaaggacttgtgcaggagcacctagaccgcgcattcttaccactgaataaatgtggtggcaacacaaaaaatggctctgacatgactgagaatgcgaacctggatgagcagcatgattcccttcttgatcggtcagtcatggagaagatacttcagaggaagagcattcggatgcggaattttcagagaagttggcaggaatcacccgaaggtgctaagatgctagaattccggagatcccttccagcagacaaagaaaaagaaaggcttctagcagccattgcacgcaatcaggtcattgtaatttctggtgagacagggtgtggtaaaacaacacagctgcctcagtttgtattggaatcagaaattgagtctggtcgaggggctttttgtaacataatttgtacacagccacgaagaatatctgcaatggcagttgcagaaagggtatccacagagagaggagaaaatcttggtgaatcggttggctataaagtccgattggagggaattaaggggaaagatacacatttgcttttctgcaccagtggcatcttactaagacgcttactgagtgaccgaaacttgaatggtgtgactcatgtatttgttgatgagatacacgaaaggggcatgaatgaagatttcctgttgattgtactaaaagagctgttatcacgtcgccgtgatttgaggctgatattgatgagcgctactctaaacgcggaactcttctcaagttattttggaggagcgccaactatccatattcctgggttcacacatccagtaagggcacattttttggaagacatattagagaggtcaggctacaagttgacctcaagcaatcaacttgatgattacgggcaagataaagtctggaaaactcagagacagctattgcctagaaaaaggaaaaatcaaattactacacttgtcgaggaagcccttaaaaattcaagcttcgagatctatggctccaggacacgtgattctctagtgaattggaatcctgattgcataggtttcaacctcatagaggctgttctgtgccacatatgtcgcaaagagcgacctggtgctgttttagttttcatgactggatgggacgatattagttgcttgaaggatcaactgaaagcacatccattgttaggtgatccgaatagggtttttctgcttgcatgccatggttctatggctacttctgagcagaggctaatttttgagaagccacctcctaatgttcggaaggtagtccttgccacaaatatggcagaagcaagtattacaataaatgatatcgtttttgttgttgattgtggtaaagcaaaggaaaccacatatgatgctctaaacaatactccatgcttactcccctcatggatttcgaaagcttctgcccgtcagaggaggggtagagctggccgtgtgcaacctggagaatgctaccatctgtaccctagatataaaaagtttgcaagttggaagcattggggagttcctatcagctgctctacagcctccagaaccacgagctgtcgagaatgcagtggaattcttgaagatgattggagcattagatggaaatgagaaccttactgatcttggacgatacctttccatgcttccagttgatccaaaattgggaaagatgctcataatgggtgcagtttttcgatgcatagatcctatacttactgtagttgctgggcttagtgttcgggatcctttcctgttaccacaggaaaagaaggatttggcaggaacagcaaaagctagattctcagcaaaggattatagtgatcatatggcccttgttcgggcttatgaaggatggaaggatgcagagagagaagggtctgcttatgaatactgctggagaaatttcctttcttctcaaacactacaagccattcactctctccggaagcaattcagctatattttaaaggattccggtttgatagactctgatgggaatacaaacaacagtttgagccataatcaatcattggtccgcggtattatatgttctgggctttttcctgggatagcatctgttgtgcatcgagaaagctccatgtcctttaagaccatggatgacgggcaagttcttctttatgctaattcagtgaatgcaaaatatcagaccatcccatatccatggctggtctttggtgagaaggtgaaggtgaatgctgtcttcatccgtgattcaaccggagtatcagactccatattgattttgtttggcggtgctgtagcaaaaggaggcatggccgggcacttgaagatgctcgatggctacattgatttcttcatggaccccagcctgtctgaatgctacctgcaacttaaagaagaactcgataaacttatacagcagaagcttgaagacccaaacttcgacatccacaaggaaggcaagtacatcctattcgccgtacaagagctcgccgccggcgacctgtgcgaagggaggttcgtgttcggccgcgagacgagccgggcccggctccggagccccgaggacgacggcaagagcaacctcataaaggacgggatgaaccccaagagcctgctgcagacgctgctgatgcgggccggccacaccccgcccaggtacaagacgaagcacctcaagacgaacgagttcagggccgtggtggagttcaaggggatgcagttcgtggggaagccgaagcggaacaagcagctcgcggagcgggacgccgccatcgaggcgctggggtggctgacgcagacctccggcgtgaaggctccggacgagaacgacgacgactcgccgctggacctgactgacagcatgctcaagctcctcaccaggccgaggcggcactcgaagaatagctctaggaaacggtgattttttgggcgaggatttgctgtagattgatcgcgcacacgcacaaaaggcatagagagagagagagagataggaaacgtcagctttggttacacgaatgcctcatggtctcgatgtgttgctttgtacattttttatttttatttttccacgctatgtcatcagaatcagaagttcctccatcctgctgattgctgtcaccgtagaacatggtttaaaaaattaaaataactgcctatagcgctgttatttctatagaaataaccttccgaagaatctaaatctacgatattac

SEQ ID NO: 27138 - DNA, 1879 bp, Zea Mays
gctcggcgcctctgcctcggccgctccccgttcccgtcaccgcgccgccggccgccaggatcgcccgccccaccatcctggctcatcagtcctcgccgcgagcccgtgcctggaacgccgcttgcgctaccacgccgcggtcccacgcccgctcccgttccagcgacagggggttactgggacgagatcaaccgtaacctgactgactcactgacggccttgcactctcagcaaaaccgtggcacaagtgggcaccggggaatcagctaggatttaagcttgagccttcgctccaaacctccatggaggcggaggccaggaacatccttgaacgcgccgcggagtcttccttcccaccgctgcacgccgtccaccacctcctttccgtcggggtctgtgtgcgttgcatccttcgcctgcttggagcctatagcagtgcctgctcatatgcatgtcttacggcatcagttttgcattcgttccttgaagaacacgatgagtccataaaaggagggtcatgtccatgtctatcgatgaatgatgcatattgctctgtctgcttgggagtattgctcccaaccttccatcgagatgaaggtctggagacacctaatggcatttctcatattgacaacatgtcttcagtaatatctcaagcagtgcacggggagagttaccaagttgatgagttttctctagaaatttcactaccgccggttatagccgccaatgagcgtgcagttagattatatatgaaacaaaaatatggcaatgagaattggttcaaggacaaaatgtttgcacaacaaacaatgtcagtgaaggaagccttgcgacttttgatagcaccatcactcgagaaactaatgaatgctaaacatggtaacaattcatttagaatccgcttaacatatactcatggtgatgcttcacaaaagcttcatagtttattgccaaatgagcacagccgtaaaaggaaaccagattcaagaaaaggaggtgatgcttcgaatgaggcccataaaaggaattcagcagatggcaaccctatacaaacaagtgaatcagattcattcatctacaagagtcttgagggcatccaagatcaagaattctgtaatgcatttcagttgcctcctgaaaaggtgtttaaaccctgccatcttttaatatcgtgcttgagatcacctacatatcttggtggaagatatttgaagctttcaaggaacgtcagtcagtcatgttggataatagatgatgagagaatgggtgaagcttcagttgaggagataattggggagaatgttcgtgccatctgcagaggtgatagctgcaagttccatgctgctgggagagaagacattgatgtacggatgcttggatctggtcgtccatttctagttgaagtactgaatgttcgatccattccatctgaaactgaagttcaacaaattgaagagagaattaacaactctgaaaagaaatatgtcatagttcgaaatctcaagttggtagataatgaaatatggaccatgatgcgtgaaggagaagcagagaaacagaagcagtacactgcccttatatggacttctcgtgatctgacagatgatgatcttcataatatttctattatgaaggaaatggaaattgtacagaagaccccaataagagtacttcatcgtagaagccccttagagcggaagcgcatcatacactggatggagattgagaaaatcacaggcagctcaaactactacttgctccatctatgcacacaggctggaacatacatcaaggaatttgtgcatggtgatcttggacgcacgcatcccagtaacactacaatcctgataggcctcgttccactttgcctattgca

SEQ ID NO: 27139 - DNA, 897 bp, Zea Mays
ctgcatgcatgccgttccagatcatggctaagggcgtcttcccctagccgcacataggtgagtaggctgccgccgattaaggctgtgtgcaaggcattcccgttggtggccacgtgccctactgctctccatcctccagcgctgtccacacgaggtcgtccttgtgcagcaggcacagctcggcgggctccatcggggaggccataccgcagcggagcgcaaggccggccgcgtcgttggggagcgatggatgcacgcagctggtggtgtgggcatggatatcggcactcggcgcaactctcttttttattgtgattacatatcaataacatctcataccttccaattgcacagatgaatcgaaacctatcgcgtaggacagttcggctaggccggagacctgccggcttgacggagagttgatgcagatctgatcccgcagcaacgtcgaggtagagcgtgttgataacgtgttgagaactacgttaccacggatcaccagatccgctcccttccctcccgtcagcatattaggcgtgagaagatgtggaagacccgtatcccttcccagaagcacgacagtgaaacacacgaaacacatgatgtagggttggacatctgacctctttctcttctctatcttatgagggggtgtacaggttccttatatagagatgtgagacccctcaggggcaaagccgctatttgcccacattaccttgactagggttacttaacaaaaaataaaagtccactacttgtgtgtgcaggacatttggcatgccacgaacgactgtcgcccctcctcggtcccaacgcgacgagcaggtaacttcttctccccactctcgagtccccgacgcctactcagggtcgttcatgactttttagaggccc

SEQ ID NO: 27140 - DNA, 150 bp, Zea Mays
cggcgacgttaggaagtccggagacgccggtgggggcctcgggaagagttatcttttctgcttaacggcccgccaaccctggaatcggttaagccggaggtagggtccagcggccggaagagcaccgcacatcgcgcggtgtctggtgcg

SEQ ID NO: 27141 - DNA, 4806 bp, Zea Mays
aaagaatacagaggggttttggtcagcaactgtgcaatgtggtggagttgatatacttataaagctggttagttctggacaaacaaatacccttgcaaatgcttgctatctccttgggtctttgatgatggaagactcttctgtttgttctaaagttttatctggagaaacaactaagcagctcttaaagttacttggtcctggcaatgaaacttctattagagctgaggctgctggggctctcaagttcctttctgcacagagtaaagaggccagacgtcagatagctaattctaatggtattcctgctcttataaatgcgactattgctccatcaaaagaattcatgcaaggtgaatctgctcaatcattgcaagagaatgcaatgtgtgcattagcaaatatatctggcggtttgtcctatgtaatctcaagccttggtgagagtctcgagtcatgttcttcgcctgcacagattgcagatactcttggtgcattggcctcagccttgatgatatatgacacaaatgcggaatctatcagtgcttctgatcctgttgacattgagaagacactgttgaagcagtttaagcctaaggttcctttccttgtgcaggagcgcataattgaagctttggctagcttgtatagtaacccggttctctgcaagacactagcagattctgatgcaaaacgcttgcttgttggtttaataaccatggcagctactgaggtgcaagatgacctcacaaaatcactgtttgctctctgcaaaaaggattgtgacctatggcaagctctgcaaggccgtgaaggtgtccagctattgatttctttacttggtctttcatcagaacagcagcaggaatgtgctgttgctctgcttgcgcttctttcaaaggagaatgatgagagcaaatgggctatcactgctgctggtggcatacccccacttgttcaaattttggaaactggatctcccaaagccaaagaagattcagcaaccatccttggcaatttatgcaatcacagtgaagacataagagcatgtgttgaaagtgctgatgctgttcctgctttactatggcttctgaaaaatggaagtgataatgggaaggagatagcttctaaaacactgaatcatctcatccacaaatcagatacaggaactattagtcagctgtctgctctcttaacaagtgaacagcctgagtcaaaagtttatgttctggatgctttgaaaagcttgctttctgttgcaccacttgatgatattctacatgagggaagtgcagcaaatgatgcggttgagacaatgattaaaattctaagctcacccaaggaagagactcaggctacatcagcaactgctcttgctggtctatttcattgccgcaaggacctgcgagaaactcatattgcagtgaagacactctggtcgctcatgaagctgcttcatatgcagtctaacaaaatactaatgggggcctcatgttgccttgctgccatttttctttcaattaagcaaaataaggaggttgctgcaattgcccgggatgccttaaccccacttgtctcacttgcaaattcttcagttattgaagtggcagaacaagcgactagagctttggcaaatcttttccttgatcaggaattatccctccaggtgtcttttgaagaaaatctcttccgtgtaacacgtgtgctaagagagggaactattgatggaagaactcatgcagctgcagcaatagctcgtcttttacagtgccgaactgttaatcagccactttcagatactattaaccgctctgggtctgtccttgctctagctgagctcttggaagttgccaacggtgaagctgctgcaacatcagaagttcttgatgcactggtgctgttatcgcgatcaaaggcatcaagtgggcacaccaaggctccctgggcaattcttgcagaaaaccctcacacgatacttccccttgtttcatgtattgctgatgctgcagcctccttacaagataaagccatagaagttgtgtcaaggctctgttccgaccaacatgatgttattggtggtctggtttctgaaactccaggttgcatatcatccattgcatggcgcatcattggctccaacacgcttaaagttaaagttggtggatgtgctcttctcgtctgtgctgcaaaagagcattgtcagaagcaaatagaggttctgaatgatgcaagtctgtatattcaactaatccattctctaattgatatgatccatatggcaaacacgcctgctgaaaatgtcagcagtgaaagcatatcagatattagaatttccagacactccaaagaaaactacagtgatggtgaaactgtgtgccgtactgctgtaatctcaggcaacatgattccactatggctacttgctgtcttttctcgtcatgacagcaaaacaagagcagaactcctagaagctggagcagttgaaatgctcactgagaagatttcacaaaatgcattccaatatgtcaagatagcacctcatgggtgtgttccttgcttcttgctttgctattccaagaaagagagataattcgatcaaactctgcatcacattccattcctgtgctctcaaacttgttaaggtcagacgagccagcatacaggtactttgctgcacaagctttgtcaagtctggtttgtaatggtagcagaggaacacttctggctgtcgctaattctggggcagccattggacttgtatctttgcttggatgcgctgatgtcgatatagccgatcttttggaattatcagaggaattcatgttggtgcctaatcctgatcaaattgcattagagaggctatttagagttgatgacatcaggattggtgcaacttctagaaaatctattcctcttcttgttgatctacttaaacccattcctgaaagacctggtgctcctttcttggctttgggtcttctgacccagttagctgttgattgccccccaaacatgctgctaatggctgaagctggaatactagaagcacttaccaaatacttatctcttagtccacaagatgcaacagaagaagctacaactgaattgctgggcattcttttcagtagtccagaaataaggcatcatgaatcagcacttggtgttgttaaccaacttgttgcagtccttcgtctaggaggaaggaattcacgttacagtgctgcaaaggcattagagagtttgttttttgctgaccatgtgaggaacagtgagtcagctaggcaggctatccaaccccttgtggagattctgagtactggcatggagagggagcagcatgcagctatatcagcccttgttaggcttctttctgacaatccttcaagagcacttgcagttgcagatgttgagatgaatgctgtggatgttttgtgccggattctttcttctgattgttcagtggagttgaaaggagatgctgcagaactatgctgtgttctatttaacaatacaaggatccgttccacaatggcggccgctcgttgtgtggaacccttggttggtttactggttagtgaagctaaccctgcccagctttctgttgttcgtgcattggataggcttctagatgatgagcaactggcagaattagtggcagcacatggtgctgtcattcctcttgttgggtttttgtatggcaaaaactacatgcttcatgaggcagttgctggagctttggtgaaacttggaaaggacagaccagcttgcaaattggaaatggtcaaggctggtgtaattgagagcattcttgatattctccatgacgctccagattttctttgcatcgcattggcagaaatgcttcggattttgacaaacaatgctaccatagcgaaaggtccatctgtagccaaagtagtacaacctcttttctctttgctttctaaggcggacatgggtcctgaagggcagtatagcacattgcaggttcttgtgaatattttggagcatcccgaatgccgtgctgattataacttgacacctcgccaaactattgagccagtgataaccttattgaattcatctccaccagctgtgcagcaattagctgcagaactcctgtcacatcttcttctagaagacaacctccaaaaggacacaataacagagcaggcgattactcctcttattcaagttctttcttcaggtttgccaaatctacagcagagagctataaaagctcttgctaaccttgcaatagcttggccgaatacaattgcaaaggagggtggtgtttttgagttgtccaaagtgttgttgcaatctgacccgcctttgcctcatgttgtgtgggaatctgcagcgtcggtattgtctagcattctacagtacagtactgagtttttccttgaggtacctgttgcagtactagtgcaattgctcaggtctggaactgaaagcacagttgtcggtgctttgaatgcccttcttgtattggagagtgatgactcaacaagtgcagaagcaatggctgaaagtggtgctgtggaagcattgcttgatctcttgaggagtcatcagtgtgaggaaactgctgccagactaatcgaggcattgctgaacaatgtaagaataagggaggcaaaggctgctaaaaatgctattgcaccattgtccatgtaccttctggatccacagacacaatcgcaacagggaagattgcttgctgctcttgctcttggagatcttttccaaaacgaaggtcttgctcgttctactgatgctgttgcagcatgccgcgctcta

SEQ ID NO: 27142 - DNA, 2092 bp, Zea Mays
ctccacgaaccacatcaaaactgatcaactctctccctctgcttcccgctagagcaaacgccacgagagtcgcgattcttccaccacttccacgggaccggtcggatccaatctgctgccgcccagccaccgccaccgccgccaccgccggctcctctataggggtcttccctcctcttcgcccttcgcaacccgcaagttccgagcgattgatgagtatttttctccccgtcccttggagcgactcggtggatgcgagggacctgtccgcgctcgacccgccttcgcccctatctcgccgcccggcgggcaggctcctgctctcgccttccgttcccggagctagccgcaggcccatgggctagtgggtcgtcgttcgccctcctgcgatcgcgagcggagaggcggcctgcgggatccgcccgtctccaatccaaataactcctctccttggacgatttcggagttactggcctgcctgaaaatcgattcctgctaacgccagtattgtgcttttcagtaacaagagtgtacagttgttgcttcttgggatgtgaatcctgtcttgggtggggatccagctcacgctagatttccccccttttgcctttcactttttcactcgggagggaaagtggtgggaaggcaaagtaaatattgtattgccggttttggggacatattcttggggatattccggtctgtgcaaacatatctcttgcccttagtttagtttgatgctcatatcagtattcagtactggtggggagtgcacatatcacaaatcctgattatcctcggccgttggggagatgagttcctcacaagaatccaccttcacctcggcctcagcggctgcacaagttaatgcttccgctttggacttgctcccggtctatgccaaggagcttatcgccggcggcgctgctggtgcatttgcaaagactgcggtagcaccactggagagggtcaagatcttattgcagacaagaactgaaggtttccagtccctcgggatcctccagtccttgaggaagctgtggcaatacgagggaattcgaggcttctacaaagggaacggtgcaagcgtgcttcggattgttccatatgcagcattgcattacatgacatatgagcagtataggtgctggatattgaataattctgcttcatcaataggtacagggcctgtcgttgatcttttagctggctctgctgctggtggtactgcagttttgtgtacatacccattagacttggctaggaccaagctggcataccaggtttcaaatgttggccaaactggtaatgctttgggaaattctggtcaacaacaaacgtataatggcataaaagatgttttcaagactgtttacaaggaaggaggtgcacgatctttgtatcgtggagtaggcccaactcttattggtattcttccatatgctggcttgaagttttacatatatgaagatctgaaatctcaagttccagacgattacaaggattctgttatactgaagctctcttgtggagctttagctggtctatttggacaaaccctcacttatccactggatgttgtccggagacaaatgcaggttcagagcaagcagtctcaaaattcgagcgatggcttccgtataagaggaacttttcagggtctcttgctcatcattcggtgccaagggtggagacaactctttgctggcttgagccttaactatgtcaaggttgtcccttcagtagctatcggtttcacaacatacgacatgatgaaggcattgcttggagttcctccccgagagagagtccatgcgtcaggtggtaacaagtgaagcaatgttggccatccttgtgttatgactgatgaactaaagaaattctaggttgtgagttgtgacattgttattcttgttatgaatcccattgcatagggtggagagtgttgtatattggtcaaatagctatattcatgtaacattaagttgagatgcttgtatcatccattatgctgcttgtaatgtaaccatgaatacaatgacgcccctaaagatcactttaaattaactataaaagattagtattaccctta

SEQ ID NO: 27143 - DNA, 5890 bp, Zea Mays
cccacaacccatcgtctccaccgaataggagtacaggacacaccggactcgctgctctcccccgcgttaccgcgtagccgatgcccgatggcttgatcagatcccccacccggacccggcccagatctgtcgtcgccgccgcagtcgccatgggtgaccactctgactccgattcctcccccaagtcctcctcgtcctcgtcctccccctccgcccgccgccgttcctcgccgcagcgcagccgggcccacactgacgagaccggcagcagcgacggcgtcctcgtcgagcttcctactcaggaagcgcggagccccggggccgaccctgacagcggcgtcctcgtcaacatgcccgctgacgacgccaccagcggcgagaccttcgacgacgcccccgaagatctcgcggccgccggctcgctctccgcacgctcgctggacgagtccatagccgtcatcgacttccctgaggtttccagcaccagcgccgagctccgcaagtaccaggaagagaaggctgtatttgctcgggaggcagtggcactccggaggttgctacaggagatgttggggcaggaagcttcagttgcgttgcatggagaggacgctgacgagacactgttgcattcaatgctggacgactgctcgaggcttgtgcttgaacttaactcgatggcacgggccagggagcaagagattgagagcctacatgccagggctgcagaggcagaggtatcaagtgaggttgctcatgtatacctgggttcgtggagagaagggtctgagcaagctgttgggcggatgcttgcatcaattgatgctgtggttaggcaagatgatgccagctttgagggtgctgaccaggatgggatttctattctggaaaggaagacttcattgcttgtggagaggtacaggcaggcctcgatgggtattgaacagcttgagcaaattttagctgaggtgaagcctggtttcgcggccacagggcacggtgaccttgctaccactttaagtgttctttcagatgaattggttggtagcaagagaaatgaggtggatttactgcagaagatgaatgcttttgctgaagagaagaaggctattgctgatgaacttgaggaagtgaaagctgctaggaatgcagtgaatgctgaggcaagcaaagcaaaggcagagtttgagcagatggagcaaaagttatcaacgactaaggagaagctcagcatggctgttacgaagggcaagtcactggtgcaacaccgtgattccttgaagcaggccttggctgaaaagacgggtgagcttcagagttgcatgacagaattgcaaaagaagtctgatgccctgcaagcagctgagagcagggttgatgagctacagatttttttagatgaaaagacaagtgagcatgaaaagtgcttggatgagcttcgagacacatatagtgcatgggaagctgctaagaccagcatggagcaattaaatgaatcaaaaagtgccctgcatgcttccctttcactaaaggatggggtttttgaacgcattgaagatatcatgtcagaggcaacatttccagaagatcttctttccttggagatgacagataggttgggatggttagttgagcagaagaaaattgcagatatgatcttctcagagcatcagaaagttaaagaaatcttgagctctgttgacattccacattctgtcttaacctctgaacttgattcccagatcagttggcttgccagctcactgaaccaggccaaagatgatgcggtccggttgcgtgatgagtctgctgaaatgttggctaaaatggctgcacatgaatcaaagctggtgtcaatgcatgaggaaattgaccgtttgacaattattctactggaagagaaacaggaaaaggatattcttttaaatgaacattctgaattgatgtccctatacaaagctgctgttaataagttgtcccttgtctcatcacaaaataatgagttgctaaaggcatttgcggaattttttgatgtcacattggagggtagtcagtctatggatattgccaaattggtacagcagggcctcagaaatatccaacaaagaccaaaatcttctcctattgagagtggcagctttgagaagctacaagcactactgtataccctagaccaggaatcaacactatgtaagatgattcttgaagaagacatgattaacagatctgagaggactggtgaacttcaaagaatggctgaggagattattgttctgaaaaatgagaaggtatcactgcagaaggaggttgaacgggtggaggagagatcagcattgcttagagagaagctgtcaatggctgtaaagaagggcaagggtctggtacatgagcgtgaaggactcaagcaagctctcgacgagaagagatctcaaatagagaatttgaaacaagttttggaagggaagagctctgagatagagaagttaaaacatgctctggatgaaaataagtctgtaacagagaatgtgaagcaagttttggacgggaaaaacactgagattgaaaggcttaaacatgctctgggtgatagttgcgtggaaacagaaaacttaaaacaagcttttgctgagaaaacctctgaagcatataaaataaaacaagaactggatgcaaagaacatggatattgagaatctaagaggtgcgatagagtcaagagaatctgccatgacagatctcagagagcatgttgaacatctattgtcgtcgcaggttgcacgtttggaaaagttgcaagtagatattgttacccttaatgatgaaaaggtgaaattagaaagcatgttggaagaagccagagcttcctgggacactcttgctgattcaatatcaagccttactcttcctattgatcagccttttgaggggcctatggaaaagtttagccagattgcccaatacatccaggaatctcaagttgctaagagttctcttgaaaatgagctacagaaagcaaatgagcaaattaccttacatgctagcaggcattctgatgccctttccacaataaacatgttagaacatgagttgagtaaactaaaagatcatatttcttccatttctgaagaaaaacgtcaaatgcagttaaatacttctgctgtacaggaggagttggagaaaacaaacgaggaactggcaatcaatttcaggaaccttgaaagtgccaacaccaccattaattcactacaagatgcactatcacaggctagatcaaatatttttattcttgctgctgaaaagaatgaagctgaagctaaatatgaaacagaaataaatgctcttaatgctgagctaaccaaatgtttggaggagttggataaaactcatgggcacttacaaagtcattcaacagaatatcatggttaccttgagaagcttggcatgtttatgatggatgatagtctcttgtctctgatagctgaagaatatggaaagacattcaacagcttgagagatatgtgtcttatagtcaagagtatgcatgagcagctttctgtgaagagttttcagaatgattcaattgtggaggattcagaactctcatcacttttatctcttccggactatgagagctttgttagagaaagattggtcaagaacataaatagaaaagggaatattgatgacacttcatccttctctactattgttgaacagttgagcaaccaaactgaatacctttctagttttttaaaagatttgtcaacctacatgaatagcaatattattgtggtgcttcgttctctgcaactagtgagcaacacctttgcccatactctagaagagcatgacatgttgaaggttgaattggggaacaaggatgctcataacagagctcaagaatctgaagtgctttctctacaaaaagatctgagagcaatgtcatcaaaatgtatttattgcgtccaacaaattgaaattgtttttgacgatatggttgatcttggatatgcaatagacttggctacaggcagctcaagcatagggtctgaactagaggtaactgtgtctgatctgaagaatgaggataccagtgattatagtaaggtggctgatactttgcttgctacaattgacacacttaagtccaagtctgaaaaattatctaccattaaggggcttgtgataacttcattggatgacttcaaaatgaagctgaaacaagctgaagcagctgctgaaactgcttcacatgagcatcagttgtctgttgaaagggtatgcatgctggagaaagaactcaaaatattacaggatgagtgcaacaaaatggaactaaatattcaagagtataaggaaagggagggtgcattgaaggcaagggagttagagttgctatcagttgagcacactcaaatttcagcagacagaggtttaactgacaatgcaatttcaaaagatcaaacggaagctcttgttgagaagataagtaagttaaatatgctgtcaggcgagtcaaatgtgcagagggaagaggctacaagtccgcttgacaaactttttgttgtcattgatgaattcagtgcacttcaacacgaggagctgggagcaaagctgcagtcaagggaaaaggcagttgatgagctatcaacaaaagtaaagatgctcgaggatttgtgccatgcacaactttctcagccagaacctagtaaagacagatcatttgaagcatcttcctcaacaattgggtcagatatgtctgatattgaagatgcgggaccagtgggcaagacaacatcagtttcatctgtttctacagctgcacatgctagaacaatgcggaaggggtcagcggatcatcttgttgtcaacattggttcagagtcagaacgattgattgctgcacaagattcagatgacaaggggcgtataaaatcgctccatacatctggcttcattccagctcagggaaagcacatcgctgatagggtcgatgccttctgggtctcggggagccaaattctgatgaaccggccacgagcaaggctagggcttatgttgtactggctggctgtgcacctatggttgatgggcagcatcttgtgacaccgcttctcaataccgagacccatctcataattgtacaatagcacgtattagcagtttcttcttccattcatacaatacatggtagatgttagaaataccatttttttcattgtcttcctcctgctgagatttgcacttgagcagtatgtgttgaatttttgcacacaagatgtaacgcgcagaaaaaataacgttgtcattctttggtatagtgaagaggtggtaattgtatttgtagatgtggtggccctgatcacctggtgggccccatcatcgtaaattcgttgtttgaaattgcgtgcgtttgaggtctgacaatgtagaggccttatgggtcgacctttgacgtatgaatagaaacgtatatagttggttacacttttcgctcctccatgaataattttcgattggaggtgactggttatacagtcacaaatctttcctccaaaaaacataaataaaggagtgaatatgtatttgttatcatgaatctgtgtagtttcataagggataaggcataaatcttcatggcatcatttgtgtttttccacacaatttgtaatgcaaaagaatgtagggtgtttcaaccaaacaacaagaaacaaaaaagatttaaatacatccttaacatactaacatttttacggtggggctgctcatttaaactggactggaaacaaaataacaccgtaaaaatgttggcttttgacaaatctgacactgaatacgccaaagaccacagttgttaccaaaagaaatgcagagttccaatctctcactctcac

SEQ ID NO: 27144 - DNA, 697 bp, Zea Mays
ggtcagcacaatgtttaagtttgtaagatggatggctagttggctagcagctgggagacatatcaagttgtttggtgataatggatccaaagcattcggctgaagtgtccaagtatttagacaagcaaaatcaagcactaatggaaacatatcgagcaatgtcccatgagttgcataaactgcaggtagaagaagagacaatcatgcgcaagttgtatgaactgatgtccgcggaagggcttcttccaaagcgcaagaaagaaaagcaacatggggaaaatatagtgggataagctgagagcaaagaacaggaaccataaattcttatgcgacgtgtaatgtgatatgacagcaatgccattttatctggagagttggtgcttgttaacttctgtatagcagttctctatcatcacaactctgcgaccactacatttaacttcacagttgaaaatttaacctgagtattagttccgtgaggaattacttacagacaaacataatcattcctttcgctcatatgcttcaactgaggttttatattttgttttccctttcttctatttccagggacattattacacacaagactgcttgtctctttcttttcgttttggcgacacaattgttacgaattctgattcatcccatataagttccatgcacaactgtgacatgctatttggttttgtcagct

SEQ ID NO: 27145 - DNA, 447 bp, Zea Mays
aggacgagtcgctgctttctcttcaaggagacgtcacgtcaccaccacaagtccacacacctcttcggctcttcctcttctcctccatatagcggcgggcctccgtcggcccccttccaccccgttttgccgccccacaggccacagcccaaaatcctcctcgtcgctggtgccctctccgcggcctcctccgccagccatggccgccgctgggcccgggctctactccgacatcgggaagaaggtctcctgtacaaggactaccacactgaccggaagttcacgctcaccacttacgccgccaacggagctttcaaggcgcgtgtcaccatggacatgaagcaccgcgtcgtccgcgccatgatcgcgggtagcatgggagacggtgatggcgcacccgtgcatgtccaggataagaccgagtcggtacgtgacgcgacacggcgc

SEQ ID NO: 27146 - DNA, 1641 bp, Zea Mays
cacctcgatggccgccaaccacaacgctgatgatgccgctagagagcctgtcgcgagcgcctctccacccgcctctgaggccgagcaccgcgccctcctccgaccatcgtcgttcatctccgccatctcagacgacaatgaagggtgcaaggagcgggcgttcgagccatccgagaaggtcatcgtctccgtctccggcgaccccgaaggcgatgctagcgaagagcgcgccttctacgcctcggggggctgcatgccgcccttctcgtggcgcaagctgtgggcattctcggggcccggctttctgatgagcatcgcgttcgtagacccggggaacatcgagggcgacctgcaggccggtgccacagcgggcggcacgctgctctgggtgctcgtgtgggcgacggccatgggcctactcgtgcagcttcacgccgcgcgcctcggggtggccacagggaggcaccttgctgagctgtgccgtgacgagtacccggattgggcgcgccgcgcgctctggttgatggccgaggtcgccttggtcagcgctgacatccaggaggtcatcgggagcgccattgccatcaagatcctcagccacggcctgttgcctctctggggcggtgttgtcattaccgctttggattgctttatgattctttccctcgagaactatggggtgagaaagttggaagctctatttgcggttctaattacaacaatggcgtgctccttcgcatggatgtttgtagagaccgagcctagtggcaaagatctattcattggtattcttgtcccaaaactaagctcgagatcgataaaacaggccgttggccttgttggatgtgtcatcacaccccacaacgtgttcctccattccgctcttgtgcagtcaagaaagattgacccggacaaggaatacgaagtccgtgaagcgttgaggtactattccattgaatccaccctggcattggtagtgcccttgatgataaatttatttgtcacgacagtttttgcaaaggggttctatggtaccaaggaagcggatagtatcggccttgagaacgccgggaagtatctgcaggagaagtttgggggagactttttccctatcctttatatctggggtgttggactgttagccgccggcaccagtagcaccataactggaacttacgctgggcagtttataatgggtgggtttctgaactggcggctgaaaaaatggatcagggcattgatcactagaagctttgcgattgttccgacgataatcgtcgctttgtacttcaacaattctggctatgagctggatgttctcaatgagtggctcaatgtgctccagtcagttcagatccctttttctctcatcccactgataacactggtttcaaaggaggaagtcatgggggtgtacaagataggtccaagaatgaaaattctaacctggatagttgcctctctaccgatcctaatcaacagctatatgttgttggacttcttctctctggaaatgggaggcatgttgtacaacacaactctttgcgtggctgtggtggcttattctatgttcatattatatcttatttttcgaggcatgaaatttccttcctatctgacgacgacgtaacatgagaagag

SEQ ID NO: 27147 - DNA, 1276 bp, Zea Mays
atgaatatttttttttgctgattgatattgattaaaatactttttgtgagttattgtcctcaaaatataaacttgcttggattgctagtgccaatgtagaaactgccaaagtaagtagactagtctcgaactttttatagcaccattttagccgccatgcaatccgggggatagtatagttggaggagggagtggagcagttgggttaggcaaagagaagctgctactgtacgagtacatggagaagggcgatctgcaccggtggctgcacgagctgccagcgggtcggccggacatggacgacacgggcagcggcgacatttgggaggcggcggaggtcaagcggtccatctccgactggccgacccggcaccgcatcgcgctgggggtcgcccggggcctggcgttcctgcaccagggatgggccggcgggtcggggcgcgcggcggtcgtgcacggccacctggtgccgaccaacgttctgctgtgcgacgacctggagccccggatctcagacttcgggcacaacaacgacccgccgtcggcggcgacgcccgagggcgacgtgtacgggttcggcgtgctggtgctggagctgatgacggggcaggccgggtgggacgaggcgtccgtgagctgggcgcggggcatcatccgcgacggcaaagggctggacatcgtggaccctagggtgcgggacgaggccgccggggcggaggcggaagcggagcgagagatggtggagtgcctgcgggtggggtacctctgcacggcgcacgcgccggacaagcggccgacaatgcagcaggtagtgggggtgctcaaggacatccggccggcgcctcccacacccggtccgggcagctgagccaagtgccaccagccacgccgggggggtcggactcggacggacacatgctcggggtcggggtcgctggcttgcacgaagcggcggcgtggccagtggccgttccctcccaatcgaggagaagcgtccgtccgttgttttgccttatgccttgcggttgcgggttatccatgatccaccaatggatcgggagcagcttttgctgttgcacggggtcctggtggcctgatgtagtgtggaccagaacgagacctcgttgtttgtactttgctgagatgtgaatgtaacagttttctttgccacttttcattgatgagatgcctgatttctatcttctcttttaaaaaaataatgtatccatccatttgtttaatttttttcctgtaataaaattgatctcaactttac

SEQ ID NO: 27148 - DNA, 5577 bp, Zea Mays
atccaagccactaccccagtacccctatatttagctgtttccgtccccattcctcctctcttcttcccgtttcaaaatcgcgtccaatttaaacagcaaaatcccacacatcaagccatcgaatcccgcggctcttggattcatcccttccctcccctcttgttctccgccatatgtgaaccggtgaacgggtgtgcgtgtgtctatcgaggctttcggtgggcgtattcgctccggtggatttggaatcgtgccttctcggcgcgcacaagtggcatgctagcacaataatgcagtgaagttgtgtcatgagtaaaatgtgtcacgcatgtgcatcagaggagacaaccatgaatgaagctaatatcgacctggcctgcagtacgtcttgctgcaagatgtgtgattatggtgagggatcatcaattgttaccagcgagatcaactggctggccatggactcgagcccttacagcactccttacggcacccctgttttttcccgagaaaattctttctcaagctttgccagttgcttttcaagccttggtgactctctaacagattctgattctgaagaggagattgagctccaagatactggtcaattttatcatgataccatattaattaaagattttatggagcaagaagagagttttgtgcgagtggaagaatgtcaatttaaggatattgctgatgactgtgctattttttccattccaataaaccaatatatttcatctgctgagcaacagctggagagacatgaagactccaacaagggaaattttgataccattaatatttcattggattcagatatatcttatgaacagagaaaagacatcctgtccgatgataaacatgtaagaacgaaatgtgctgtaccagtggaagatattgatcataaagaatcaggtgctatagttgttgaacagatcactagccttcccatgccaggtggtgatattttcccattgaatgaacaagttatggatggactcagcagtaccttggaaaatacaatagtatataacaatatattgaataccgaacctgaaatgaaacatggtactcactttgaaaatgaaaatgaatgcctgtacccactagctttgcctagttttgaagcagatcctctcatttggttaccaccggagccagaaaataatgaagatgactttgatactgtttctaatgatgacgacgagagtggcaataacagcactgggtggggtaggtcaagtttcaaggttaacttagcagagagaaacaaggaaagccgcgacgaccaattgcagaaagtaatgtcagaagtaatgaatggacaattcaagatcctagtaagtcgattcttggctgctgaagggctctctttatctgatggaggcacagataaaaactggcttgatattgttgcatcattgtcatgggatgctgcactacgtgtaaaacctgaagccaattccggaaatgcaatggatcctggttcgtatgtgaaggtgaaatgtttagcttcaggatcttaccagcagagtgaagtgatcaatggtcttgtttttaagaagagtgctgcacataaacagatgcgtgccaatgtaaaacatccaaaactgctacttcttcagggcgcccttggccattcgtcaacggggctatcatcaataaattcgatgaaacaggaaaacgatcagctggagagaactctttatgaagtgatagtcaaatgccagcttgatgttatattggtcgagaaagcagtttcccgtaatgtaaacgaatatattcagaaacaaggagttacggtagtaagtgacatgaatacccatcggttggaaagaattgctcgctgcattggctctccaattctatctttgcagagtgttcttatgaaacccagtcttattaagcagtgtgaatctctccattttgaaaagtttgttgaagagcataatattactggagaagatggaaaaaaatcatgcaaaacatttttatttctagagggttttccaagacctctgggatgcacgatactgctgaaaggagcaacaagggaagaacttaagaagattaagcgtgtgcttcatttcactgtctttgcagcttaccatttgatccttgaaacttcattctttgccgatcaaaaattgtttacgacagacaaaactaccacagggaaagagaagtgctttaaaactaatcaacagctgcttggttcctgttatgataattcaaaaaacagtgacaccatgaataacacaccaacttgtgatgatcagtatcctaatcaggaaaagcttattcatactgaaaaatctgtaccattgcatcttcatgattccaaaactatggcatctgaagattctgctggtgaagagcatattgacagcaaaggcattcagtcatattcatccctgcctgtttcagatccctcgacaaattttatgcaggacatgccatcaccagattgtgctgagtcaaaaatatctggtggttttgatggctcaacattcactgatacttccaaagaggtgcagaagaaggaattgtctagtgacaattttcagggaacttttgatgtaatttgtgctgagagtggagctgctttgaacactcaggatatcttggtatcaatgtctagccaacatatcaggaaccaagctgtttgtgagcagagtcacctgtcgcggataacttattatgggtattttgatacatcccttggacgatatttgcaagatactttacttaatgagaaacacagctgcctatcatgtggtgaatctccagaatctcacatgtactcttatacccaccataatggtactctaactgttcttgtgaaaagacttcccttggagttgacactttctggtgagactcaaggaagaatttggatgtggaccagatgtttgagatgcaatgctaagccgacccatagggttataatatcttcctctgcacgtaatctgtcgtttggaaagttcttggaactcagcttctcaacccactctgctaccaagaagctaccaacatgtgggcatttgcttcatagagactgcctacgtttctttggatttggatccagagttgctatgttcatatactcatctgtagaaatatattctgcttgtaagcctccattgagtttggagttcaataaccgaaacaaaaatgattggcttgacattgaagtgaagaatgtccttcttaaatggaagcagttatttacaacaattgaaaatgtaatacaagacttgagatcaagatactctagtcaagccatgggggaagacaccaacgtttcagtagatgaggatgaggggttacttttggaggtgtccaggatgcttacacaagagaaaaataaagttgaggtttctctgagggagtttagccgaattgccatacctgagagttttgcacatgggatccttggtttgaactggttgtaccagcaacttcttcttgggttctacatttgggatcttcggttgcttcatattctgcagtacactaaagttaatactgcatcttcagacaattccattcatgaaagcacagcaaagaatgaaccgaagagttcagcaagtattgcaatccaggacacaccatcactaaaggaaattggaacagaaagaaaggaagcaactataaattcttctggcaactttgatgatccatttgggtgatacaatgttggataaggttcaccttactgctaaattaataaccaaagagaaagagcacgatttgctcaattatcaagaccatgatgtaaaatcagctctttcctctctaggcgaagctgctgatcagtttgaaacgattgctaatgttaattgttcagagaaattaaacactataccatttatgaatgatgaacaacctgcagcatccaatgtattgcatcatgttgtcattccaagtgacgatgaaggaaaatggttctggaatcaatttaatcaattggaaatggaatacaagaaagaacttgaaggtggttctttgtataaattttacctcatcaacaaatacaccccatgctcttcaccattggcacaattaaaacatcaaatggacttggggcattttatagctggccatggtggtaatatcttttcaatttctgaggaagaggcttctagcattattgcttatgctctaattatatctgaacaacaagggttctattatgaagctgcatctagtaacttggataaaaatgcttctatgctgccatccatgtcgtctccaaatgagtctttcgaaaacaaccataaattttcaaggtttgcaccaactgaggaattaacatcagggttttatgattcatttctgtcagctttaaaagatctgcaccacgaaatcgatctgaacaatgaaaagatagctctgagaagcaaatatactgtcatttgtatatatgcaaaacaattccatgatcttcggaagatgtgctgcccatcagaacttgcatatatttcgtcaataagccgctgcaaaaactggaatgcacagggtggaaagagtttcaagcaaccctacttgtcttgcgaaaattctaggaatatatcaggttaaggaaactaggaatggcaaggagacaagggttaacttcatggttatggaaaatcttctgtttggacataatatactacgcagatatgatctgaagggtgctcttttctcacgatatattcctgattcagaaaattctgaaaagaacatgaatgtcatggattactccttgcttgttggagttgacaaagagaagaaagagcttgtatttggaattatagattatttgagacaatatacctgggacaaacagctggaatcttgggtgaagacatctcttgttgttccaaagaatctatccccaactgtaattttacctagggagtacaaaatgagattcagggcctttatgtcacaatactttctatcagttccagatgcttgagtcttgaggcccaatcattttctggtattggtgaccgaacatatcttgagttaggacttcggagatcatgttgccgatggttatttccctatccagtgagcagtacggcatattggcatcatgttttgagcattgaaattttcccatagtttcattgttgtgtgtgtctatccttgtccattttccttctcagcagttgtgtacatagtagcagctaggacacctgggaagtgcaaattttaagcaaacgaacggtgatggacgcacaaatagcctagtcattgttttttattgagttaattagggtggagatctttccaaaaaaagggtggagatcaaggtctgtaggggtagaggagcatgtaatgtactccggtttgtgtttatcggaatatattcctgaagtttaaagttagattaaagattcagcttttttactttaatcaaattactagcaaaggtttatcatagcagcatttgtgtgacgaacattacttgtggcatggcagacatagacacaatatcattgtccaacatagatacaatatcgtcgaatgctacttcgtcaggcgaatgtatgtcaattataagggtatctgttcggg

SEQ ID NO: 27149 - DNA, 2527 bp, Zea Mays
ttcccttccactcccgtccatagcagcgctgccaccaccgacggaaggcccttagcagcgccgccaccaccacgggagatgcgtggagagatgaagcaaaccaagtcaggaagaatagaaatgagggcagaatggaatgaaacaagaacttgtttttttgtgagcttactgaaggagtacaattcaccaagatatcgtgcccaaaatggttggacaaaagaagcatggaacaacatgacacaacgcatcaacgataaatttgaaacaaattttgtggtgacgtaattgaagaacaaatgaccagtgggggccgaataaacttacaaattcataccgaattttgcctggtccactaaagctgcctgcgcccccccccccccccccccccgcatgggctcgtagcccacagacgtcccaggagctggcccaatttatcttcgccatccatttcgattgaatggccacgatttaccgaaatcgcatatataaatgaaaatttcggcatgccctaaccctagcttcattcgcttccgatatttccggagtggtatagggcggatttggtggcggcgactgtgaggcgggcgagcgaggtggtcattgggctcgcgccggagaacgctatgatcccgctgttcgagacggggggcgcgcagctcgagctcatacgggatgccgagattgagccgtgtgcctacgtgaggtgggagcaagggaggccgagaggatccgcttcatgagttggatgcacacgagagacgttggggatcccagcttcccaatgcgggagatccagaagagtcaacggcggatcgatcaagtggattagcactctcccctgtctgcgtgatctgtagaacaaggataagtcggggacgctgttctgctttgccgcgatggaacatgtgttccaatccgagaatttcaggctggggcggttgggatgagggggaagccaatgggagatggatcaaggagatgagcatggctgttcaattctcaatggcttcgtcgcgaaaagtgaggaatgcaaataaacgctacaccaaaatcaacgaagattggcaggataaagatgagacaaatgtacataaaagtaaagtgcgaaagaaaaagttatctgacatgcttgggtctcaatggagcaaagatgagctcgagcgcttctatggagcctacagaaaatatggaaaagattggagaaagttttttttatgcccttctagacagaaccgagacataaaaatacatttagttgctggtgcaatacgtgataggacatctgaaatggtggaggctctttacaacattaataaggcatatttatctcttccagagggaacagctactgctgcggggttaatagcaatgatgaccgatcactacaatattctggatggaagtaacagtgatcatgaaagcaatgattcaccaaaagcttcaaggaagccacagaagcgtggtcgtgctaggtttcaatctgtttctaagacatctgatgcacgttatgctgatctagggcaatctcagccttcttcatcaagctatggctgcctttcgttgttgacgaaaaaatgtgctggagatctgcttgtagggaacaggcctcgtgctgttggaaaaaggactccaagagtacctggtgcaagtatatactatcgagatgacaggggtgtaacagataggcgtgcaaaaacagttgctaacaatggtgatgatgaaggagctcatgtagctgcgcttgctctggcagaggtatttcaaagaggaggctcacctcaggtttctgaaacatccaaatggtgatcacatgttcctgtctcctgttaaaagtagtgacagaaaaaatgctgattcagagatgggaagctcaaagttgcatgggtttcatttggatgctgattaccccgaaggtagcttaggaagcagggaggccgagactggtgaatattgcaaaggttcatcatttttgacgaaaaatgaaggttctggtaagcctctgaagaagggaaaaaagtctcagaagaggaggaaaaaagctgcacataaaacaggtgatcagttcgaggatgacagagaggcttgtagtggaactgatgaagggcataggtcgataaagattaaagaagactcagagctggagtcattgggatggccgtctagcacgtcaaataaaagaagtcgtcaattgttttttggtgaatcttcagcccaaattaaggatgaaaacaaagatgttgattctgatgacaggcctggcatgcctgcggcagtatcagtgtatgagcagaaagttaactccaaaagcactgcaaggaaagttaaaaggcagcctgaaatttcaaattcagagatggtcactaggaaaaaagctaaagttactaaagatcctcatcacgatgggagcaccacttctgatgtaaagcagcaagcttgtacatgtggtgtcaaaacagagaaaaagaagaggaaatcatccacgacaaaggtttctgctgaagaagggaaggtgtcgtctaatatcgaa

SEQ ID NO: 27150 - DNA, 2406 bp, Zea Mays
atgacggaagtggaggcgccgctcatcaccgaggtggagggggtggagggccgtggcttctgcggttccgcgtccaccggagggggcagctctggtctcggcagcggcgtgcggggcacgaggcagtaccaccgccgctcggacgcgctcgcctacggcgaccgctaccagaaggcggcagcactcgtcgacctcgcagaagatggtgtcggtatacccgaggatgtcttgaatgacacaagaagcctctctggtgtcaaaagtacgccccacatacttgtgatcaaagggatctttactttcttgggcagttgccatacttaagcaaaacagaatcactcatatatgaggcgctaacccttgtcattcttgtcttggatatcttctacccactttcctacgaaggtttaaatctattctggaagaactccatgaataaattgaaggttcttcttctcttcatcttagcatgcgacatacttgtgtttatgcttagttctggacctttcagagtagctccgtacattcgtgttgtgtttctaattatgacaatcagctggctagcctatgtaacatttgaggacacaccacaaggaaagaccattttcacatcatacggtacaacattatatcagatgtttgtcctgttcaccacatccaataatcctgacgtatgggtccctgcttacaagagctctcgttggaacgccctgtttattgttatttatgtgctgttaggagtttatttcctaacaaatttaattcttgctgtcatttatgatagctttaaagagcagcttgcaaaacaacttgctcaaatggactctataaggaaaagtattctacagaaggcatttgatctcatcgatactaacggtcagggttaccttaacaaagaacagtgcatatcgttactggatgagctaaacaagtacaggtcgttgcccaaaacctggagggaagattttgaactaatcttttccgagcttgatcggagtggtgatttcaaggttacctccgaggaatttgctgacctatgcaatactattgcaataaaattccagaaagaaccaccaccttcatatctggagaagtacccatctttctaccattcaccacagtgtgaaaggttgaagtcctttgtacggagtcgcctgtttgagtatattgttgtctttgttcttctggtgaacctaattgctgtcgttattgaaacaacgctagatatagagaacagctcttcacagaaagtgtggcaagaagtggaatttgtctttggatggatctatgttgtggagatggcacttaaaatattttcattaggatttggcgcctattggatggagggtcagaataaatttgattttgtgattacttggactatttttattggagagactctgacatttgccttcccatcaacgcttccttttctttctaatggagagtggattcgatatcttctccttggaaggatgttgcgtttaacaagaattttgttgcaaattcggcgtttcagagcatttgttgcaacattctttaccctcatgtctagcttgttgccatacttggggactgtgttttgcatactttgtgtatattgctccataggtttacagttttttggtggcatcgtgtatgcaggaaacttgaagttggaagaaacagatctctttgggaacgattatcttcttttcaacttcaatgactacccaagtggtatggttactctgttcaatttgttagtcatgggcaattggcaagtctggatggagagctatgcacacctgactggaagttcttggagcctggtttattttatcagtttttaccttatttcagtattactgctgcttaatctgattgtggcatttgtgttggaggcgttttttgctgagatggaactggagaaagctggagaagctgatacgcaggattctaccccacaaggaagaaacaagcggcgatccatgcgtgtgaggacgaagggtactatggttgacattcttctgcaccatatgttgagcaatgaacttgatggatctcaaaactcggattgattactcatcttaatggtaccagatcactagtactaccctgctgttcttttaactttgaccacggcttccgttatgaacacctgtctcatctatactctacagcatccgagacttcgattggtaatttatataccatacgtatagcttaaagtgacacaacggatactgacagatgcttatttatctgcaatttcagtcaatatatatacccctacattttttttttgtttttatatgtatcttctacagccttctgatttctgacagtgtggaatatgccgtattgagtagacagtattggttgtattaagcaactcgtatgaagcgaaataacagttcaaaggtg

SEQ ID NO: 27151 - DNA, 1516 bp, Zea Mays
cattcgcgcgtggttgagaggaagcacgtagcacgatatcaagctttggacccacataggacgcactcaaggctcaattatgcccatcgaaggcccaactagaacccaattacaagtataactccattcccctccgtcctcccgcatcaactcgaaccgaagggacgaccgagcggagtctagactcgagagcaacctcgacctcccggatctctctcccacccacgcctcgtcggcgccgtcgtctgctgcagcgatggcctcccccgacctgctcttcaatctgcggaacctcttctacctgggcgcctaccaggcagccatcaacaacagcgacgtcccgggcctcgacgccgacgccgccgctgagcgcgacgccatcgtcttccgctcctacatcgccctcggctcctaccagctggtgatcagcgagatcgactcgtcagccgctacctcgctgcaggccgtgaagctgctcgcgctgtacctcactggagacaaggaaggtgctatctccagtctcaaggaatggttgagtgattcagcaattggaagcaatcctgttctgcggttgattgctggaattgtatttatgcatgagcaggactacaatgaggctctcaagcacacacactctggaggaactctggatttgcatgcattgaatgtccagatcttcatcaagatgcatcgttcagactatgctgagaagcaattgaagatcatgcaacaaattgatgaagaccatacacttacacaacttgcaaacgcatggctgggcattgctgttggtggctctaagatccgtgaagcttatctcatattccaagactttgctgaaaagtacccaatgacagggatggttttaaacgggaaggcagtctgctgtatgcacatgggaagctttgaggaggctgagactctgttgcttgaagcgttgaacaaggacgcaaaagatcctgaaactcttgcgaatctaattgtatgtaatctccacttaggcaaaccatcatcacgatacctcagctgaagctatcgcatcctgaccatgtgctagttaagaatgcggcagcatcagaagcgaccttcgagagggccctccaagccgttgcttgagctcgacacaccccacccagccagattgcaggaatcagcacattctggtctcttctccaattacgagtgtattaacccagagtatggtggttttggttgcctgtatcgtcgctgttaatgcgactccgccagtcttgtactacaaactgctgtataaacggatatgtcgaatattgaatccttacatctgttgccaataccagtattttgttatgtgatactgtggcatatcgatgcaatactgacaagtagcaacccttgtgggcgaccttcgtagaaccatacgtataagcagcgtgaccgtgtctttctggacctcacaatggtttcctcgtgtgtgctttcggaaacggaattctgacgtttttcgtggtggcacactggcactgtgctcttgctg

SEQ ID NO: 27152 - DNA, 1375 bp, Zea Mays
ctccaacgacgacgacgacgtccattattgcaactacattcccactactgatccatccatcgcttgttattttgtctgcttgtcctagctatatatatagtctggttgccggggccggccttattcccatacacatatcatcgtctttggcggtcgagattcacctatagctagctggagtccagcagcagcaacatggtaggaggagcgggaggagaagtcatcgggggcggcggctgcagcggcgaggtcgtggtggtggtcgtcggccgggccgagatcgacaccagggcaccgttccgatcggtcaaggaggccgtggccctcttcggcgagagggtcctcgccggggagctctccgctggacgacgaggaccactctcctccgtcaccgagcctacccgatcatcgattgcacagaatcgaatggcggcaacaagacccaagcaccacgccatgagtcctgccaccggcgcggtcaccacggctgcgctgcgcgccgtgccaccggtagtcgtcacagcgggtcagctggaggaggctaagcagaaactggagaaggagcgggaggagaagcagaagatggccgggtgcatccagaccctgcaagaggagctcagccacgccatggaggaacttaagaggctcaaggcgcgggacgacgaggaggccgccggaaccaaggtcatcgacctggagatcgacgagggcctctactttaccgaggccgccgaaaagcaaatggcgccgccgccacagggcgctgccggcggagcaggcgagctccagaagaagaggtacgtgacgttcgctgacccgccgacggtcgccaccaccgccgccgccgcgtgccgggcgccaccgttgccggacgtggtgatggaggtgcaccgcgcgccaacccaccagctccaccagccgcacccgcattactaccgggagccgcggttccagaggcagatgtcggccgggcacgaggccgccaaggcgatggcggatgagggaaggaagaagaagaagccgctcatcccgctcgtgggcgcgctcttcatgcggaggaagaagagcagcaaaagttgccacgacgacgtggcgttttgatccatcaatacatgcatacgtatatgcatgcatccacggagtgatggagtatgtcatggattattacaggggactttgactttgggatgaaggtcttctcttatgacaaggtgaagatgtagcccgaaggtgataagaatagacgacgaagctgtagcaggagagcttcggtttttgatgtgatgatgaagaccaagtatgatgatgactaaaaagggacaacgactactcagtccttaatgttttgtgttatgataatagataaatatcaggg

SEQ ID NO: 27153 - DNA, 5253 bp, Zea Mays
cgcaaacacattggtacatgttggaactctttgttttgaatgctggaaaggtttcttcagaagttttaatgacattgaacacgatgatcatgcagtggcctcctttggtagaagttgcagaaactcgtcaactccctcctatgttgattgaaagatataacacagctgccggtgaaggaacagctctttgcgggattttttctgacatacatcgggcctgggcaacagttgacaattcatttttcatctggcgatttgataaatgggacgggcattgccaagagcataatgttgacgagcaagcaatttgtgctgttggccttgctagggcaaaacctgggattttcattgaagccattcaataccttttagttttagcaactcctgttgaactgatacttgttggagtttgctgttctgctagtgctgatggaacagacccatatgctgagctttcattacaaccattacctgagtacatgattgccactgatggtgtcacaatgacatgcatcacatgtacagacaagggccaaatttttgtagctggtcgcgatggccatatatatgaattgcagtatacaactggttcaggttggcgtaaacgttgccgtaaagtttgtcttactactggcattggcagtcttctttctaggtgggtactgccaaatgcattcaaattctcaactgttgatccaattgttgatatggtcatggatgaggagaggaacactatctatgcgcgtaccgagggcatgaagttgcaattatttgatctaggagttaatggtgatggccctttgacaaaaattactgaagaaaagaacattgttgatccacgggatggaccttatggtggtcggaggtctaatgcgccaagagctgcacgatcaccaagaccatcaattgtttgcatctcacctgtatcttctgtggaatcaaagtggctccatgctgttgctgttttatcagatgggaagagattattcctcactacatctggtggaagtggttcttcagttggattgaacagtggtctgcagaggccaacctgtttaaaaattgttgctactaggccgtccccacctctgggggttggtggtgggcttacatttggtgctgtttctgtggctggcagggctcttcctgaagatctagcattgaaagttgagtctgcattctattctgctggtgctcttgtaatgtcagattcatccgctacagccatgtcatctcttctggctgtgcagaaagattcagctgcgcagctatctctccccagcacctttggaacagcttctagaacctccagagctctacgagaaacagtctctgctttacctgttgagggtcgaatgctttgtgcctctgatgtcttaccacttcccgatgctgcttacatgatgcagtctttatatgctgatgtggaatgtttcacatgtttcagaaaaccttctgagaaggcatgtataaaactgtgggcaaaaggggatcttcctacccagcatatcttgcctcggaggagggtggttgtattcaatactatgggtttgatggagttgatttttaacaggcctgttgatattctaaggaaattgtttgacgggaacaccctgagatcacaaattgaagaattctttaatcgctttggtgctggagaggctgcggcaatgtgcttaatgttagctgcgaagctactttatgctgaagatagtctgataagcaatgctgtttctgagaaagctgctgaggcgtttgaggaccctgggcttgttgggatgcctcaaattaacggcaccactgctttatctaatacacgaactcaggctggaggctttagtatgggccaagttgttcaagaggcagaacctttgttttctggtgcatatgaagggctttgtttgtgctcgtcaagactactttatcccatctgggagcttcctattatgtcgattcgaggaccgtctggtaataataaacgcgaggatggcgtaattgtttgcaggctttcagctggggccatgaaaattcttgagagtaagattcattcactggaaacatttttaagatctagaagaaacaagagaaggggcctttatggttatgttgctggtcttggcgattctggttccatactctacaaaacagggcctattattggccctggagggcatagcaatggaaggagtccctacaactcccaaattcgagatatgaaccctgtagataaatctgcatcgaataaaaagccaaggctgctttatacatcagcagaactagccgctatggaggtgagggcaatggagtgtcttaggcggttgcttaggagatctggtgaagcactgtttctgcttcaacttatttgccagcataatgttgcccgtttggctcagacactgggcaatgatttatgcaagaaatttgttcaattaacatttcatcaattggtatgttcagaggatggtgatcagctcgcgatgcgtcttatttctgcactcatggagtactatattggcccagagggcagaggaactgttgaagaaatcagtactaaattgagggagggttgccctagttacttcaatgagtcagactacaaatattacttggcagtggaatgccttgagagagcatctatgactaataatgctgatgagagagatattcttgctagagatgctttcaacctcttgactaaaattccagactctgctgatttgagtgccatatgcaagagatttgagaacctaagattttatgaggctgtagtccgattgcctctgcagaaagctcaagcacttgactccaatgctgatattatcaatggtcaaatagacccaaggcatcatgatacaataatgttgcagcgtgaacaatgctataggattgttatggatgcgctgtgcactctcaagggtgttgggcatagtcgaatgcaaagtgcagacaagtcatctgctctagcaactgctgctgatccagcttctcgaagcaagtatatcaaacaaatcatacaacttagtgtccaatggccggacacagttttccatgagcatctatacaggacacttattgagcttggtctagaaaatgagcttttagagtatggtggatctgatttggtttcttttctgcagagtgctggccgtaagcatcaagaagaggttcgggcagtttcttcagttacacctggagctgctaagatgcatgatttaggtgcacctatctcgactagtcaaacaaagtatctcgagctcctagctaggtactatgtccgcaagggggaacatattgctgctgccaggatgttgttaatattggcagagagacagtgctctaattctgaagaagctccagctcttgacaagcggtatgaatatctcagagatgcagtgcttcaggccaaaagcgcaggcatcgctgctgatttgtccaaaaatcctgttgatagcagcacagtggatttgcttgaaggaaaacttgtcgtgctacgcttccaaattcaaattaaagaagaattggagctcatggttgcacggctcgaaaatattccaagcagttctgaattacctaatgttccgttccctcgtgacaacattcttgctaatgcagagactgctaaggctgctaaggataaggcaaaagaactatcattaaatctcaagagtatcactcaactgtataacgattatgctgttccatttgatctctgggaggtttgcttggaaatgctgagctttgctaattactctggagacgctgatagcaaaattgttcgagaagtttgggctagactccttgatcaggcacttactaaagggggtgttgcagaagcttgttctgttgtgaaaagagtaggctcgaaacttgatcctgcagatggagcttgtttacctttagatatcatatgccttcaccttgagaaggctgcagtggatagattaagttcaggagaagaattagttggtgatgatgatgttgcaagagctcttcttggtgcctgtaaaggtcttcctggacctgtactttctgtgtatgatcacctgttatcgaacggtgcaatcataccctcactaaatctgaagttgcgccttctgcgatcagttctagcaatcctccgtgagtgggggatatctgtcattgcacacaggctaggcaccacaagtgctggggcttcattctttcttgatggaacattctcattgaaccaaacagggactgcgaatcaaggtgctcgagataaaataattagtttggcgaacaggtacatgactgaggtgaggcgattaaaccttccacagaaccaaacggagaatgtctaccgtggtttccgtgaacttgaggagaaattactatcttcttattaagcagattgcagtcattcctcaagatagtgaagaatgatcttgcatctgttgtaccacaaaaccaaggaatagagtcgagggcttctggattcacctcagcatgatctgtattgttccttacacttatctgcaagaacccggggctgctgcaggactctagctgaggtggttagatggctctagtaccactcatgtcctggctgagttggttagatggctctaatagcacttctgatgtcctgggtttgacttctaggtgagagcaaatttcagacgggttgaaaaaggtcatttgttggttcctctgtttgtgtgcacacaacggactgaccaatggatcctcgtgtaggtaaagatctagatctggtctatagggagcggattctcttgctgcatgggaggcagttttcgtgacttggtcgtactccgattgagcttcttaatataataacgggggacagtcttttctcaccgttcgagttcttttcttttttgaacccaaggctgctttaatcattattaatcagatgtttttcatgactaagtgcagccttcttttatttgacttgagtcagtatggactgcagagccgtagatttggaaaattgtttagatgtcttcattacttgctaatctagtggtagatactgccggtcctgttttaagggtggactttgtccctgaacaacattaaactgttgaatacaagttgggttttgatgcaggaatcggaatttagtatgtgccatgacattgtacagttctatagtagattattctcagtgttgtaagcttttacgctgtgtttgtttgtatgaagataccgtttcagtagctgaaaaaaggtaaaggttattgccagaaatgtggatttataggtctcgtt

SEQ ID NO: 27154 - DNA, 1391 bp, Zea Mays
ctttccacatagagtacttcatttgctttattgcagtacatgtactcattagaccacatcctgccatttggaggctagttcatgggatggcagttgtttaccttgtcgccctcactttcttgcttttccagactcgtgatgatgctaggcaattcatgaagtatcttcatcctgatcttggtgtcgaattacctgaaagatcatatggaactgattgccgcatatatgtacctgaccatccgaaaagcaggtttaacaatgtttatgagataatttttgatgagtttgttatcgctcatatcctcggatggtggggtaaggctataatgatacgaaaccaaccacttttgtgggtgttatcaattgggtttgaattaatggagctcacttttcgccatatgttgccaaatttcaacgagtgctggtgggacagcattgtcctagacatattgatctgcaattggtttggtatttggactggaatgagaactgtgcggtacttcgatgggaggacatacgaatgggttggtttgagccgccaacccaacattatcagtaaggtaaaaaggatgctgggacagttcacaccagcgcagtgggacaaggatgagtggcaccctacgcggggtccttggagattcatccaggtgctgagcctctgcgttgttttcatggctgtcgagctgaacacattcttcctcaagttctgcctgtggatccctccgcggaaccccttgattgtctatcggctggtcctttggtggttaatcgcgataccaaccatccgcgagtacaatacctacttgcaagacagcaaaccatttaaaaaggtgggatccttctgctggctttccctggctatatgcattgtggagctcctaatctgcatcaagtttggacacggtctgtttccaaagtcaatgccttcgtggctgatcacattctggtcagcagtcgccttgcttctcgtgctctttgtgtggacgtggaaataccgaacaatgaaaaggaaaatgatataattgtgaccaaaaaaatgatttgtttgcctccattctttacccgatttagtgttatcgtgtacataaaaatttattcaaattgtgtacatgtgctagcagtcaagtcttggtgatctgaagaggattatccatgagaaatttctatgccttctttgtctttgtattttccgtcagcgaagtaggatactggttcccctttggccctttaattcgtctgtattgccgcgtactacttcgttggccgtctcttaaatgtggagaacccttgatgcaacaacctatgaaataatgggattcgaatcccaaactgttgaataatgtttctcgatggcccaggaaaccatatctgcaggttgcacgacactaaca

SEQ ID NO: 27155 - DNA, 1796 bp, Zea Mays
ccggccgcgctgtcctttgtacaagaggagatgggatggtcgccacggcccccgcccatcacccgcagcaccgcatcactccgcctcgtcccccacttctcgcacttccgcttcagcttccaccgtgcccaagagtcacgaggcggcggcgggtcacgccgacgtactctcaggtgctgcggtgggactgcccctgctgctgccgcgggggcggcggaggggaggatggccgcggcgacggcggcggacatggtgtgggtgagggtgcttgaggatggcgtgttccggttcgacgcgtcggaggcggcgcgcgccgccgcggggcccagcctctcgttcgcggacccgcggcggcgggaggcgccgcatgacggggccgacatgcccgccgttgtcccggtatgcgaggtcgcggcggggggatcccagaaggtcgtgataaagcttcctcctgggacatctttctatggtactggagaagcgagtggcccacttgaacggactgggaaacgagttttcacatggaatacagatgcatggggttttgggccaggaaccacttcgttgtaccagtcacacccttgggttttggctgtcctccctgatggaaaagcattgggtgtccttgctgataccactcggcgttgtgagattgatttgcgacaagaatcaactataaagttctctgccttatctgcctaccctgtcatcacttttgggccatttaatactccagctgatgtcatgacatctttgtcgcatgcaattggtactgtgtccatgccgccaaaatggtcacttggctatcatcaatgtcgttggagctatgattcttctgagaaagtactcaaggttgttaggacatttagggagaaagacattccttgtgatgttgtctggatggatattgactatatggatggttttaggtgcttcacgtttgatagtatccgattccctgatccaatatcaatggtagatgatctccattccattggttgcaaagcaatctggatgcttgacccagggatcaagaaggaggagggttactttgtttatgatagtggctcaaaaagcgatgtttggattcaaaaggcagatggcagtccattcgttggggaggtgtggcctggtgattgtgttttccctgactatacatctgaaaaaacacgagcttggtgggctagtttggtaaaggacttcatctctattggtgttgatggaatatggaatgatatgaatgaacctgctgttttcaaaactaccacgaagacaatgcctgaaagcaatattcataggggagatgctgatattggtggtgttcaaaatcattcatactatcacaatgtctacggaatgctaatggcaagatctacttataaaggaatggaaatgggcaatgcagctaaacgaccatttgttcttacacgagctggttttattggaagtcagcgttatgctgcaacatggactggtgataatctttcaaattgggagcatctgcacatgagtctaccaatggttcttcagttgggtctcagtggtcaaccattgtcaggtcctgatattggtggttttgctggaaatgctactccaaaactttttggaagatggatgggtgtgggtgcattgtttccattttcacgtggccatacagaaactggaagcattgaccacgaaccatggtcctttggtaaagaggctagatacgttcataggtagcttgtccttgtgggcttagccttatttctaaaaaaactcggccggggagggaaagaccgccctcccggtattat

SEQ ID NO: 27156 - DNA, 213 bp, Zea Mays
gttaacaattaatcaaacatttcaggtttgactaccaaaatatcctacaaaattaacgatgacaaccttattgaataatcgtttgtattactaaatcaattcttcatgctattaattctccttacataataatcattttaaacttgagtttcgcgtgacacgaccactttatacgtatgtacacactccattgatgcatgaagcgaggcatca

SEQ ID NO: 27157 - DNA, 2079 bp, Zea Mays
gacaaaagggaaaagaataactgaaaaagtaaatcgctcaaaaaaaaaggaaaataaaaaaaaaatcgtagagagttcgattggcagttgctgagcccgagcgcgccctccggcgccgacaagccgggaccccacctccgccggcggcgatgggcaactcgcaggcttcgccggcgtccgcctccagctcccgcttcgtcatggcctcgagggccttcccgaagcaggagctggacggcctccgcgagctattcgcctccctcgcagcgcagtcgcggaccggcggccgcgccatctcacgccccgtcttcctcgtccgggggcgattaggcgacaggctgttccagctggtggcgaaggagagtggcgggagcgatggggtcacgttcgaggatttgatcatctccaaagcaacatatggaaggggaactcgtgatgaggtcgatgaattcatttatcaactatgtgatgtcacaggagatggcgccttaacaaggtctgatttggaatcagtcttggcgtctgttcatgaaactgtatttgcaataaagaaggaagctgtcgaagtttccaacaatagaccattcgaagaattcctcaactctgcagtgttttcaaaggatgttgaaggggtctcagggaagtctatgtcattatcagactttaggaactggtgcactctcttgccatcattgaggaaattccttggaaatttgttgatgcctcctgattcaggtagaccaggatttgaagtaccactgcttcattatcctgaaaacatctgtactgatacgctgcttctaaataaagagtatgcctggcatattggaggaggtttctcccaacatgaggtgcaagagtggaagcttttatatcatagttctcttcatggacaaagcttcaacactttcttgggcaaagtaacgaatggggatgctcagactgttctgattgttaaagatacagaaggatcaatttatggtggatatgcttcacagccttgggaaaggcacagtgatttttatggtgacatgaagacattccttttcaaatgctatcctcaagcatccattttccgccctactggagcaaacaagaatttgcaatggtgtgctgtaaacttcagctctgagaacataccaaatggtattggatttggagggcagccacatcatttcggactctttttatcagcaaattttgaccaagggcactcatttacgtgtagcacatttaccagccctcccctttccaagacaaataggttcaggccagaagttattgaatgttggggtatacaaatgagaggagcacaagatgaaaaactggagttagtcaaggggacagtcctcgagagattcaaggaggaccggaacatgctgaagatggttggtttggcaaatgcaagtgattaagtgatagaggatcacaatgatgtacatgatggagagtctgtacatcacatgttcataaaaataatcaaatctgagaccatgtttctatattctactgttcatattttgtcactcaaaatattcatctggtccacactttgtaacaattgaccagtcgtgaaggacagccgagccaatgttgcgtttgatctcaagaatgacgtcatccaagataagatggtctcatatgagttcatcccattaactttaatgggatgactttatcctttctgttgtactaatgtgcttgtaagatgagaaagtatctagatctttagtggttttggtgattaatgccaacacaagattattgtaactaacatgtgtgtttacaaagataaattaatgttaggtcacaatgatgaaaatgatttgggcagtcttttgtcttgatgcctctgattatgatttcctaaaattttcaaatgatgaaagataaagttaaagatggactaattctaagtatcgtttagagttgagaaacacttagaataatttagaactttgtttttatttaaccgcactataaatgaggtatgaattaacagtctgatctagataagtcaaataagtttagtatgatacacactaattatctttagctttaagtggcttaggagaggcc

SEQ ID NO: 27158 - DNA, 1193 bp, Zea Mays
ctctgagtggctcaccgcactgcgccccgtttcagagtggtagcagtgctgcgactgcgtgcacagggtatatagatagataggagtacactgcgtaggagacagcaagagggcgaggctgtgtgtgagagagggggaggcagagaacattcggcagtgtgagaatcggaatcggagatggcttggaatggccgcttcggcgacgacgaggaggggagcggccttgagctcagccttagcctcccgggctacttctccggatcgccaacccaagctgcagcaggtttcgaggacaaagcagacggcggctctgctgctgctgctgctgctgggcgagcaaagggaagcaatggcttcaaggccaggccggcggcagctgctccggtcgtgggatggccgccagtgcgcgcgttccggcggaacctcgcctcggcgtcctccaagccgtcccgcgatccgccaccaagccacagaggaaacgagtccgcgagcgtcggcgccggcggcaaggccgtcgagggcggcaacaagggcctgttcgtcaaggtcaacatggacggcgtgcccatcggccggaagctcgacctgggcggccacgccggctacgacacgctaaccgccgccgtcgaccacctcttccgcggcctcctctccgctcaaacgtcgggaccaggcggcgagcggcaggcggtcgcggggatcctgaacggtggcggcgagtacacgctggtgtacgaggacgacgagggagaccagatgctggtcggggacgtgccgtggcagatgttcgccgccaccgccaggcgtctgcgcgtgctgcggagctccgatctcaacccctcgtcgctaagggcagcgaccaggaagagagctgcagcttagtgctgcgctggcgtaccctggagtctcaactctgaacattttgcggccttttcggagggccaccaatgtaaaattgaagcggtttttcgtggatttttgttaccattaccatcatgtatgtgatcaagtagggaagcaggaatctagaggagatgagtggtgttgttagaatcacgtgtctcaacttatctgaaagtctaacaaggtgtcttggcgctggagtgtatagttcatacttacatgggctcgccagggcccatgggccatggcattgtgctactgcttgcatcgctctggctcagctaaagccc

SEQ ID NO: 27159 - DNA, 1246 bp, Zea Mays
gcccataaacaaattccccagcgtctcctctcctctcctctccttccccggcaccgtgctctgttgtgctgtttggttccgtcgcgtcgcgtcccgtgctcagatcagatctctcctctcccccgaccccgagtggagtgcctccctccccccctcccgctccagactagcggagagagatctcggcaccgccgttcgtcgccatggcggcggccaacgctcccatcgccatgcgcgaggcgctcacgctcaccagcctgggcatcgcgccgcagttcgtcaccttcacccacgtcaccatggagtcggagaagtacatctgcgtccgcgagacctccccgcaaaacagtgtcgtcatcatcgacatggccatgcccatgcagccgctccgacggcccatcaccgccgactccgccctcatgaaccccaacaccaggatcctcgccctgaaagcccaaatacctggaacaacacaggatcaccttcaaatatttaacattgaggctaagactaagatcaagtctcaccagatgccggagcaggtcgtattctggaaatggatcactcccaaactgttgggtttggtgacacaaacatcagtttaccactggtcgattgaaggtgattctgagcccaccaagatgtttgataggacggctaatctggcaaacaatcagatcatcaactatcgatgtgacccagcggagaagtggcttgtacttattggaattgcacctggagccccagagaggccacaactggtgaagggaaatatgcaacttttctctgttgatcaacaacgtagccaggcacttgaagcccatgcagcgtcttttgcaacatttaaggttgttggtaatgagaatccatcaacccttatttgtttcgcctcaaagacaactaatgctggacagatcacttcaaagttgcatgttattgaactggggaaacctggtttttctaagaaacaagccgacctcttcttccccccagatttccaggatgattttcctgtagctatgcaggtttcacaaaagtatgggcttatctatgtaattactaagcttggccttttgtttgtatatgacttggaaactgctgcggcagtttacagaaatagaatcagtccagaccctatattcttgacggcagaatcttcctctactggtggattttatgccatcaacagaagggggcaggttttacatgccacagttaatgatgcaactgttgtaccttttgtcag

SEQ ID NO: 27160 - DNA, 2662 bp, Zea Mays
gcttgggctctcgctcttctctgcttttctagaattgtggctcgtccgacctcgagtgattctgcagaagtattcattctactggcgtgctgagcaggtgcaggagctctaataagcctagtgcgcacttcagtcatcagccaagtgattgaaaagggcaagtcagctgaaatattggttccgagggctctgtagttgcttatccacgctcgcctatgcctttgcgctgatcttgacaactcaaagcttggatatggctacttattactcgagccctggcagtgaaagagattcacaaacaatgtactcagcagagtcaggcaatgtatcatatcccgtgccatcagccctagggaactttctttatacgaacaatgcatcttctggaccttatacagaatttagtggaattgtccagcctcagcagaatttcatggaacttactggccatccttcagcaatgtcacatgattcgtcatccaatgaagctaccaacatgggcagttcactcactgaacagcgctcttttggtcctttgaaagatatgagaaatgagatgttgatgcatttgatggatggagcacacagcagtggcagtgatctcatccacaatgatgctcatagcactgtacagctcgaatttggcatgttaaacaaccacaactcaacaagtgttccattagcaccaggccaagggctgtctctgagcctcaatacacatatcttggcgccttcctatccacactggtctgcaaagcaagacttactaacaccaaattcttaccagggtgatgacaacagaatgaagaatatgcagtctgaggcctcacaggcaatccggaactctaagtatctgaaggcagcacaggagttacttgatgagattgtcagtgtttggaagtgtgttaaacagaaaacagataaaggccctgctgaagcaggaaaggctgatggaaaagagactgatggggggattaaaagtgagggggtatcttccaatccgcaagagtctggtgccaatgcagcagctgagctttcaactgctgagaaacaagagctccagaataagatggcaaaacttatgactatgttggacgaggtggataggaagtacaaacactattatcatcagatgcaacttgtaatgtcatcgtttaatatggttgctggtgctggagctgccaagccttatactgcagttgccctccagacaatctcacggcatttccgatgtctaaaggatgctatcaatgatcaaattagtgttatccggaagaaacttggagaggatgacaatacatccggcaaagagggcaaactaacccgccttcgttatattgatcagcaaataaggcaacagcgagctttccaacagtatggtatgctacagcaaaacgcttggaggccacagagaggactacctgaaaattcagtctcgattctccgggcttggctttttgaacatttccttcacccgtaagtttttccgcttaacttagagatatgttcactcacccccccttttttatttgttctcatgccatgctgacaatcttaggtatccaaaagattctgaaaagctaatgttatcgagacaaactgggttgacaagaagtcagatttcaaactggttcatcaatgcccgtgtccggctgtggaagccaatgatcgaagacatgtacaaagaagagattggtgaagcggagctagactccaactcttcctccgacaacgggcagcgaaacaaggacaaagcaccatctcccgaagaaaatgaggacctgcagaccccaacaagccaggcttgccaaaccagccagctcggccagtccaaagccatcgttggtggagtgatgggctttagtggagtgctagccggcggcttccacaccgaggccaaccccgacgacagcttcatgagcctgatgctaaaggcccagagacctggtgaaaccgaaggcaccggtctcctccacgatgccgtcgctcaccactcggacgacggcgcccggttcatggcctaccacctggcagagttcgggaggtacgggaacagcagcaacgtctcactgacgctgggcttgcagcacgccgagaacagcctcgcagtcccaccaaacactcagccaggcttccccggcgtcagagaccaagacatgtacaacgccacggctcctcctctcaacgtcgcctccacatcttcagagtatgattcggcgagccaaattgatcagcaacagcaacggcagcggttcgagccgtcacctctgatgcatgatttcgtggcctgaatttcagctcgcccactggaaaacgtgggggaaaactactgccaatttgtagtgtgtgccaggacgaataacttgcctggactgaattttcaggcgtgggactgttagctgtagttaacgattggggatttggggggtacagtacaggaggtatatagcgtaaatgtgatgtaaatttagtgggggtgatagcggtaaagaaatcctgtaaagatggaatgcatttatacgtgtatttaagggccatgctgtaaaaatagatttacctgtaatgagtacttatgatccagtatatatactgtgcacgttgttgaaaccaaaaaaaaaaaaagaagaggggggtgggggtaaactgaaatggattgcaggag

SEQ ID NO: 27161 - DNA, 258 bp, Zea Mays
tttctagcaaacgcttaattttctaccatgcagttttgggtgaaattcgatcatatgtaatgacgctctacttattagaagagttaataaaaagttaggaacaaaatgctttcacacatggatgttaattataatgtttgttgtgtagtctgatttatatctggttaggttgtaagagcatgattgtcgtaagtaacaatatatcgataattagtgtccgcaatgcctcgtcattaagtgggttatttctcttttgcg

SEQ ID NO: 27162 - DNA, 1382 bp, Zea Mays
aggcggagcagcacaggacaggacagccagaggccgggagcagaggaggcggtcgtggcgagcggcgagccacaggcacgggcacctatcgttgaattgaacgaaaggagagcgggagaaagcgactcgtcactcgtcagtctctcgtcctcatgccgtcgccgctgggtggacgaatccaattcgggcctggcaaggctggcatgccgtcggcctccctagctcgccgcctcctctctactatatcatctccagcgatcccttcacgcagtaccagcaccagcgccagcaacagcaacagctgtggtttcagcacaagaagggccaggaagaagcgcagctgcgtttcttggacggtgagcgcggctactccggcggacatggcgaccaacagcggcagtgccctggcgaagctggcgccgctggaagccatcctgttcgacatcgacggcacgctctgcgactccgaccccatccacttctgcgccttccgagagctcctgcagcaggccggcttcaacggcggtgtccccatcacggaggagttctacagcgccaacatcagcgggggccacaacgacgacctcgccaggtcgctgttcccgggcatggatcaccagaaggcgatgcggttcatggatgacaaagaagctatgttcagaaagttggcgcctgggcagctgaagcccgtggatgggctgcaggagctgtgcggatggatggaaggccgcgacctgaagcgcgcggcggtgacgaacgccccgagggcgaacgccgagctgatgctgtcgctgttgggcctcaccgacttcttcccggtgctcgtcatcgggagcgagtgcgaccgggccaagccgttccctgacccgtacctcaaggcgctccagctcatcggcgcatcgcctcaacacaccttcatatttgaagactctgcatcgggggtccgggccggtgtggctgccggagtgcccgtggttggcctgacgacgaggaaccccgggaaggtggaggtcgaacccgcagcggcgaatgcgcaaggctgatgcgtcggtcactgcggacaactaagaaatgaaatgtcgtgctggactagccttcagcgattctttcagagtggaatagctgtgtaactgcatcgtgtaataaactaactccggtcggttcctcggctggaacctggagactagcttcttggtggattcaaacagggcccaaatagaccctaagttaagggaggtttcctgtgcccaacaataatgccttactagtaattagcgcgcgtcttacgcgcgtaaaaagaattcgtaatttaagtgataataatattatattattttaaataaaatgtacataaatattttataatataagtgataattcag

SEQ ID NO: 27163 - DNA, 2825 bp, Zea Mays
tcggaaacgtccgtactccgtagtgcgaggaccctccccgtcctcccgtgtctatttccgtccccgtccccaaccacccgcgttccccgctttccgtgcgcatggccgccgcgcgggcgcaaccaccaccgccgtggccggatgtctagaaagcccctcctccccacctgcgggtcctccacccctcccccgctcctcctcctccgccgcttcctccctcgccgccgcgcgacctcctctcccccgccgccctccacccggcggaggaccgccgccatgccaccccgcgccggcgactccgccgcggcggcggctgcggcggcatccttccgtctcgggatggtgcgggtggtctctttccttgtaggcgggctcaacctcgcggtgctgctgctcggactctacattatcgacgccgtgctcccgtcggggtgcggcggggggctcgctttcgcctcggcgcccgctctggctggggtccgcgtgctctccatgatcggcgccgcgcgcgcgcagcacgccacggcggacgccatagctaagcgccacctccacgagagcgacgcatctgtcgcagctgatgccgtagctcgccacgagattagggtgaggtacaaacgctggttgtggtggaccagatttggtatggcagttggtgcattgcagttggttgcagcaatttatctcatgtttgtcattgtaagagatctctcaaatgaaagaagatccacttcctgcttctttggacaggataaagctgatcgggtgtcagtacgagcacttattgctttatttcttatcctttcatgggttgtgatcattgtccaatgcttcacgggttctgatatattgaggtggcgatcattttatgcaacacatgatatggcatggaaagctcattacagggaagtgttcgaccatggaatccgagaagctttgtgctgcctaggacgtgcaaaatatctaactgtattggaagaagatgaggtttattctgttgcaagactccttggtgatttggttgcatatcgtgcttctgggacaggacatttggagctcttagcagggcttgctctattgcagaagcacgggaatttatctgaattgcagactgaccttgtggaggcatcccatgagcttatgcaagaagctgctttcctccatccatttgcggaagcatgttatacgggaccacttcttgattttggacgaaatcctatcctgtttccctgtgcatgggtttatagacaaggtgtgttaactccatgggcacgcagaagacgccctgcacttgatggtgataattggtggcgaggccatgctgcagctttccttagatttgttaatataccacctaaagcacttctgaaaggacgtgtttgccagagcaagcgtgaagctgcttattttgttgtggttctccatgacaaaagaactgttgtcattggggttcgtggaacagagacaccagaggatctcataactgatggattatgcagagaatgtgcttttactatggaagatttggatggactagtaaatagtgaacaattacctgcaactacaagagagagagttatttcaacatttccacactatggtcatggtggaattgtagagtctgccagggagcttttcatgcaactaaatggagaaaacacatcttctggaagacttgggttcctttccacactgctgggggagggcagtgagtgtcatggatataaagttcgtcttgttgggcattctttaggaggcgctgttgctacagtcctaggaatgatgctatatggcaaatacccaagcgtgcatgtatatgcatatggaccacttccttgtgtggactttgtaatagcggaagcatgttcgcattttgtcacaaccattatttgcaatgatgaattttcctctcgcctttcaatcaattcgattcttaggctacgatctgctgcaataagtgctctttcagataactctccagctgatacagcaatgatacaaaagctcgctcgaagaattttgcatgtgaacaggtatcatgataatggtcctgacgatggcataatccagggctatgctgatcatacaagaacagcagatacaacagtaccgaatgaaagacaaatttctcatcagattccattatgcaatactgaactagacctccacaatacgcaaaatggcttttttaggtataatgggtccagtgcatcaatagatgagcatctgagctatgaaggcataagcagtggccatgatatgcaaataattccacttgatggggctgattctggttttgaagggcaccagacatcttacagagaaataccagtggagcctcctgagatgtttcttgcaggcttaattgttcacatagtgcggcaaagaagaagtctctttcctctttggaaatgctggagcatccaggaaactgaaccaccatacaaagctgttttagcgaaaagggagaacttcagggatatagtggttactccttacatgtttacagatcacttaccatggaggtgccactttgctatgcagaagattgttgaagctcaaacgcctatgagacgtgcgcattccgatccacccgtacaacaacatttgcatggtttattgcaggctggaccgctggaggcatatttcagtccttcaggcagccagaatatgtccgtgacagacccaaaatcgtgacgagcttattgacagtcagaggccaccgagacatgatcactggttactgtacaccaaacagtatctaatcagtctactcaccctggcaacctgcgcgtcaattaattaattcatcgattgttctcttc

SEQ ID NO: 27164 - DNA, 4305 bp, Zea Mays
gccaactacacgacacaacctgccttccttggttcctccaccccgtcctcccctgtcccgtcgcgtcagccactcgccgcggccaactaccgccgccgctgttgcagccgcccatctgcttccatcgcgtcgcggaggccgctcgcttcgccgccgcacgctccgctcttccggtgccctcctccgggaccctcggccacgccgcgtcgccttaaaccctagatctgcgctccccgcccccgcgctggccgcggccgcgtactgacgccggcacgctgccgatctccatacgtcgctcgatcccaggtttagctgcttcgaatttagataagtttcttccatgcatcgtgttggaagtgctggtaacacggctggctcgactcgaccgagaaaggagaagcgcttcacatatgtgctcaatgatgctgatgataaaaagcattgtgcaggaatcaattgcatggcttatctaaatggttctacatttagtacaagtgattacctttttagcgggagtcgtgatggtaccttgaaaagatgggaattaaataatggggatgcaagtttctcagcaacttttgagtctcatgttgattgggttaatgatgccattatagttggagaaaagcttgtttcctgttcctcagacaccacaataaaggtctggaattgcttctccgatggtgcttgtaccaggactttccgccagcattctgattatgtgatttgtcttgctgctgctgagaagaatagcaatattgtagcctctggtggtcttggtggtgaggtttttgtttgggaccttgatgctgctcttgctcctgtagccaaatctgtggacgcaaaagaagacgaggttcctaatggaaactcagggcctcctttgacaacattgtgcagtgtaaattctagtagcaatattgcttcctctaatagtcaatcacatgggtacagtccaattgctgccaaaggtcacaaagattcagtttacgcattggctatgaatgatacaggaactcttcttctctctggtggcactgaaaaggttgtccgggtgtgggatccgaggacaggttcaaaaaacatgaaattgagggggcacactgacaatatcagggccttacttgttgattctacagggaggtattgcctatcaggatcatctgattcgatgataagactatgggatctaggacaacagcgttgtgttcattcttatgctgtgcatactgattcagtttgggcgcttgcaaccactcattcgtttggtcatgtctacagtggtggaagagaccaatctgtatacctaacagacttatccacaagagagagtgttttactttgcacaaatgaatgccctattctacagttgtctctgcaagatgacacaatatgggtggcaacaactgattcttctgtatatggatggccagctgaagggctcacaccccaaaaggttttccaaaagggtggctcattcttagctgggaatttgtcattctcaagggcaagagcttctttagaaggatcagcacctgtccctgtatacaaagagccatcttttgtcgtcccaggggttccagcaatagttcaacatgaaataatgaataatagaaggcatgtactgacaaaggataccactggttcagtcaaattgtgggagatcacccggggtgctgttattgaagactttggcaaggtttcatttgaggataagaaaaaggagttgtttgagatggtaagcatacctgcttggttcaccatggatgctcgattaggatgcttgtctgtccacctggatactccacaatgcttttctgcagaaatatatgcagttgatctaaatgtttctggagcacaagaagatctcaagattaatttggctcatgataccctttgtggcttgctagttcattggagtaaaagaaagcagaaatctagttcgcatggcttgcctaatggtgatagttcaatagggaaagatgttccgtcaaaagactcgcaccgatcaagaactgaggtggatgacacaactgaaaaccacacaactcatgtgctcccatcatttgagttttctacagtttcacctccatcaattatcacagaaggttctagtggagggccttggagaaagagaattactgatttggatggaaccgaaggtgatctaccttggtggtgtgtggactgtgttactcacaatcgatatccaaaggaaaatacaaagtgtggcttttatttacatcctgctgaaggttcgcctgcgccaaacataactcaagggaagcttagtgctccacggatattacgaattcacaaggttgctaactatgtggttgagaaactcgttcttgacaaaccattggatggaggctctgatagtacgtttgttatgggattgagttctgctcaatcacagctctcacagctagatagttcttcgcggcttggactaaagccatggcaaaaaacaaagccatgtattgaggtattgtgcaataaccaggttctatcaccagatatgagtttggctacagtgcgaacatatatatggaagaagccggaagatttgattcttcattatagagtggtccaatcgagatgatcacggcttcagatgtacatgctcacatggttctccagatatgtcccagcatgtccgcacctttagatggtgtggttgaagatgcctttggcttagagaggaagcatcatcttcacagaggaaatattttgctcttgctccgccctccccccggtagctgttcccagaatcgacttgttggctggggaggtagttgccttcctgaagaagaaaatggataagctttcgagatatggaggctgcaaagagctgaagttaagtttcgtaggtcattccattggaaacgtcatcattagaagtgccctggcagaacctgcattgcaaccatacttgaagaacctttacacttacatgtcaatatcagggcctcacttgggttactggtacagttcaaattctttgttcaattctggactctggctgctgaaaaagctcaagggtgcgcaatgcatccatcaactcactttcagtgatgatcaagacccccagaatacatacttttataagctttgcaagttgaaaacgttggagaacttccaaaatatcatattgctgtcatcaccacaggttattccctttcctcatctctaatagcaatttacttgcgtgtggaatttgttttgctgcaataaataactgggactctatagtccttatagcagcatgtcatgacttgtgagctatgccctatgcacacctttgtgttcttccaggatggctacgtaccatatcattcagcgagaatcgagctctgcccagctgcatcatcggacacgtcaaagaagggccaagtcttcacagaaatgctgaacaactgcttggaccagatccgcacgccctcgtccgacacccggacattcatgcgctgcgacgtgaatttcgaccagtccaaccaagggcgaagcctgaacaccatgattggcagagcggcccacatcgagttcctggaaaccgacctctacgccaagttcatcatgtggtcctttcccgacctgttccgatgacgacgacgacaccgctcgtctttgtaatactggcacataccaaaccaataacgcacactacccagtactgaccaggcaaggaatactaaagctcgctccaccagaacccaacaccgagacaggcaggaagcactgtgaaggtcctagaagcaatggtttttccagcttgctagatcctattctgtataagtagttgattctttttcatttcattcatagtgctgtagattgcacccttgctgtgaaaatttataatccttgtcgtctgttgtaccttacacttcagtttaggatgtgctgacaatcagtgagcttattatgtccaaataagctctctttttttaacgtttgatttttagtcaccttcgttcttgtggtgctgtaaatcctgcaacatgctttgtacatgcagacgatcaccctgtctgatactagatccggatggtcctgccgtccaggtccagggtgttgtttcagtgtttctgtttgacgaaactgctgtaggaatatataaataatatttttttggttctggcatcctgccgttggtggacctgcatcagcatctgcttctagaactgttccctcatgccgtccttgtctgtttgttatgctcgtgcgagtgctgccgtatgtgtgtgacagacatgctggcttttccggtggcagctgagaccaccatgacctggcgtgtct

SEQ ID NO: 27165 - DNA, 1982 bp, Zea Mays
cctcgcagcatctccctcgccccaccccaacctccacctccaccgccacccattgaaaagcagagcggcagactggcagaggcaggcgctctcggctctcctcgtggacaaaaccaccggctcccgatatccaaattggaacaggggattctgaacttggggtttgttccggggaccgattctggcatcggcagacgggatgtcagcccccctcgaccgacttgctaggccatgttttgaagggtttgtacataacgatgaaaggaaagagagcagatctgatgcagacaactcagaaggagataagaagactaagatcggatctttcaagaaaaaagcaattaacgcggggaacaaattcaggcattccctgagaaggagaagcaaaaagaagaccgaaaggggggattccatcaaggatataagggacattaaagaacttcaagatgttgagacatttcgacaatgcttaattgacgaggatttgctgccgccacagcatgacgattatcacatgatgttaagattcctaaaagcacggaaatttgatgttgagaaagctaagaatatgtggtcagacatgcttaaatggaggaaggaattcggggttgacaaaatagagggtttcaagaacttctcaaaatctgccagggaattaatcacacgattacagaagatcgacaacgataactacccagagacattgtgccagatgtatataattaatgcgggccaaggcttcaagatgttatggagcacaataaaatcattccttgatccaaaaactgcttccaagattcatgttcttgggaataagtatcaacataagttgctcgaaataattgacgagtgtgaattgccagaatttcttggtggcaaatgcaagtgtattgaaggttgcgaaagatctgacaaaggtccttggaaggatcccaacataataaagagagtcctcaatggcgaggcgaactatggcaggcaaattgtgaccatatccagcactgatggaaggatagtcagttatgcttggccagtgcacccaaatagaaaaggcagtgatgcatctgccgagtctgggtctgaagtggaagacgtaacatctcctactgcatcaaggaacctgattacacatcctattttgacccctgttcacgaggagtcaaaattgtcggcacatggttcttcatctgttgttcatgcttctattggagaaaacattcctgttgtggacaagattgttgatgatggatggggtagtcccagatctagtccacaagctgcttcttcaggttctttgtccctgaggaatttgcatggcacatttgaaggactcagagctcaaactatcacatggctgacattcttgatgatgaccctttttgccatgctttgttctgtcccaagcaagatggctagaaggatctccaaccaatctggtgcaggtgcttgaaacgaagccgtctgagatgccgtttgaaaaggaagaattgctcaatgcagccgtccgccgtgtggatgcattggaagctgagctgatttccacaaagaaagccctttatgatgctttgatgcgacaggatgagctactcgcgtacattgataggcaggagctgatcaaatttcgtaaaaagaagttctgcttctaagatttgaccgtggagcagctgttcatgtccggagccgtttatgtgtatattggattgcggctaatatgtagtagaatgtaatgtgtccatctttagaagtgtgtaaagtatagtaggaaagaaaataggtgcgttgtggtgtgcgcctctcctccccgaggtgaatgtgtggtctagcacttgtgtgctaccctaaattgtaatcttggaagttggtgtatagctgattgcgtgctaatacgtagttgtaaatgaaatcgcatgtgctcgtgtttacatgaaaaactaaatatagcagcaccaaaaataaaaccggttatttggttagaatcatat

SEQ ID NO: 27166 - DNA, 5565 bp, Zea Mays
aaaaaatcgtagctgctttcccctaccctttccgttctcggaggacgagggcgcgacggcacgcggcgaaaacgacgcggccgcgtcgccaaaaccgtcgcctcgcttcctccctcccatgacgggctcgaaacccgcgcccgccgcctcgcagaaccctagcgcggtcccgcatcgtcgtcctcctcctcctcctcctcctcctcctccgccgccggtgacagcggttgcgagggtgcgcgaagaaggcgagctctcctccggcgccgacgacgacgagactctgcaaactcagctaggtgccgcatccattcttgggaagtttgtggaggctggatctcaagtgccatcggcaagtctcctcggtaaaggcagtaacaccttgattgtctcaaatgctctgaatcataaagcgtctgctccaagttacaagaagatcatgagggtgaatcaggggcaattcaaacctggcactaaccggaatctttcatggcagaagcctgtgtcaagtgataaccttctgataactttctcagatgatgatagtggggcagactctgggaagacagggcgagataaagttaggaaggctagctctcaaggtacacagagaacagggaacagtatgcaaactaggatcatgagagaggaagtatctcagcagaaaaaccttggttcaaaagtaggtcctgcacacttgcctgcttttccattcacacatagaaatgttggggccggcagggcatcaggtaatacctttttcaggaaagagctgcctgtccgccaagttaatcctctaaagtctaaacagaaagttcaaaatggggtaggagtacattctgaagatcataggttagaaatcttgcgccataagatagctgctaaagaaaatgaactaaaaggtcaaaaaagacctttgtccgctgttgctacaaagaatgcagatttttcttccaatcagccaaggctgccatctgaaaagataaggcttgaagcttccagcattggtgaatattcacgctttaatagtctgtctgaacatagtggaggaccaaataaaaggttgaagctcaatcagcagtacaaccaattttgtagtgacctgacaccattggcacctattggttctatatcaggaaaaaccaatgtgcaatcttcagaagtgacaaatcggtctgaaaatggaattactatgaaccttaatgttaatgaaacagatacaacagacacaacagaacttgcagatcaaatacaacaaggtggggcaactaagagcctacgtcaccacaaagattcaggaggtgctgagaaccatgttatgcttgagtcacatgatgggcttgcagcacaaccaccatttactgacacacaaactataccagaagatacaagtgcgttggcccctgtgacgtcagcccaagctaggcaacaggtactggctgttggtacttcacctgtgttagacggaacaccacaattgcaacctggaaaggagaatgacgaatgtttgaacagcagtggccagataggcgtagagacacagaacacaatattgttctctctacttgagatggaagaattacaagacaaggaattggaggatgctcaggagcatagacaaaaatgtgaagctgaagaaagagaagctcttagagcttatcgcaaagcacaaagagctttacttgaggcaaatgaaagatgtgcaattcttcgtagaaaaagggagatttgctcttcacaagtccatggtttaattgcagagaattcttctttggtgcagtctttgagtattcggaatcctgaagatggccttgcaatgccatcactgctcaattctcagattcatgcagttagtcagattcctgaaaatcagggtggtagacacaggctgtgtcctgaagaaccttctcagcagcaaattgataagcatgaagatgaagcacgtccacactattgtgataagcttgctgccagcacagctgatcccagctctgtgagtgctgtcaatgctgacagcatcctttcagattatatggaggatgatcttctgttcccgactagacaggcaagatcagaatgtgctctggatgttgagaatcaaatggaagaaactatacatgtatatgcagaggaaaacagacaagtttctggtgacggtggtgaggattatgaacttttagaagcttctttgaggtctagattggtggaaaggtttgggaagaaatcatgtttgaatggcaccattgatgaaggtactgaaggacttgctgttgggaaagtagctgcagaacatggcaagcagtctgcatatgttggacatcagttacaggaagcagagcagaatattatgacaactactcttgaaggtacaatggagctggaaaatgatggtgctgaaaaaactgttggcctctctaattcttgtagtggtccttcaatgggcaactgtgatcctgaggacaacatttcctctctcaaagagttatgcatgccattggttatggacagtcttatttttccttcttcagctccactaaatgctgctagacaaatcaagcgggcatttcctgggatttgcaaggagctttcagattacaaaaatgaccatctgaccagtgatgcagtgtctgaagttacaggaagtgtacaagatatgatacacgaccttgttggagaaaatatgaagatgctcccaactacccaaaatgataataatatggtgcacagtgtgattgatcccttctggcccttttgcatgtttgagcttcgaggaaaatgcaatgacgaagagtgccagtggcagcattttgagcatcatgattggagaaagctagagcttacaaaacactctatgatctctgtttcaggccagatcccttatggtttgtctcagtatattcttccagtgccagtgtatcgtgttggttcaaatcttattaaagctgatctgaacttgacacagtcagtgttggctagcagtttatggcaatattggcaaagggggttttgtgcttcttttcctttacctttatctgttcaaagagttcttccatcagatgcaccattctttcaggctggtgatggccggattgctgattttgataggaacagacaactactaaaatttcgaatgctggatagcaggaagaataagattgtacagggttctgttgatattgaattcttcttggaggcagcccttgatttatattgtggaaaagtaaacaagcctgacagaatcaaggctctttcatttctggcgcggtccattgaggctgatccaagtacagttatcctgtgggtgttttatctccatatttactatcaaaaggatgaaggacttggaaaagatgacatgttttctgatgcggtgcaacacaatgtttattcttatgaattatggcttatgtatataaatagtaggttacgcgttgatgatcgattggatgcttataacgatgctttgagcatgctctgccaaatgacagctgagactgacaaggatctacaagaaagaagtgctttcatactagacattttcttacagatgatttacttcctgtgcatgtctggaaatatagacaaggcagtttctaggattattggaattcttccaactgcaatgcctgataattctggaaccttccagaggaaattattgatcagctggagtttcagaaagctttacctcgtgctttaatatggccttctattgatcccagtgtagacaacagagataagattacagatcttctaaattttgctgcttgtaagatggctgaagatattagtgagtgtgttaaaaacggggatccatcttacctgatgttatcacaattcctcgctgttaaccacattagttgtctagcggccattggaggcttaaaatcttctgttgatatgctggtgacctacatgaaggagtacccaatgtgtcctcagattcttctgatctcagctcggttagacagaaagcatggtacatgtccaggtctgaaaagctttgatgagttgatcttgaattggcctaaagaggcacaaggaattcaatatatgtggaatcaatatgttgaacatgctctggccactgatgccgagttagctgagaaggtactgacttgctggtttgaagaacatggaaaggactgtgatatccaaagcaatgctgctatttgtatagaactgagcagtgaagaacctggaacatcatcacttgtttcacctcaggcagttggttctggtccatctatatcagaagatctcgtctttcggttactaaacctctcactgtataagatactggagaacaacctacaggaagcacaaatggctgcgagtaaagcattgaaattggctcatggggagtggtacgagcactgtataagagaacatgctgcaattcatgcactggagctggagaaatcatcatcttcgacagatgctcaaactcgggctacattcagtttaatcattggctaccttgctgatcattgcaacttgcccacgagggagctgctgtcacgaaggttttgccagaatattaagaagcataggcttaggcagcttatagatgatactattggttctgttcctgcagattcttctctgataaactctgtccttgaagtgtgctttggcccatccctccttccaaaaagcattagcgatgtgaagtacctggttgattttgttgaaacagtcatggaggctcttcctgcaaactatcgcctgggcttggctgttggtggattcgtagctaagcacttcacaggttatggcgcagcctccactgggaccaggttctgggcaagctctgttctgatcaatgccatctttcgagctgtacctgtcgcaccggaatcagtatggctagaaggtgcaggcctcctggagaaactgcatgccacagagattttgaagaggttctatcagcaggcggcatcggtctatcccttctccttcaagctgtggcacgcccatctgaattactgcaaagccagtgggagcaacactgagagcatcctggagagtgcgaggcagcgtggcatcgagctgaatctgacaccaacatagtgtgtcccttggatccaagctgcatgatgttttgccagtcggagatgttggtagtgttgtgttaactggagatggcgtgtagatatatcggtgatcatggtggtgtgagatcatttttgttctttaggtgcaggtttagtgggacatagtcgtcggtatcttacagcatgtgtttctgatggagtgatatggttagtaagcagtggtgaaggatacaggcatacgggcactggggcatataccatacttttggactagacgggctagagactgattttggagtccgttatgtttccattttccgttctcttggttttctctgtcgtcaatgtattataatcatgatgatgaatggatggagaaatgagatgagatttttttgagttcactcttgcagtttcggttattatatttttgtgctgtcttcgaatctgatttggtcgacggcatgtttggaagtaaagtattttaaaatcaggttttggaatacta

SEQ ID NO: 27167 - DNA, 5171 bp, Zea Mays
caagtgtcgagcttatctgataatcacacacgtactttaaccaaacctgcaaagtgaagccagtaatccctctcatataccaccaaaaatttcccattgttttagctttctccatttctctgcagcagcctaccagagtagtgaggactgaggagcgagcagagtccaccaccactaccaaacacgcagcgcagtggtgctctctagtcctctcttcttccactccgctcttcccccgtcgcacgcacgcgtggtcatcggattcggccgcgtgccggcgagatccgggccgtcgcagcacggtccggcagacgccgcaatccgcgatcctgtcgccgcgggagctgcattggcgccccacgcggccgttccggcgtttcttgggaggttgcggcggggggaggagctcgtgtccgggatccgccagatccgagaacgtcggcggtagtagcagtggcgggggtcgccatggaggcccacgcgccgctcgacttcgcgctcttccagctctcccctcggcgtcagcggtgcgagctggtggtgtgcggcaatgggcggacggagaagatcgcgtcagggtcggtgaagccgttcgtggcgcacctgcgggctgtggaggaacaggcgtcggctcagccaccgccgccggccatccggctgcagctggaccggcccgccccgtggtttagtaagggcacccttgagaggttcgtgcgcttcgtgagcacgccagaggtgctggagttgacgagcacctatgatttagagatgtcgcagctggaaggggctaggaagatatatgcgcagggaggtactggagacgctacctcaggtggaactgctgaaaatgttacaggctcagcagcggcggtggcagcagatattacaaagaaagaacttcttagggcaatcgatgtgcgtctaagcacccttaaacaagatctggctgcagcttgttctcgagcatcctctgctgggttcaatccgaacagtgtatctgagcttcttcttttcgctaaccattttggtgccagtcggctgagcatgcacgaaattcatgtcactttgccagcggcgtcatgacatcagtcctcaaaccgcacagccagcagtttcatcacactggaaggtctttgatgatgggaatgttcgtggttcttccagttcagacatgtctatagatgagccacaagttgatctcggtgaatccaacaacaaatctacagtcggtggaagtggctctcaggtccacagactaagcaacagccaaggcttagaagtcgctgcagaacagcaacccaagccaaccatcccacaggccatagataaacaagaagcagaaacagacgcgtctcccgcacctgctgcaggagggctttcaaggcgtctgagtgtgaaggacaggataaacatgtttgagagccagaaaaaggagcagactccaagttctggtaacagcaactcagcaggtactggtagggtggttccagggagaggtgagcaccgcagggttccttctggggcctccatggagaagttagttagaaggtggagcagtgttagcgacatgagtattgatctcagcaacaatgagagcgttaacataaatgacaaaaaggacaatggaactcctgttgtgactccaacatctactgatttggaggccaactctaaagcaaaagctgatgtggactctaatggacagaaggatttagtcacatcacactcctggccttatcaaaaggataatgtaccaatggatccgactaccacagatttgtgcccaccctcaactttaagtaatacacttgctcctcatagtgatggtgcaggaaacgacatggttataaactctagcattgagagtgagtcatcctttgggaaagaagcgggggttattcaaggactcacaaggatgtcaaatcatgctacttcaaatgtttccactcgaaaccatctaaaatcttctgcaaagccagttgaggaaggcttgctgaaaaataaggatattttaaccagcacatcgttagaggagcatgttcgcatgatagataaggaaataacagctgttcctcatgaagtattagttgcaagtgaacagattccccagaatgatattagaggtctccatacaaaagatattcacactgaatctgaagtgactggaaggaaggatcagccttcacgatcatttggaaaggtatctggtggtgttaatcctaaaccaaaaacatcatccaattcccgagctaatgttaaaggctcatctggtagggctaatgtcaaaggctcatctggtagggatgagattacctttacagaaactgagttccgtgatgttagtttgcagcggaatcgtctaccacggaaggcagaggatgtagggagaaaggttacaggtggttctgattcagattcttctggtcgccagggaacaaatttgagcaggcaatcatccattaccatccaggaactaaacttccaggctagagtgatgggaccaggaaaagggaaccaagatcggcatggcgaattgcaaatgaaggctaatgagttggagaaattatttgctgaacacaagttaatatcatcccgacgaggcaaacctacagatgtgcaggttgatagcacacgtacggtgagtgaggtaaagccgataacagttcttcatgagacaattcatacaaaacaagttgtaaaggagagtataacaaccaatgattttgatgccagtgagcttctgaagatggtgagtaatcaaggatttaacattagcacaccacaaaaacttggcattctaagcttagaagagtcgagagggaagttttatgagcattatatgcagaagagggatgcaaaactgaaggaagactggaaactgcagaggggggagaaggaagcaatgttaaaggctatgcatgagagcctagaacggagcaaggctgagatgcgagctaaattctctcagtctggagatgtttctgactcaacttatgtttatcattgttctcagaagattcctccttcgcgatcagcaagaagaaataatgatcagggggttgactcattcttggttgaagaggaattgaatagtgactacctatctggtgacggttcttccaggagtgctgattctaggaagcattttccaaataaagttgcttccacccaaaaggcatctgttggtcctatccataagcgttcttcaaggactgcaagctccggttatggcaatcgcaggaatctaccagaaaatcctatcgcacagcctgtccccagtttctctgacttaagaaaagaaaatacaaagccttcacctggactcagtagagcggctgcaagagttcagcaaaagtcttttgcccgtagcaagagcattattgaagagtcaaagagtatattgaaagaagatcaatcgaggaggtcacaatctatgaggaagagccaaattccggatgagttgaaggacatttcatcagggaatgaggatatttacaattgggctccatcaagaatttccaagaatcaatcagagggagcttttgcttacagtgcccgtagaacgggtccaccaaagccatttcttaggaaaggcaatgggactcaccccgttataggtatagctggatttcaggctgcagcggctatgatggcgaatgccctccagaatggtgacagtggtgattttgaagatcaccaagatgattctcctgatgatgccaaagaagaagaagaatatgaaagtattgaagaaaattttagagaaagtgactttcctgctgattctgacagtgagaacccaagagttagtcatgaatttggaaattcagatgacccagggtcagaaaatggcgatgctaacttttcaagtgaagcacccgcaattggtggtactaagttcactgcttttacaggaaacgttcatgatccagctagtgatgttccagcaccctggagttctcgtcttccacagctgtccccttacatgaatgataatacagatggtgacacattcgctgattcaccgtgtggaagtccaccatggaattctcattcacttgatgaaataacagatgctgatgtatctcggatgcggaaaaagtggggcagtgcacagatgccttttgctggtgtcagtgcatctcaacagccacgcaaagatgtttccaaaggattgaagaaactgtggaaatttggtaggaagactagagggggtgatggtttagtaaatgattgggtatctgcttccactgcctcagaatacgatgaagacatggaagatgggcgggatctggtagtaggatcttctgatgatttcaaaaagtctcgaatgggttatcttgcttcatatgatgattttgttgaggatgaggtttttgctgaacaagaacaatcactacgcagctcaattccaaacccacctgcaaatttcagaccgagagaagatcaactgactggaagagcgccacgttctttcttctccctgtcaacattccgaagcaagggaggtgatgccaggctcaggtgatcctcagaaagtcagaagacaccagaggtggagtgtataaaatatcttccgaggttaggtatgagtatcaaattttcagggcggtacgcggctagcttgtgattataaatatatatctatatgttgtgtatctatggcaattcatataagctaccagttgagccccccattgttactgtttgattattctttttccgtaatattctttgacctcctgtgtagagttggacttagagatctttttgcagtctgttcttccaactggcccaaaactactgtatttttcgttgtttttgtgatatatatgtatctccctcttgtttcttcattcacatatatcacaaattcaagatatatggtaattttggcaattgtagcatggaaactgggcttattcaaggcacccgcaaagtcacttgttttagtgtgatgagtgtatctgtctttgatctatgtatatatattttttagaaaacttcatcgagttttttttgaaactttgccttatttactagtgactgcaccacacatatctttgttgtaagtttcagccattttttggagtatttatggccgtacagctggagctcatgtacttggttttggctgatgaccgcataccagtgatggtcctctgcctcgc

SEQ ID NO: 27168 - DNA, 703 bp, Zea Mays
ggactgttttggtgggcagtgaggccttatctgttggatctgtggtggaattaactagacagcaaaaatccagtggtttcacgccttcaccccagtagcaaatatcaagttttggaccatagtgcatacccaagtgggagacttatctactccctttcctatctgtttaccgaacgaagggatggatattttgtctgtgtgagatagactaaatgcggtgtatttgagctgtggttatgagcctatgtggtgtgggtgcatgggagccacgtacaataggtcatgcagtgctggtattcccacggttctcctacatcaggtctgagttgagctctataccctgcctacacattcagttgtacttgtccatatccagtgcccttcgcttgggttcagtaaagcttccccttgccctcaggttttagctcgagaccactgcaaacttgcacgccatcttcctgccagtggtgaccacgcccacccgttcttaacctcaccatggccagggttcgtggagattgtctcggccgtgttgtgcccgttccttgtttctcacagagtgccaagaaggagattctgaagaggagtctactccagtgtctgctgatcaagtgattgagctatctaactggttatggggtagaagtatctagaacctcttcacttcaacaaaggcaagccccggtgcatttgccacctccct

SEQ ID NO: 27169 - DNA, 110 bp, Zea Mays
cttatatgataactttggaaagtggtggaatgtcacattctaaaaaaatagcctattccaatagtaagattccaattcctcaaaatgaaaggaaacaaacggggcctaaa

SEQ ID NO: 27170 - DNA, 3840 bp, Zea Mays
ctggcaggctggctggctcggtgcctcccctgagttccatctcctgtcatgccgccgccgcagtagagctaacgagccacgggtagcatgcgccgcggcctgcgtcgcgggttgggcatcctcctcgtcccgctcccgcacgcacccagccgcctgccgccgatctctctcgcggctctcctcccccgacgcttcaatggcttctcccgccactccttctgcagcttccccgtcggggagcgcgccgtcgagcagttctcagacgacgaatacgaccacgagtacgaggacctccggccgtcgtcatcggtggcgaacatcgacgagtggaggtggaagctgagcatgctgcagcgcaacgcggaggaacaggagatcatctccagggaccggagggaccgccgggattatgaccagatagccaacctcgccaagaggatgggactctacagtgagatgtacggacgggtcgtggttgcgagcaaggtaccactgccgaactacaggcctgatctggatgacaagcggccgcaaagagaggtggtaatcccgctgggtttgcagaggagagttgaaggacttgtgcaggagcacctagaccgcgcattcttaccactgaataaatgtggtggcaacacaaaaaatggctctgacatgactgagaatgcgaacctggatgagcagcatgattcccttcttgatcggtcagtcatggagaagatacttcagaggaagagcattcggatgcggaattttcagagaagttggcaggaatcacccgaaggtgctaagatgctagaattccggagatcccttccagcagacaaagaaaaagaaaggcttctagcagccattgcacgcaatcaggtcattgtaatttctggtgagacagggtgtggtaaaacaacacagctgcctcagtttgtattggaatcagaaattgagtctggtcgaggggctttttgtaacataatttgtacacagccacgaagaatatctgcaatggcagttgcagaaagggtatccacagagagaggagaaaatcttggtgaatcgcttttttaataggttggctataaagtccgattggagggaattaaggggaaagatacacatttgcttttctgcaccagtggcatcttactaagacgcttactgagtgaccgaaacttgaatggtgtgactcatgtatttgttgatgagatacacgaaaggggcatgaatgaagatttcctgttgattgtactaaaagagctgttatcacgtcgccgtgatttgaggctgatattgatgagcgctactctaaacgcggaactcttctcaagttattttggaggagcgccaactatccatattcctgggttcacacatccagtaagggcacattttttggaagacatattagagaggtcaggctacaagttgacctcaagcaatcaacttgatgattacgggcaagataaagtctggaaaactcagagacagctattgcctagaaaaaggaaaaatcaaattactacacttgtcgaggaagcccttaaaaattcaagcttcgagatctatggctccaggacacgtgattctctagtgaattggaatcctgattgcataggtttcaacctcatagaggctgttctgtgccacatatgtcgcaaagagcgacctggtgctgttttagttttcatgactggatgggacgatattagttgcttgaaggatcaactgaaagcacatccattgttaggtgatccgaatagggtttttctgcttgcatgccatggttctatggctacttctgagcagaggctaatttttgagaagccacctcctaatgttcggaaggtagtccttgccacaaatatggcagaagcaagtattacaataaatgatatcgtttttgttgttgattgtggtaaagcaaaggaaaccacatatgatgctctaaacaatactccatgcttactcccctcatggatttcgaaagcttctgcccgtcagaggaggggtagagctggccgtgtgcaacctggagaatgctaccatctgtaccctagatgtgtgtatgatgcatttgcagactatcagcttccagagcttcttagaactcctttgaattcattatgtctgcagataaaaagtttgcaagttggaagcattggggagttcctatcagctgctctacagcctccagaaccacgagctgtcgagaatgcagtggaattcttgaagatgattggagcattagatggaaatgagaaccttactgatcttggacgatacctttccatgcttccagttgatccaaaattgggaaagatgctcataatgggtgcagtttttcgatgcatagatcctatacttactgtagttgctgggcttagtgttcgggatcctttcctgttaccacaggaaaagaaggatttggcaggaacagcaaaagctagattctcagcaaaggattatagtgatcatatggcccttgttcgggcttatgaaggatggaaggatgcagagagagaagggtctgcttatgaatactgctggagaaatttcctttcttctcaaacactacaagccattcactctctccggaagcaattcagctatattttaaaggattccggtttgatagactctgatgggaatacaaacaacagtttgagccataatcaatcattggtccgcggtattatatgttctgggctttttcctgggatagcatctgttgtgcatcgagaaagctccatgtcctttaagaccatggatgacgggcaagttcttctttatgcttgaatgcaaaatatcagaccatcccatatccatggctggtctttggtgagaaggtgaaggtgaatgctgtcttcatccgtgattcaaccggagtatcagactccatattgattttgtttggcggtgctgtagcaaaaggaggcatggccgggcacttgaagatgctcgatggctacattgatttcttcatggaccccagcctgtctgaatgctacctgcaacttaaagaagaactcgataaacttatacagcagaagcttgaagacccaaacttcgacatccacaaggaaggcaagtacatcctattcgccgtacaagagctcgccgccggcgacctgtgcgaagggaggttcgtgttcggccgcgagacgagccgggcccggctccggagccccgaggacgacggcaagagcaacctcataaaggacgggatgaaccccaagagcctgctgcagacgctgctgatgcgggccggccacaccccgcccaggtacaagacgaagcacctcaagacgaacgagttcagggccgtggtggagttcaaggggatgcagttcgtggggaagccgaagcggaacaagcagctcgcggagcgggacgccgccatcgaggcgctggggtggctgacgcagacctccggcgtgaaggctccggacgagaacgacgacgactcgccgctggacctgactgacagcatgctcaagctcctcaccaggccgaggcggcactcgaagaatagctctaggaaacggtgattttttgggcgaggatttgctgtagattgatcgcgcacacgcacaaaaggcatagagagagagagagagataggaaacgtcagctttggttacacgaatgcctcatggtctcgatgtgttgctttgtacattttttatttttatttttccacgctatgtcatcagaatcagaagttcctccatcctgctgattgctgtcaccgtagaacatggtttaaaaaattaaaataactgcctatagcgctgttatttctatagaaataaccttccgaagaatctaaatctacgatattac

SEQ ID NO: 27171 - DNA, 1046 bp, Zea Mays
ttttttttgatcgtcttcatcccgcatccggcacaaaccaactgcatcaagctccaccagagaagacaggcccgccgacggccgcagccgcgggcggactcgtgagtcgcgactacgccgctgcagttcccaactcagggtgcctgcccgtaacctacccaagagcggccccgccatgcgcgcggaggtcacccagatcagcgccctaaccgccgtggccgcgcacgtgctctgctctgcgggccttgctgccgcccacgccctcgctggccgcggcgcgctcgtctccgaccccgcgctcgcccttcgccttctcgtgcgcccatagtcatcgcagtgttcagctacctccggcgtgatgctaaaagttgctcgtttttcagggctgttgcaagaggattgatcggcttgcccgtgggagcgttccttaatgcatttggagcaatcattcttggggcacctgttggagtcaagtactggatagctactatttactggtcgcttgtcatgtccctgtttacgtttgttcccgcagcatgtgtctttggagcatccaggatcgattggcaggatgtgctttctcactccatttatttcacgccaactgatgttgagaactacatgatctctgcaccttgccatggagctgtgctaggagcgtggctcggtgcttggcctatgccacttgactgggagagaccatggcaggaatggccaatctgtgtcacttatggtgcagttgctgggtatttgttcggaatggcagtgtcattggtcctaacagcactttacaaaagaagggttcgtgcaaaagctgactagccgttcttcccacaaagcaatgtatttgctgataacatttcttgttcctgcgagtactcatcactttcagtagccttttcacccaggttcacattgttgtattcttttgaagcccccctcattttttttgcagttgtacattgttttcttgaatgtaatgtgaaggactcagtttattactgtaaaacacacgtttgttgagagagtgcgtgttacacaaagtt

SEQ ID NO: 27172 - DNA, 1158 bp, Zea Mays
gcagcgcaggcgtcgtcgtcgtcctccgcggatcccgcgcgcctcctccgccgatagtccttgtggcgaacacgcgaaggcaaagcaacaccgcaaatctctccccctccctggattggattgattgagctgctcgcgtccacctccgctcgaattgccattcccccctctctcttggtttctcttggatcgaattgttagtttattagagtgaagttgtcgggggagggaggctaggcgttaggtgggcgcctgcgtgctacgcctcgggagaaggtcaaaagaaaccgccccaccaccaacccaggcgactccccctcaacccaacccaacccaacctgccattgctcttctttccctccccgtcgccagctggccagagccgccccgcccggagcccaaaggcgccgcctttcctgaaccccgtccgcggcagattgatcgattggttgttcggttccttggtcgggaatcagaggaggcagcaagagaagagatgtgcccgctgcgggtgatcctcatcttcctctccgccaccgttgccggcttcttcctcatcaggggcctcaacgctgagcccgaccagttcgacgccgacgccgacgactcgggatcccccagggcacccctgccccttcattccaaggttggatcggccgtgaaagcagggttctggacgatggtggacatggcgagcgggcggtacctctggcgcaccctcgctgcccaagcccagccttccaagtcggcgcggtgaaagtgaaagtgaaaccatctcgtcctgccgatgcagtggagactggtacagtcagtcatgttgttgtaatgctgttacgtattggtatatattcaagtaaatttgcaaaaacaaaaactattcttgtgctgagctgagccttgtgttgtgtgtaaagctggaagtggttgctgtcctgcaaaaaaaaaaagaaagaaaacaaaagggacagcaagagaagcagaaggaataaagatgcagggttatgacatgtagatagtactgttactaggaaaaggtcccccttcagacatgttggagggctagttggttgtgttgttgttgagaatagcgtttttagtagcctttgttggcgtttatataacgagtaaggggtctggcaggatctcgcaacaaataaa

SEQ ID NO: 27173 - DNA, 1631 bp, Zea Mays
atgccgccgccctccctcgtctccatcctccccgccgcgtccatctcgccacgaagacgccaagcaaagcaccccaagacccccaccgcgagccatcccttcttctcccgaagacttgtgtcccaaccgccgcgccacgcctcgatctccccctccgctgccggcgggagcgggagcgacgagctccaccttctcgagaagccgttacctgccgtcgcagaggataacgaggccgaggaggagctcgagtctgctccggtgtcatcaacagaagaagcgctcgcgccttttctcaagttcttccaggtgaagagcaccgaccccgacgtgggcgcagacaccgcggatggcgaggtgccggaggaggcgtcaaggagagatgtattgtccgccgctggtgagcgtggggttagttactacgaccccaagcccggggacttcgtcgccggcgtcgtggtccggagtgacgggaggacgctcgacgtcgacatcggttccagcggcgaaccagcgctgatgctggccaaggagtcggcgccggtgcccgcggaggagttcgggtacctagcgtgcgacgtcgcgtccaagtgtgcggcggagtttgcagcggaagggcgggtcggcgtcgtggtcaggcaattcaggggaggaggagagggggacggggaggcgatcatcgggaggaatgggaaggagaaagttgcgccggtgctgcgcgccggtacgatcgtgttcgctgaggttctcggccgaacacttggcgggcggccgctgctgtcagcgcgcagactgttccggcgcgtcgcgtggcacagagcgaggcagataaaacagctaaatgtacccatcaagatcaaaatttatgagtggaatgctagtggcttgctatctagaattgagggccttcgggcattccttcccaaacctgagatgatgactagaccaagaaatttcactgacctaaagaacaaagttgatcaagaaatgcatgtctgcattacgaggattgatgaagagaccaacgaattgataattagtgaaaaagaggcatgggcggtgacatgccttagagaagggactctcttgcaaggcacagtacgcaagttgtttccatacggtgcacaaattaggattggcgagactaacagaggtggtttactacatatctcgaacatgacacatggcaagctgagatctgtggctgatgtgctgaaagtcggcgagacggtgaaagctcttgtcataaaatcaactccagacagaattgctctgagcacaaaggacctcgagagcgaacctggattgcttatcactaacaaagagaaggtgttttctgaggctgaagagatggcgcgaagataccgggagcaaattgcagagccacagccacctggatccattgccgcggaagactcctgtgacgatgctgtccccttcaacgacgaatcccggtcctatgctaactggaagtggctgaaatttagcaagtccgacgacgtggcaaaccccaaatctggcgtcgaatcgtaatcgtggtgcaggaactctgtagaaattttgatcaattcagatattcagtttccatgcttacttaattgtgcggcttggcgccttggccgcctgcacccggg

SEQ ID NO: 27174 - DNA, 2671 bp, Zea Mays
atggagcgaggacggggtggtagtggcggtcgcggtggcggccgcacgtttcagaggaacaatgcgggggaggagtggcccaacctcgtcggcgtggtgctgtcgtggagcctagcggatgtcatgaacaaggacctcttcaaggacaaggtcaagcagataccgtccacgttccccaacctcaagagctacctggagtgctacacctctccattgctggaggagctgagagctgagatgtcgtccagcctggaatccctgtcaaccgtgccttctgtcaggatctcacggatagaagaaaagagagacaaacacgaaatttatctggcttctgattgccaggttgctaagccacacaatcgccctgaatgctacactccaagtgtcggtgatgtaattctcttgtccgatgtgaagccgggccacatttctgatactactcgcaacggaaggccgtaccgagttgcctttgtcacagatgcggatggaggggatgaatacgacgactcaccaccggctaagtatggcatcgtagcgtcaggcaaaatcgatgccgccgatgacgaacgccaagatggtaaaagtacctcactttttgctgcttgtctgctcaacattgtgacatacatccggatatggcgttgccttgattatgaagcactcagaacaaaccgaggccttatagagaagatggtaaactatcagccgatttcatctacttcagagaacagcacggaggatgctggtccaactgacagcgtggagatatggaccaagttgtctgcaatggaacttaacacttctcagaacgatgctgtcttgaactgcatttccaaaatgcactccaagagcagcacatttacccttatctggggtcctcctggcacagggaagacaaaaacaatcagtgtgctgctttggttaatgagagaaatgaagcatggtacgctcgtatgcgcaccaacaaaccttgccatcaaacaggttgcttcacgtttcttgaagctggtccaagagcactctggcgacacaaggtgcttgggagatgtcctattgattggcaacaaagagcgcatgtgtgttgatggtgacctcaaacaaatatatttatatgaccgtgtaaggaggctttttggctgctttgcaccattgaccggatggaaacatcacctatcttccctgtctgattttcttgagaatggctactcacagtacctccaacatctacaagacagtcaggaaggtgatacgccttcctttttctcttacgccagaaaaagatttgccgttatttatatggagctcagaagatgtttcaatgatttgttgttacatgtcccaaaatccagtattctggaagtgaattacaacatgccaattaccagcaacagtcaaaagcaaggtttgcactgatgcattatttggaagaagcctctttgaaaggttgagttcacttggacacgaaaagcatctacttaatatgcaatacagaatgcatccttccattagtattttcccgaacactagcttttatgaagggaggatctcagatgccactaatgtcatggaaaaagaacaccgaaggatgtatcttccaggttctatgtttggtccttactcatttataaatattgaagatggaagggaggaacgtgatgaacttggccatagcaaaagaaactttgtagaagctgctgtcattgaagaaatattataccgtctccgaagagcttgctttaaaaccaaaaggaaagtcacggttggtgtcatatgcccatacaatgctcaagttgtagcaatccaagggaaaatagagaaaatgaggttcgacccattgcaagtaaaaactaattctgtcgatggctttcaaggtggtgaagaagacatcatcattttatcaactgtgaggtcaaactcggttgggaaggtaggttttctttcaaacgcacagcgggcaaatgtgtgtttgacacgggcaagacattgcctttggatcctaggaaatgcaacaactctagcaagcagtggatctatttggtctgatctagttcgtgatgcaaaggataggcggtgtttcttcaatgccagtagcgactatgttatctctcacgtgattgctaagcaaaggagagatctcgacagagttaatgttgaaaagagcatccatatctcaagttccaaaaactgcagggtttgggttgaaacgcgatccccaaatgacctgaatgaacagggcacttcttcgacgagtgtttcacattacgctggaatcccgtcaagtgacattgttgttgtttctgaattccagcgtccaagcaataaaaatgaggatgtcgaggatataactgtcattccaaataaagagaatgataaggatatcaatgctatgcccgttattccagataaagggaatgtcgttgatggcaaccatatcctcgccattccttgcgccatgttgagtaatctagctagatggtgtatccgttcgttccgatcttaattgttcctttatgtctcctatccctttttactcctaagtttacagcattatatataagtgtctctccataacatggtcggatgtttgatttttgtaatgtgggtttgaataatgaaaatgtatgtttgggcctttttagcctcccttgactgttgagagaaaaaaaagcta

SEQ ID NO: 27175 - DNA, 932 bp, Zea Mays
gtacaacagaatgttccattatgacagataatagttcttggtatttgagacagtacagcaagtacatgatgttccatttggttccttctttgaggtgcattgtaggtggtctgtgaaaactatcagttctagcctgtgcagtcttaacataagcgctggtgcacatttcaagaaatggtgcataatgcagtctaagataaagagcggtgctgtggatgagttgaagaaagaagtcaaggaaatgttagactttgcacaggggtatattctcaaagttaggtctccggaccaagagaacagtaatctcgcccaacaagacaacatggcaccggatgcagtgtctggcgatcaatgattatttcaggttgtgcctcctgatttagggtggggtgacagctgccatgacaacgaattatgatgttatacacagaagggcaggtggacctgtaactagtccacatgaaccacatctaacatgttaagctgacttccaaaagatggttggaccgtgtattgtgtgtgtaaacttctttttcctgtcattccgctatccattctggcagtttggctgatgtatatagttgtaaaaacaagtatagtgttgactgcggacggttcagtggtgcgttgttcgaagataaacaaagaaagaaacaaaagagaaatatttgcaccagaaccatcagaacttgtgcagtgtacatttttgtagccagagggaactgttgctttttctgcatctgggccaatggcacgtcgcagatgagtatgatggccaggtgaggccatgttcggtaggtatggattcaatctccaagtggaattaatccagacgtggattgaatggatcccttgttgtcactctttccctaggtggtttaattccatattcatcaattccctgtcattttttcttgttcggttagcacata

SEQ ID NO: 27176 - DNA, 2724 bp, Zea Mays
gtctactaccttctaagtctttggtcaaggctggtgacatccgtgccttacttgaaaggtgaaacaccaagtcttcttgatgaaactgttcccaagatcacagaaggttttatcacttccagaattaattctgttcaggccatccttgctgacaactcactggaaaatcctttggatagtgtggaagttctccaggaccagctggagtttcttcctttcctttgcagattccagtaccaaagtagtagtctgtacatcataaacatcatggaacctcttctgcaagcttatacggtccagattacccgctcctggtgatgctgatgagctgtctgtcattgaaggccaaattgcatggatggttcacataattgcggccattgtcaaagttaggcaggtaacagtcaagaaacacaagagttgattgacgcagaactctctgcccgtgtactacagttgataagtgtgactgatacaggagcgcacacacagagatatcaagaattaagtaagcaaaggcttgaccgagctattctcatttttgtacaaagtttcagaaggtcatatgtaggagaccaagctatgcattcttcaaagcagttgtatggaagattgtctgagcttctaggacttaatgaccatttaattctactcaatgtgattgttggcaaaattgctacaaatatgaagtgctatgctgagagtgaggatgttattgatcatactctgtccctgttccttgacttggcaactgggtaaagttgtgactatgtttttccagttttttttctcatttatgcgtgatgactgttcatattttttttcttgccaagtcagctatatgactggaaagctgctgcttaagctggagagtgtaaaattcatcattgcaaatcattctgtaaagtcttccgcttcccactaacttttatttattttccatcgctgcactcagttttagagataactcttttttattattcttccagccagagaatttcccatttcttgcagaatacaaatgttcacgtagtagaactacgttctattacatccttggctccttagtcttcatggaagatagccctgtgaaattcaggactttcatggaaccacttcaacaggttgcattaaacctggaggcaactcctgatgctgcttttcggactgatgtcgctaagcgtgcatttgttggttggatgagagatctacgtggcatagctatggcaaccaacagccgcaagacatatggcctcctatttgactggttgtatccatctcgcatgccacttctgctgagagccatctcactttgcactgatgaaccagaggtcaccacacccttgctcaagttcacgtatgaatttgttttgaacaaagctcaaagactgacatttgattcatcatcaccaaatgggatccttttattccgagaggttagcaagataatcgtggcttacgggtcacgaattctattgcttcctaatggcacagacatttatggaagtaaatacaaaggcatatggatctcactgactgttctttcaagggctttgtgtgggaattatgtcaattttggcgtatttgagctctatggtgacagagcacttgctgatgcccttgatatatctctgaagatgaccctctcagttccattatctgatatattggcattcaaaaagctgtcgaaagcgtactttgggtatatggaagttctgttcaacaaccatatcaagtttgttctcaatttggacacaaacacattcatacatattgtcagctcactcgaatctggcttaaaaggtctagatgcagggatatcatcacagtgcgcttctgccatcgacaacctggcagccttttactttaataacattacatctggtgactcacctccatcaccagcttcagtaaatctcgcacgacatattggagagtgtcccaatttgtttcctcagatactgaagactctttttgagatcatgctctttgaggatgctggtaatcagtggagtctgagtcgaccaatactgagcctgataatgaccagtgaacagatgttcagtgaactcagagcgcacatattagcatcacagcaacaacgcctttcacagtgcttcgataagctgatgacggatgtcaataggaacttggaacctaagaatcgtgacagattcactcaaaacctgacagcatttagacgtgattttcgactgaagtaacagctccttggtaccagctatcagtttgaaggtgttcctgcatgatgtaaatactccagttaccttcttttttggaaccacctttctgtgggttgagaaaagaagagcttgtccttaggtttgccttggattggctgaagatggtcttgttgatgcatgtggtagtgaaagcagctgtaaatttcatagcatgtcattttaatcagaatggtgaaaggtggagattgtttcttttgttttttattttatattgcatccctttagcatgtacagcaaaattggtgctagaacaggggtggctgtttgcccaatttgttaagtgggaggcagtcatctcagatataattcatttgttaagaagtcaacgaggtaaaggatgtaaatgattccgttggctttgctgaatatgaaagttgaacagtaagaaggatggctcagttgcatccgctgtgcagattgaactgttaatgataacaatttcttttttttttgtctctgtttg

SEQ ID NO: 27177 - DNA, 3047 bp, Zea Mays
aaagaaaagccagtcaaacccaaccacctcagctcagcatcgaggtcgccttcccctcctccagttgtccccagaaaccgtgtcccctactctctctctctctctctatctctcttctcccctcgatcaacagcaacagcggcggtcagaagcttccgtcgcgacagctcccgacctcctgccggtcttcccctctcctagtcggcgcgaatcccgaggcggaggaggaagaggggagcggagtgggggtgggccccatcagccatgagtctcacggggtccgccctggaggcggcgctacaggcggtggggcgcggcctcgacgcagctggagaccaccggctgctctactgcaagggaggtggaaggctcgtcgcgctcgaggaggaccgtgcgcgggacctcccgctccccgacggcggcgtcctcccgagcgtgccccccgatgtcgaggtcgagcagtgccgcagagaccccgagcgcatccgccccttcccctctggcccaagctctgccgcagcggatgggccctttgtctgcagcttcgataagatggctgagtatttcaacaggaagtcatgcttgtccgagacagtaccgctgggttccttcaactctctgttcagcttcaccggttcatggaagaatgatgctgcggctacgaaggcccttgcgattgatggctattctctgcctctgtttcgagtgaaaattaggagttctgaactgacgctgcttgagagcgttaagcacgcgatcccaaatgtttgggatccatcagcattggctaggtcagtagctttattgagaattacggtacccatattattatttctgttacggttggtggtaaggacgaagtatacattaagcagcattcatcgtcccaattgtcagggttagagttcaaaaattatgtgagggaaattgggagggaaagattctcagatgtggaaaacaagtcaaatgcaactcctatcaattacagcgagaaggatattacagtaatattcagaaggaggggtggttgtgatcttgttcaaagttttagtgattggaaaggaactgttgcctcagcaccagatgtcataggcatgacctttctttcaattgtctctcttgttgacgatgtaccaggaaagaagcaccttgctcgtgcagttgagctatacttgacctgtaagatctgctttcggttactttcatttgtcctatgcagttatgcaactcaagaactcattcaccacattgaatatagtatatttataatgccctgaggaagctaacttacgatgtgatttctcttcaattatactgttttgataagttctgttttacagacaaacctccaattgaagaattacagtatttcttagattttcaagtcccactagtttgggctccagctccaccaggtattgctagtcaccataggaaggaacctgtctgcccatcgcttcagtttagcttaatgggcccaaagctcttcattagcacagaacaggtaaaggttaccccttaaatctgaacatatgagtacagtgattactttttggagttttacgctagaaatgttattttaattgttgtcaggaaatgctatagctaagtatgaaacacaattaccatcataaacaattttctactaggttgggcctctagctgagttggttaggtggtagcacttaagttctgagttcgattccccatgggagtcagactgctgttaaaaaggtcctctcgtttgtcccaaaataaagcacaggtaaaagaaccgactcttacataggctacggcgccgttgtgtatgggtgagatatgtgttcggatgttttctagaattgcaagagaaggtcttcttaatgcaatacctgggatcccagatgttgtcttaccctcgcaagccaagtttttttttaaaaaaaaatataattctaaagatcaaggcatgcagaagaacaaaaatgtgtaaattgcaccaggggtacaaattttgtacctatagtgcattttactgataaaaagatacacttttaagacaatcaattttttgtgaacatgctaactctgaagaagacatgtgcagatctctgttgggcgccgaccagttgttggcctcaaactgctcttggaaggagctaaacagaatcgtttggctattcacttgcagcaccttgtctcattaccaaaaatattcctacctcattgggactctcatattaccattggacctccaaaatggcaaggccctgaagaacaagacagccgatggttcgagccaatcaagtggaagaactttgctcatgttagcacagcacccatagagtacactgaaacaaatattacggacctatctggtgtttatattgttacaggtgcacagttgggagtgtgggattttggtgcaaagagtgttctccacctcaaacttttgttctccagggttcctgggtgcacaattagaagatcagtgtgggaccacagcccatcaagttcttcaattcataaagcagatgaatcttcatcgtcctcgagtgataatgctaaacttctgaagattattgacatgacagaaacattgaagggcccacaagatgcacctggccactggctgatcacaggtgctaagttgggtgtcgagaaaggcaggattgtagtgcgtgcgaagtactccttattgaattattaaccaaatgtttaaagcattcattcactcactctgatattgagcactgtgttttaaggtagcatttgttcttttgtttttcatgtatgactttccttcccccttgtaacttgatgtggatccatgcttcttgttgatgcggtgagtgaagtagcatgaagatgtttatgctcagctcaaaagtgtttgatctggtctcggtcatcgcttccagagccatctggttttgacagtgaaaatggtgcgttcctaagttttggcactggtgttttgcactcggaaattcatcagtggaacataattagtatattcgctctggttactaagcgctaagagtttcagtaagtttttttgacattgg

SEQ ID NO: 27178 - DNA, 2588 bp, Zea Mays
gtcgatcctcctcatttcggcactgggccccactcgtcactcaccctttcaggcctccacggcacctcccgacagggactcccctcctactcctgctctcccagcctgcctttacttctcccgaatgctcgaggcctgcaaagctccagcacatccaatcgcacgacactccctgctgctctctgctgagaggtgctagatctcggactcgccgttgatttgattccaagttaaagacagcgagcaatccatagattgaccggtggagagcgagagaaagcgagagagagaagggaattggttggtaggtggagaccggagggagagctcagctcaggagattgatgcttgcatggtgatgcgggcgcgggcgatggggctgagcagcatccggcgggaggtgctggtctccgccgtcttcacggcgctcctcgtggcctccatcctcctcctcccctcgctcctcctaacgggcgctgggcccatcaggtggccgtccctgtccccgtcgaaggatgccggcatcggcgaggaggaggagcagcaggcgcggtaccccgtgacgttcgcgtacctgatctcggcgtcgacgggggacgcgtcccgcgccgcgcggctgctggcggcgctgtaccacccgggcaacgtgtggatcgtgggcaggcccaacctggtaacctaccgtggccccaccatgctgaccaccacgctgcacgccgtcgccgtgctgctccgcctccgccgccgctgggactggttcatcaacctcagcgcctccgactacccgctcgtcacccaggacggtaccctgtgatgcttgcttgcttgcttgctgttggtcgtccactggatggacagactgtttctgaattttgggggttgcagatttgatggaggcgttcgccgggctgcccagggacctcaacttcatccagcacacgagccacctgggctggaagataagcgggcgcggccggtgatcctggacacggcgctgtacgaggacgggagggcggagctgatccgcccggtgaacatctccaccaacctcaggaggctgcccacggcattcaagctcttcacaggtactccgtccattttgctgtaaacctttgaaaacccaaggcaatgccccgcacacaccgaacgagtccgaaaacgtgccttgtggtacaacgcaacggaagcatgcttgtgagcaaccgattaggacagcatggcctcgtcaatcggttgttgatcggactaggggagtgtacggtgccgtactactccccgcggcgcctggctgtgctatggtgtgtcctgtcacacagtcgatgccgtgccagtggttgccctcagactttggccgtccttcgattccgatcgagtgacgggtgtgggcgtgagccgacagccgagcccgtgatggacgaattccggtccggtccggcccagaaagaataatcttatctggaatggcgtctagtcaatggagcaggtgagggtagcgccgttcacgtacggatcgaccttcactgcaattgattattcccccagatctgtgatccaggcttgtttatgctttggaggctcgccaatccaggcagagaccattgcggttggcaatggcaaagcaaaacacgcacgcatccgcccacccatcctgtcgcgggcgatgacgacgctgtcgcgtgcagggtcggcgtggacgatgctgtcgcgggcgttcgcggagtacgtgacgatggggtgggacgacaacctgccgcggacgctgctgctgtaccacgccaacatcgtctcctcgcccgagttctacttccagacggtggcctgcaactcgcgccggttccgcaacgccacggtcaaccacgacctgcacttcatccgctgggacaccccgcccaagcagcacccgctctacctcaccgccagggactaccgccggatgctgctcagcggggccgccttcgcgcgcaagttcagggacggcgaccccgtgctggaccgcatcgacagggacatcctccgccgccgggaccccgccgcccacttcgcctacggcggctggtgctccgaggccggcgaccaaaacggcggcgccgcgctctgctccaacccgcaggagcccgggaggcgcggggccgtcaagcccggcgccgggtccaggcggctcaaggccatgctcaggaagacgctgtcgccgaggaatttcaggaggcagcagtgtaggtaggggaactgttctgttatgttctgatcaaacaaacaggtcgttgactcaattttgtatgtatagaaaaggcagatctgaaacgcatcaaagcggcccaaagccaattttgttcagttgattcgcacaagtctgaattgaattgtagtagggagatactcctggtggttgatcatctcatacacggaataataatggaaggggcattatgcaaactgtttagttatatggtactaaactgtttagtaatacatagatgctcgtcaatttgttggtgacaaacagcaaagccaatgaggaaaacatttgatttatcacaggaaatagcgaaacgaatagtgcgacctttcaatcgagtccaacattgtca

SEQ ID NO: 27179 - DNA, 2695 bp, Zea Mays
cgtctctcctcccttatccattggagctcatctccagcttatgccctccacgtactggctctagaaattcttgtaggcattcctttatctcctccacctccacgtagaaagcctaggattttctaccagccacgtctttcatctcctaggcgttatctgaacatagctcatttgttttcttatgccatttcttctctgttcctgaagtcacggctccctggagatgttcagctcgtctgcgcttggtctttgccggtagccgagctgctccctatgctcgagttcctagcgccctgctccctgctccctggtgccggagcttcttccttcccctgcgctcgccggcgttcggctctgcgtgactctgccccagcccagagctctccctgccgagtcccttcgcgttcgtcgaagctcccttgcagcgccctgctcgccccagcggctccctgctcgcgtctccagccatcggcagctcaccgcgcacagctccctgtccgtcctctctgccgagcgattttcacgtgcgcgtgcagctccggctcgttccccatggtggccgcggtgcctctctgcctgctggggcattcttgtccgcgaactccacccatccgtgccagtcgccgtttctaggatcgattccaagctgtagtgtgtccggctgctttttcttcgtcccatggcgcccggacttctgctcgccccagctcgctgttgtcgcgagctccagctcagatttcgctttgtcgcgcagctcggcgcctgctgctcgcccctgctgcgcgtgtcacattcttctattgcgcgcacgaaaattctctgctcacaacggcgtgttaagtttccgcgtcgagctcctctcgtgcgtgcctgtcgtcgtctccaagccgattcttggctgtcgtagtattttaagttatcccggccatgtctgtggttgtcaggcgtgtctgttgccgtgaactcgcccctggtgtccactctgtctctggtccgcgcttccttcagttcggccaggcggggcatcgttccgtgctgtgctcgcccaagtcgccactgtcaaatcgtcggagtcgctcaactcgccaatcgtatcttgttcgtcgcgtcgggaatgtagctctatatatgccaccctcctatatcgtcgttgaagctgtcatcctctgctcgacccccacctcaccagctcgctccaaacacgatctcgtcgtgaaatcccaagcgtcggatgaagacggagccaacagcatggtgttcatcaagtgcacgacaggaagctcgagccaggatttatcagcattcgtacgagtattgggtcgcgtttggtgctggtgagccgatttataatttttgtacgtttatctgatgattggattaactagaattattagtcgtaataatcctcatatttagcacaggcgcgttgtggtagtgtcaaaaataagtgaagtacgataggtttagtaatgcgaaaggtagattaatttagggatatctaaacgaggtggcaatataaaggatagatatgatttagtatttcatatagctatttgatgaattttgtcattgtcaattgcactaaataaatgacataaagaaatgtttgattaattgtggaatgtaaaatatgtgagaagtaaaataaaattaaaatagtactttgtgaacgatgtagtatcaattataaaacgagggataaatttagaatttaaattaattagctgatgagttgattaggcaaattgtgtttcttgtgtataatttgttgctcgtgatgtttgcgttaggttcgtttaacttagagaagcgtaattattgcgcttagtcgtacgtcgataactagtatttccgtttaaaatagtacatcgtctcgccgctaggtgtttaatacgctatcgtatagcactatttagatttgtgctattcttgtttatatgcattcatgtgcatcgtgcatctcaattaggtacgataattgatcgcgtgatgcggaagacaagccaagtcgaccccaagcgcggactactccgcatgatgatgctgatggacaaacctgaagatgttcgccaagtggacgtcgtctaacaacactaacctagtgttactcaggcaagccccggtgcatttgccacctcccttgatgtttttaaaatctttctcacttgcttgctgcattaagttataggagttgattgttaaacaattcctgcattaccttccttgattttgattaccccccttgaaatcctgtttttacaaaaggttttactttgcttagcattgctttagaaaaacaaaggatttgttttacaaaagatgtttggcaaagtggaagggttatctttgaaaataaaatttgatggtggatccatcagggccttgatggattcaacatctggaaaagatgtacctctgccaggtaccaactttgggtttgaaatgattaagctgagaccgggcgggtgacttgcacgagaagagagtctcggtgtagtgtctccgtctgagtcgattaaggaccgtctcgatgtaggcttgatgatcgaggaccctttaactggtcacatgcctcgtcatgggtaagccttgcctcgggcagactaaggccggaataagataacacgaaatgggcatggagcggtggcgagagtagcgtgtaccctccgtggcaagaggctggacggtggtgtag

SEQ ID NO: 27180 - DNA, 3419 bp, Zea Mays
ctgatctactaaattcaaataattagtgtgcttggtatcacttcttaacattgttgttgaattgaagaaatgctgcaaccatccattcttgtttgaaagtgccgatcatggttatggtggagatagcatcggtgatcggaataaagttgaacgtattgttatgagtagtgggaaacttgtcttgttggacaaactattggtgagactgcgggagactaaccatcgtgtgcttatattctcacagatggttaagatgttggacatccttgcagaatacctctctcttcggggatttcagtttcagaggcttgatggtagtacaagagcagatcttcgtcatcaagccatggaacactttaatgctcctggaagtgatgatttctgttttcttttatccacacgtgccggaggacttggtattaatctagcaactgcagatacagtgataatttttgattcagattggaatccacaaaatgatttgcaggccatgagtagggcacataggattggccaacaggagacagttaatatctaccgcttcgtcacatgcaaaagtgttgaggaggatattttggaacgcgcaaagaaaaagatggttcttgatcacttggtcattcagaagctaaacgctgagggcaggcttgagaagaaagaatccaaaaaaggtggccccatatttgacaagaacgaactttcagctatcttgaggttcggtgcagaggaattgttcaaggaagacaagactgatgaagagaccaagaggaaccttgaaagtttggacattgatgaaattcttgagagagctgagaaagtcgagacaaagggtggtgaaggggaggaaggaaatgagcttcttagcgctttcaaggcatgtgatgtcgcaaacttttccagtgtcgaagatgatgcaacgttctggagtaggttaatacagccagatcctgcagatatagttcaggaaactttggcacctcgtgctgcacgaaataaaaagagctatattgaagatcctcagcttgacaaaaataataacaggaaaagacgggcagttgaaacacaagaaaagccaaggaggctttctggcagaactgtggaaacagttaattcattaccattggttgatggagcagtagctcaagtacgagagtggtcttttggtaatgttccaaagaaggacgcttctcgttttgtacgagcggtcaaaaaatttgggaatgcaacccagattggattaattgtggatgatgttggtggtgtacttgcgaaggtaccgcatgaagcgcagatagaactatttgatttgctggttgatggttgtcaggaagcagttaaggagaatacagacattaagggcacagttttggattttttcggtgtagctgtaaaggcctatgaattgctagctcgtgttgaagagcttcagttcttggcaaagcgaattgcacgttacaaagatccaatcaagcagtaccgcatccagctaccttataaaaagcctcagtggtcagcaagctgtggatggactgaaactgatgacgctagattgatggttggaattcattggtatggctacgggaattgggagaaaataaggttggatccaaagcttggcctgacaacaaaaattgcgccagcaacacttggagaaagggagacatttttaccacgtgctcccaacttggataaccgcgctagtgctctcctgcaaaaggagtatgctaagtttagcggtaagagcttaaaagtcaaaggaaacacccgccagacagtcaataacgacagtaatagtggagttcgatcaatgaggggccggcaaaaggatgtaccagaaaaagatgataataagccgaacaaagatgacattcagaagcgtagggtaatagtggaagctgaagcaagagaagaaggtgaaatttctgaatcggaggcagagaccaggtatcgtcaggacaaagaggagaagtggcttgaatggtgctctgaagttttagatgaggagcaggaaactttgaagcgcctggataggctgcagaatacaagtgtaaacctcccaaaggaaaaggttctttcaaggattcgcaagtatctcctgataattggggacaaaattggagaagttgtccggcaacacagtgaatcttataggcaatcccgcatggtcatgaggttatggaattatgttgccaccttttcaaacatgtctggggagcaactgcatgatctctatatgaaacttagtcaagaccaactggaaggtggagttggcccatctcatggtggcaatttcacatccattcctcccaataagggaggtaactcaaatcaacttcatccttcgagaaaccaaaggccaactaggtctctccagtacaattctgagtctttccataatgagagctctggaagttctgaagcctggaagcgtcgacggagagctgacacagataatcaatttgacacccagcctttgtgtcaacctccaattatgacaaatggaaataggttgcaggaatctagtagttctgcaggtattcttggttggggtccagttgaaattagacggtatggtaatgagaggccaaaacgtgctgttcatcctagtcatttccctactgggcatggacctttgctgtagctgaaggaagtagatgatgcgaacaaccttgttcattttggcataaccgttcccagtgaatttcagcttccatatagttataaatggtggatctccgtaggaattgaaattctttttccaaaacaaaaaggaataaagagcaacctcacctggatcacagttttgaattatatgccttaaaaggtaatgccaggactctagaggcgacttatggaattgttaacagctacactgaatatccttctgacaccatcacagcaacacaaatacatggtggcttgtgaactgccaagaggatcaatcgaggaagttttgcctgttcagttttgtgatctctcaacaatgatctatagttaaatctcaatacataaattatgctttacattgtaatatattgaaatatggttccgttatgctccctccctctcgatgtgttttgtgccgtttttctaccgtgttgatgtaaaagatgaaagaaatgcatgttctcattttgaggcaacaaaaagttgcagccgggagcataatagtgaaatgcgatggaattatcggatacttatcgattccatagtgttttccctgagacaatgtactgaatgaggtacggttataagaaatggtgataattagcttagtaggtgctcagccattctacaagtcatctggtagtccgaagttgcatgaggcctactttcccctggttgccccacttatgctcagtaagtatgcttctagggttgtatgatgatggcccaattgaatttttaatcctgtgtatgaa

SEQ ID NO: 27181 - DNA, 5769 bp, Zea Mays
gcagcagcaagtagtagaggaagaggcgcccgaataccacggtgcctccgcctcgaccgccccccgggctccgacgcccttcctcaccaccgtgccttgctcctcctcctgctgctgcgctccgccgcggagccctaggcggagctgcggaccccgtgaccccccgcggcaccgccccggagctcggcggaggcggcgggcacgtcctcctcatgcctttggcgccccggtcggagccgatcggtggccgcctgaggagacgcagcagctcggcgggcgccggcggagaggcggcgggcacgtcctcctcatgcctttggcgccccggtcggagccgatcggtggccgcctgaggagacgcagcagctcggcgggcgccggcggagaggcggcgggcgcggaggtggaggcggaggcggaggaggaggaaggggagaatggcgctcttccgcaagttcttcctcaagaagaccccggatcggctgctcgagatctccgagaacgtctacgtgtttgactgttgcttctcgactgattccatgggtgaggatgagtatcgggattacttgagtggcattgtcgcgcaattgcaggaattttttccggacacatcacttatggcatccaatttttggtctggggacaaaagaagccggatatcagatattttatctgagtatgacatgacagtaatggactacccacaacagtatgaaggatgtccgttgcttcagctcgagatgatccaccatttcttgaaatcatgtgaaaattggctatcagtggaaggacaacataacatgcttttgatgcattgcgagagagggggttggccagtgcttgcattcatgttggccggactgcttttgtatcgcaaaatatatactggcgagcagaggacactagaaatggtctacaagcaggctcgcagggactttatacagcagttctttcccttgaatccccagccttcacatttgagatatctgcactatataacaagacaaggaggtggttcagaatggcctcctattagcagacccctcatcttggattcaatagttctccatgttgttccgcggtttgacacagatggtggttgtaggccatacttgattgtacatgggcaagactcaagtcctggtaacaagagtgcaaaggtcctttatgagatgccaaaaacaaagaagcaccttcagcgttatggacaggcagaggttcccataaaattaagtgtgtcctgccatgttcatggagatgtggtacttgaattcatccatattggcgataatatagagaataaggaaacaatgttccgggtcatgttcaacactgcattcgttcaatcaaacatccttgaactgaatcgtgatgatattgatgttgcttggaatgtgaataatcagttcccaagggactttcgagctgaggtacacttttcagaccctgtttcatttaagcctgctgctaccatcgaggaggtagctgatgatggagacgagactgatgttgcttcggtagacacaggagaggagttttatgaagcagaggagtattggcatgatgctagaaaagacccagcaactcattcaattgatggtggaatatcattaaatgacattgcagaatttgatggtggggcaacaactgaagaaaggagcagcctagagaagcaccgatctgatgagggtgtgaagattgctgtctcccagaattttggtagtatgaatgaaaaagtggcaattgcacctacctcaagttttgagaatcaagaaggattgcagcagcctcgtgaagttcttccaaatgctaaactaagcaaaaataatgatcaagagaacagtgatgtgcatgatatacaggtggttgctacatctgttgattcagagggacacaagtttggatctaccggtcaggaggacacgaaaggtgtaattgcacaaactttagtcacgacagtcgatctaagtggcagtgatggaattcactgccagactgatgaacaaacaaaaatgtcagaataccctgatttggactacactgcttttggctctcctagaagtttgtcacgtacagatggggatgcccacatgagaactaagaaaaatgaagggttgcagaatggtgatattaagattatcactgagaacacaataagtgtggacaacgagctagtgatctatgaagagaaaactatagttgtcaatggtaatgcaatacaggtagtaaaaaacgttgtcaatgaagagagcatcgcggctaagataggcaaaccaattactgagagtaggacctcattggacaatgacaatggcaagattcaaactgctaaaccttctgatatagccaatggcaaattggatgggtgtagattagaatcttgccttgaaaccgtgcctaccaagaaaaccactgtccatgacagaattgttgtcttaccagccactggagtagcaactgagataaaagccaagcaagaggtgcttgttgacaaacaggattttggtatagttcttcctcaaagtcgaacagtagccagggctaggagtccgaggcttggaagtgatgaccgagggcaaatccctgataaagctgtgttatcagtattgaaggagatggtagtaggcaatgcaaagatggaagatcaaccaaagcttgccaaaccaaaaataatgcgtagatggatctcaccaaagaaggaatctgacgctacctctgtgcgcagaccatctcaccctccatctagatactacagttcaccagctgcactaggtattcgatccatatctacagatggtaaaatcagcgttgtgaatgatgcacctttattatcactaaaacaaccatatggcagcaacttgacacgagaagcaacatctgcacagtctgctccatcgcctccacaaaaatccttgttactaggtgcacaaagtgcatcaagaagccaggtttctccaccgccaccgcctccacctccacctgcaaccaactattcttcaagttctacgcctatgcacatggggttagcttcaacaggtttgtcaaacttacctcaaggtgcttctccacctaggtcaccggtagcacaaaaacatgcatttgcccctcccgctcctcccccgcccccacctccacccccgaggtcaggtgtaggtggaaatactccacctccgcctcctccaaggctaaataacagtgcaatcgctccaccgccacccccatccaccataacacgatcaagtgctcctcctccaccaccaccaccacaatcaatgtcacgttctgctcctccgccacctccgccgccaccaccatcattgtgttctaatgttccattgccacctctttcatgcacactttctgctccacctcctccgccgccaccaccactaccttctatggcacgttcagcagcaccatctcccccgccacctcctcctagccgaggagcacccccaccccttccccttggtcgaggagcacctccacccccacccccaccaccaccacctggccgaggagcacccccacccccacctcctcctggccggggagcatccctgcccccacctcctccccctagccgaggagcacccccgcccccacctcctcctgtttcacgtgcaggacctccaccacctccgcctcctccaggtgctcgctgtggacctccacctcctccaccccctccaggtgcaagtgctccacctccacctcctcctccaggtgcacggccaggagctccaccaccaccgcctcctctaggagcgcggccaggagctccacctcccccacccccacctggaggtggtggaagaggacctctaccacctcgtgcaccaggtgtgccaactccacctagagcaccaggtgtaccgctaccaccaggaagtaatccatcattaggcagaggacgtggggctgtacgccctatgggatcagctattggggctgctgcctcacgcaagtcaactttgaagccattgcactgggtcaaagtgacaagggcccttcaaggtagtctttgggaagaattgcagcgcaacactgactcgcagagcgtttcagagttcgatgtatcagaacttgagagcctttttcctgcagctgttccaaagtctgatgacagctcaaaatctgaacgtagaaaatcacttggatcaaaaccagaaaaagtgcatctaattgagttgaggagggcaaataacacagagatcatgctgacaaaagttaaaatgccactctcggatttggtgagtgcagctctcacgctagatcaatctaccttggatgttgatcaagtggagaatctcataaagttctgtcctacgaaagaagaaatggaacttctcaagaattacactggagacaaacagattcttgggaaatgtgaacagttcttcttagaattgatgaaagtgcctagaatggagtcgaaactgcgagtattctccttcaagatccagtttggttcacaagttgctgatctgagaagaaacttggatatcatagactcttcttgtaatgagatccgaacttctctcaagttgaaagaaataatgaagaaaatccttctccttggaaatactctgaaccagggaactgctagaggggctgcggttggcttccggttggacagtcttctaaaacttacagacacccgagcaacaaataataagatgacactaatgcactacctctgtaaggtacttgctgcaagatctccacagcttttaaacttctatgcggatcttgttagcttagacgccgcatcaaagatacaactaaaaatgttggccgaggaaatgcaagcagttagtaaagggctggaaaaggttcagcttgagtatgatgcttcagaaagggatggtccagtatccaaaatttttcgtgagaaactgaaagagttcaccgacaatgctggatctgatgtgcagtcgttatcttcattgttttctgaagtgggtaaaaaggctgacgcgttgatcaagtattttggcgaggatcctgtccgttgccccttcgaacaagtgatctccaccctcttaacttttgtaacaacatttcgaaaagcacatgaggagaacctgaagcaagctgaacttgagaagaaaaaagctgaaaaagaggcagaagcagagaaggccaaaaacgcacaattaactggcaaaaatcactctaaatcatcaaatccaagccgacaagctaagcaagccatagagaggacaagatctgtaagcagacgaggaagagatgctgggtgattatcccgaatggccggctattgtggctgtgcttctgatctgcttgcgaggcaaatgaacgaccgcatgatgcatttctggcaaggggagtttcgtggacggacgccgtggcatccgtcgggtgcagcgcgatcgcatcaaagaaactttacatgataccagctgcggactctcactggagaatgccggcttctttttttatccatatcgtccatcagggtccagtgctaacttctgactgctgtaaagagcgaatgcgtcgtcacacccagcgtagccaattcatcagggatctggaggaggccagaaaggacgaagcggcggcggtgccgtgtcctacggtcctacctgtcagttgccgcggtgtcctcctgtcctgatccacgtcgccgccactgacagactcctctctcaccgtggcacgaattgatgagccacgaattgaggattgatcaagaaactgaaagagttcaccgacaatgctggaatcgttatcttcattgtt

SEQ ID NO: 27182 - DNA, 1166 bp, Zea Mays
ggatgattcattttccaaaaggtgcctgacagatatataaactgataatagcaggtggagtcatttctaagccattgcgtgtgtgtctgtgcaactgtgctgcatccaagctaagaccaagatcatcgtcattcgtcagagccttcctaccggcaaccaactccaacgaaagccgcctcaccaactcccagcggttgcgattggcagctgctgcaatggcttccggtggcgcgtcgtcactggccttggccgcgctgctcctcgtgagctgcgcctcggcggcggtggcgaccaagtacaccgtcggggacgcgtccggctggacgaccaccggcgactacgccacctgggccagcggcaagaagttcaaagtcggcgacagtctcgagttcaaatacgccggcggggcgcacacggtggacgaggtgagcgcggcggactacgccgcctgctcctccagcaacgcgctcagcaccgacagcgccggcgccacgaccgtgaccctcaagacggccggcaagcactacttcatctgcggcgtggcgggccattgcagcagcggcatgaagctcgtggtggacgtggccaaggcggtggccgccccggcgccggccccagccgcggccgcggccccggctccggccgcggacaccgccccagacgcccccgacaccacgccgtcgaccccgacgtccccctcgagctccggcggccgcacgcccaagagcccagacacgacggtcctctcgccgccggacaagaagtccacctcctccggcgccaccgggctcagcgccgcggcgtgggccggcttgggccttgccgggctcgtggccgtgcacctcggcgcgttctaggccagcccgctggcctggccagggaggagacagtgccgtgtgctgttgttaggctgcacgtcatggattggattggtgtattggttgagggacttgactgcttaccagagagagatctcttttggttcagggaactgtgctgtagacctgtagttggataccttggatgttatgctatcagttttgctgttgttatcacatctctttcgtgattttcttttcgatattgtcccgtgtatgttggagacttggagcattattttcgtgatccgcttgaacgaacaacctccgccatgataccgatgatag

SEQ ID NO: 27183 - DNA, 5185 bp, Zea Mays
gtcgcatccatacgaaagcccaggaaaatgcttgtcctccactttagatcgacgtccttccacccgatccatgggaaaaccctagagctagagcttgacgcgcacctaattttgcgcgccaaatgctcgaacaccttcgcgccatagctacccgctggcattggcaatatccgaagcgaacagggctcccgcaccccaacacctaatttgtgcgcgcgcccgtgtcacaaagagagtgaagagagagcatggaaggctcacccgccgatgccgccggctccggccgccgcacgcgcacccggggcgcggaggcgtcggggcgtgccgccgtgctccaacaactccgcgccgttcgcagtggtcaaattcgtgcctccgacgccatccaggtgaaggttgacgccccgatttacgacaccgtcccggaggaggagtacaacgtgctcgtcgctcgccgccgcaaggaagcaggcgagttcatcatcgacgacgacgggctcggttacgtcgaggacggccgcgaggaggactggagccaccgcgctctcccttcctcctccgacgagggatctgaaggcgaggacggcgccccccgcaagcggaagcagacgcgccctccccaggcgaagcgccagccgcagcagtccgccaaggtggcctctctctccgccgctgccgcaaagacgggccagcagatctcctctatgttcacatcctcggtatttaagggacgcggcagcgaccgcgccaagaacttggcactggccgccgacagcatcgtggacgacgtcatcgccgagtttgcacctgacgagaacgaccgtgaggagaggcggcgacgggttgctagggtttgtgcgccgcagcctgtcccaacagtttcctacatcaagcctcaaaaggtaattctcgatgctgaaatggtcagatcggagaatgaaaatgatatggtggtggtggaattgaagaacgatactgagatggaaaccaatttggaagaaattcctggttctagtgctgaattggtggttaataagagtttggaggagccgaagcaggaggataatggggaagtaaagatagaaaaggcacaccgcctcaatgcaaagattaaggcggaggagtgcagaaataatgatgtgacgagtgcaacagaaggatggatgaagatatgtgggaatggggagaatgcagtaggtgaagaaggggtggctgttgatggtaacaccaatgtggatgaaagttcagagtttgagctgaaagatggagcactgcccttctacatactggatgcatacgaggaaccatttggtgctaattcaggcacagtgtatttgtttgggaaggttgaagttggcaagcaattccatagttgttgcgtcattgtaaaaaatattcaaagatgcatatatgctattccaaaccggtcagtgtttccaatggactccatatcagggatagaaagaaaccccactgctgaccttttgccatcacttcgagcaactctacatgagttggcatcaggattaaagagtgaaatagctgacaaattgtcagacctcaatgtgtcaaatttcataatgactccagtcaagaggaattatgcatttgagaggactgatctaccaaatggagagcagtatgtcctaaaaatcaattatccttacaaggatcctgctctaccagcagacctcaggggtgaacattttcatgcattgcttgggacaaacaatagtgctcttgaattgtttcttatcaaaaggaaggtcaagggaccttcatggctgtcggtttccaagtttgtgacacggccatccactcagcgggtcagctggtgtaaatttgaagttacagttgattgcccaaaggatatatctgttttgacaacaagtacaaatctagaagttcctactgttgtagttggagcagttaatctcaaaactatcataaatgagaaacacaatgtgcatgagattgtgtcggcatctctcatatgttgtcatcgggtgaagattgatagtccaatgcgtccagaagattggcagaaacggggaatgctcagccattttactgttgtgcgcaaacttgaaggtagcatatttcctataggtcttgctaaggaagcttctgataggaaccagaaggctggtagcaacgtgctagcactagaaagcagtgaacgtgcattattaaatcgcttgatgattgagctgagcaaacttgattgtgatgtacttgtgggacacaatatttcagggttcgacttggatgtgcttctacaccgtgctcagacatgcaaagtgccaagcagcatgtggtccaagattggtcgtctcaggcgatcattaatgcccaggcttaccaaaggaagcacactctatggttctggagcaagtccaggaattatgtcctgtgttgctggccgtcttctctgtgacacctatttatgctctcgtgaccttctgaaggaggtgagttattccttgacacaacttgcagaaacacagttaaaaaaggtcaggaaggaggtttctccacacgatatacctatgatgttccagtcttcaggcgaactgctcaaactggttgaatatggtgagacagatgcatggctttctttggagctcatgtttcatttgagtgttctcccactgacacgacaattaaccaacattagtggtaacctgtgggggaaaacactccagggtgctagggctcagagggtagaatatctactactgcattcattccatgcaagaaaatttattgcaccagataaatttgcacgcaacaaagagctgaactccacaaaaagaaaaatgaatcctgatactgggggtgcaaatgctgatgatggtgctgctgatccttccgttgatgatgaagtgcataatggtgatcaaagtaaagctagaaaaggaccttcatatgctggtggattagttttggagcctaagaagggtctatatgacaagtatgttctacttctcgacttcaacagcctttacccttcaataattcaggaattcaacatatgctttaccactgtcgagcgttcttctgatggcagtgtacctaatttgccagcatcaaaagttactggtgttttacctgagttgctgaggagtttggtggagaggagaaggatggttaaatcatggttgaagactgcttctggtcttaaaaagcagcagttcgatattcagcaacaagcattgaaacttactgcaaatagcatgtatggttgcttgggcttttccaactccaggttttatgcaaagccacttgctgagctgattacactccaaggtagagagatattgcaaaacactgtagatctggttcagaacaatttaaatttggaggttatctatggtgatacagattctatcatgatacatactggacttgatgacatctccagggcaaaagcaattgcaggaaaggttattcaggaggtgaacaaaaagtaccgttgtctggagattgatcttgatggcatatacaagagaatgttacttcttaaaaagaagaaatatgctgctattaaagtagcactggatggcagcttacgagagaacattgaacgcaaggggctcgatatggtcagacgtgattggagtttgctgtcaaaagacattggagatttttgtcttaaacaaattctgtctggagggacatgtgatgatgttgttgagtcaatacatagttcacttgtccaggtgcaagagcaaatgagaagtggtcaaatagaactcgaaaaatatgttatcacaaagagcttaacaaaagcaccagaagattatccagatgctaaaaatcagcctcatgttcaggttgctttgagactcaagcaaaatggttactctggttgctcagctggtgacacagtaccttatataatttgctctcagcaggactcagataatgcacattctgtgggaatagctcagagagctagacatcccgaggagttaaaaagagaccctgacaagtggatgattgacattgactattatttatcacaacagattcatcctgtcgtttctcgtctgtgtgcttccattcagggcactagtccagctcgtctggctgaatgtctgggccttgattcggctaagttccaaccaagattgactgagtcgagcaaccaagatacatctatgatgctgttatctgtaatcgatgacgaagatgagagatatcgtggttgtgaaccactgcgtttgtcatgcccaagctgttctggtaccttcgactgcccccctgtatctagtctgattactagtgctagtgctacaagtgtatcagatccaattgaaggaaaggatgctactgctaatttctggcgccatatgcggtgcccaagatgcctagataatactgttgagtccaaattttccccttctatgctcgccaaccagatgaaaagacaggctgataatttcattagtctatattataaaggtttgcagatgtgtgacgatgagggttgcaaatactcgactcacagcgtaaaccttagagttatgggggattctgagagaggaactgtctgtcctaactacccacgctgcaacggtcgcctagtaagacagtacaaggagtcagatctgtacaggcaactatcatacttttgttatgtacttgatgcaacccggtgtcttgaaaagctggaccagaaggcaaggctccccttcgagagagagtttgtagcagtaggccaaacaattaaattggcactgctagagatccagaaaatccgagacagatgtgcatttggatgggttcagctaaaggaccttgccgtatcaatatgatgtttttcttgtgtgaaagggctcaattagataagtttgaattaaccgtgcaagaaattcatctctctgtaggttattctagatctcgttggtaaaaggaacaggacacggcaaacggtgtatcgaaacaccagccgtctttggtatttccctgcgtgacagaccttgtatcatctatacatgtgttttagccagtggctgtattgtacaactttatgttgtgtccgtctccataggcctcggtgcatgtgccaatgtagtcttgttaatataattatacgcagcgtgtgatgagaaaaaaaaaacaagacactagattactaatgtcgcgagttgcggtagatgggaaaaatatgggagggaca

SEQ ID NO: 27184 - DNA, 1176 bp, Zea Mays
agatatgaatatccaatcgcccccatccatttacccaccaaagagatactgtgacttaacaggttttgaggcacggtacgtggatccgaggacaaagttgcgctactctgatccagaggtgttcaagcagatcaggatgcttcctgatgaatacgtccaaaggtacctggccttgagaaatgcagcagttatcctgcgataacaatacctaggggtagcagtcttgttgcctaactatgctgtagtactcagatgtatgtatactctgattgtatggacgaggttgtttctgaacattgatccttctaaatagatctttcttcctccctattttaaacagatgtattttgatggatttccctacgtgattagagacattatgctgtatattttatgtgctgacatttgggaattgatgtttaaatatactagtcctaactctaaaaatatggtgacaaatgcatcattactgaatgataaggtggaaatggagacagaaaatgttcaagcaattcctgaaggcaatcaagcaccaaaaaatgagttatcaaacagcaacaatggtagtcctgctatggagatttcaccaaatagtgtgcctgataattctcgtcttactgtaagtgatcagatggctacagcatttgttactgtggaatccccagatgctatttcaaaagtagctgcttcaaggatagtttgttctctcccatatatatccaatgaaatattgaaagaagcacaaactcttgagaaggcaggtaataacccatctatgtgaatgcagatgaaatggctgatgaaggcttgaatgagatcctacctgatgacaaggatgacaagaaagattgtcaactggaagttagtagtgggcctgtcattttgaatgacagttctactcctgtctatcctgaatttagcaatttcttttatgcaaaagatggaacagaagtttctaacaatgcagtagattcaaaaaataacgcagaacagcatgctttttctaatcagggaaaagggaacatggaggaatgtaaagattctgatggaaacaatgcaagtgaatcgagtgttgcccaaaagctagtgtctgttattgtgctccctgcttcagacacaggcgatgtgagtaactttgtagaaaattcttgtatatttcaagcgaattggttttaa

SEQ ID NO: 27185 - DNA, 1265 bp, Zea Mays
cttcaactcaatccgcatgtacccagtaaatgttcaatctgaatttggatcattgctagcaggattctttgcttgctcttctacttctgaaaattcgcaaaatggatagataattccagttaattttaatccattacagcgaccgggtgcggaagccggaagggagaggcgcttggttgacccggaacggacggcaagacaccgccgggggttcactgcaaccgcacgcgtggtggccggtgtgggaaggagcccactgctcaagcagcgacgacttccgcaacttctcaggccaagttgtagggagggagggcagcaaagaaagcaagcaagaaagaagccgattccactggtggttaaggttttggattaaaggagagaggttgcaactccctgggccaagcagtagcgcagcaagttcagcaccaatggcagccatatgaaatataaggcaaagcagataaaaagcttaattttttttcaagaaggtaaaggcaatgacagaaaagtgaggagggtcagaggtgtacagatatggatgagggctgaaaagaggagcaggaaggcatgccccatctgtgctacaagggtcggaatggacttgataggacatttgactatgcaacacggaagttatttcaagatatccttttttaactatgctgccgttgctgatcatttgcatttttacatttttcacattatactacagttgaagatacataggtgtcatggtcgggcgcacgtcacggtcatgttgaattgtaacttttctctggttcttgagccagcaacatgaccggtttaatggtgtttttgagaattctgttgattccttctaaatgttaaaattatgttcactaccaggttattagcttttgtactgcacttccacacacatacatattttttcttttttcttataccttccatgtcgtctggtccagaacttgtacactgtggggttaattatggatatggatctatgaaatattattagcatgaaaatatacatggcgtgtatggaacaaaatggactctaatgctttttcttgtgatgtaggatgcttttggcgctgagaggaggaaagctataagatgctaaatctctccattgcatacggaaaaacgtaggaagatttttgttaaggaagcaaaagatacactgaaactctggtatagcaatagaaagaaggttctggcttggcaagtgaaacagaaacagctagcacatgagaagtgtgaattttatactttgctttggc

SEQ ID NO: 27186 - DNA, 881 bp, Zea Mays
gtgaccatcgcgctttggcctttattagaggagcgggcgggcggcgggcgctcccccggacggacggacggacagacagcgcccccgcgatccaagctgggctgcaatgatcaggcaaagaattcggaaaggttttgtcgatcgcgatcgcgtatgaatatgatggttccggtgtcaaaaagcggtctctgatcatcataacccccgtcatcatgcgagcgattaggcgcctgcgcctcctccagatgccagctcgtctcgtcaccccgcggcggcggcggcgcgcgtgcgcggtgcgccgccgcgtactcgtgtgtgcggtgggagagcatgcgttcctgcagcgaccgggcgctgtaccaactgactgtacgcgacgggcggcggcggcatcttcgacttcgtagcaagcactacggctacagtcgctacgccgagccacactacggggcaacgacacggcatgttcggttacaccaatccagaggggattaaaggggattaaatcttcttatagtcattttttactagaaggggatttaatcccctctaatccccctctggatttgtgtaaccgaacaagcccggctgggctggagaaagggaaagaggcgcgattaaagctgcggggccgttgcttttctccggcgcttttgatttgattcccatgcaaatactaccaagtcctcctatcccagctttgaggccagaaaaaagaagttgttttttcttctctgtttgggcccttctccctgccattcctcgcgagcttcgagggaggctttgctgctcggtcctgacgagccgttgttttcaaagacaggcagagacaggcgtaggagcagtagtaattttaatgacaggcttctggtggatcgggt

SEQ ID NO: 27187 - DNA, 1898 bp, Zea Mays
aaggaatgataaggtggatgtaaatggtctgttgttacttctctggtgatggaccggaattcagatcaaaactgaaagattggaggagcatataccagtttgagtgtaaatagagatgactccaaaatggagtgcatgctcttcaaatagctacagagaactaccttcacatgaaaatggagagtgcaaatcaaccttaacagagtcagtcccttcacctacaagctgttttggcttgcacactgcaaacacaatgtgctccttatcttcacaaaagaaggatggtaatgtttataaaagaaggaagatggataaggattcaaattctcctataacatttgaagatgctaaagaaatggcaacccaaagttgcacaatttctgatgaccactcatcattactgctacccattatctcctcagaggcattgcttttaaattcaacagcaggcatggcaggtcctatcctagattgtgaggagcctgctgatgttccattggagccaaattctggtacagatgatagatgcttcatttcaaacatgtctccaacttccatgactccagacaaaaagaatgctgctgaatgttcctcatcgaatattggccctacagaatcaattaccgagcatatttcaccaagggatctttgcattgccatactgatgaaagatggactaataaatgaatcaagaacaagaatggcacataaagaggaattcactgacaatgatgctaaccctttgttggcatgcaataattgtggctgcttggaacattcattgaagatgctgatatgcgattcttgtgaagcaggatttcatttgtcttgctgcattccttgtattaaggagctacctactgatgaatggtattgtgctccatgcttgtgtaagaaacccaagagtctttatggcaaactctcagagggcaggataaatccttccaggaatactaacacaaggcctcatgggatgagtcacatagagtacatgctgaaggatgctgaaccatatgtaactggggttcgacttggtagagattttcaggcagaggtgccagaatggtctggtccatcatccagcagcgatgtttactttgacgagccctgtgcaattgattctgcagaactaactacatttaatttgtgcaaaatgagtaatcaaagtcattcttccattggtaattggatccaatgccgtgagaccttgaatccaggagattctgacaagcaagttgtctgtggaaaatggagaagggcacccttatatgttgtacagtcagataattgggattgtttttgttgtcttctttgggatccagtccatgctgattgtgctgttccacaggagttgaagactagtgaagttctaaagcagctgaagtttgtaaacatgctaaagaatcagctggtggaccaaaaccagaagcctgcttaaataaatgccagtaccagagtgggcgattcctcaagagaaggatacccattatgatggtatgaatgagttgccgtatgtggcgttctcttgtagtaactagccgtctgtgaacatgtgagaactatgttgttctagcctgttaaacgaaatgatctgtactgtcttctatagggtcttggtacacaagagttatacaacatagatctgtctgtgcagtccagggagcagcgtgtcgctactgctgtgatcgccgccaaacgatcctgtgatcctgcgccaagttttgtttcttggtaacttctggtattgcgcgtgccactgcatggcgtggatgacgttttctggtagactgccgagcgtttgtgtatctgttgataggcgtttggcctgctatgcatttcatgacgagaggcatattgcattgtgtgcctgcattcttgccagaactaaaatgctgggc

SEQ ID NO: 27188 - DNA, 774 bp, Zea Mays
cttaccgccgcaagtcgagtttttttgtaagatgaaatggtggagtcctctgaggacgagccatgctcaggcgacacagacgcgacgacagacccagggcaggagcacagctcgcgcctggccgaccgcgagctcaaggagatgctgctgaagaagtacagcggctgcctgagccggctgcggtccgagttcctgaagaagaggaagaaagggaagctgcccaaggacgctcggtcggcgctgatggactggtggaacacgcactaccgctggccgtaccctacggaggaggataaggtgaggctggcggccatgactgggctggacccgaagcagatcaacaactggttcatcaaccagcggaagcggcattggaagccgtcggaggacatgcggttcgcgctcatggagggcggcgtctccggatcctcctccgggacgacgctctacttcgacacgggcaccatcgggccgtgatcgatgcgatagatacctctgacgaattgggggcaaattgttggttgatactgagattagttacatgaagcaatatccgctgtcattttgtcggattcattgtgtatatgcatgggcgacaacgtgtattgtcgggtacacagtatgtagtggcatgtaaagacaccgtaacaatataacatgaattgttcaattgcctgttgcattttgatcaccctgttttacatctgaaaatttaaaattcagttcggaagcgacgggatgtatatataatattagaggtcacttgaatgagag

SEQ ID NO: 27189 - DNA, 1637 bp, Zea Mays
ggaaaacgctcaaaccggcaaaccctaatccccatcccccagccgacagccgccgagcaaaccggctcctccggtcggtcatccactcatcctcatcccctggcccctgcccatccgatccgatcggtcatcccctacccctacctgatcggatcccctgctcttccgccgagcaccaccaggcagcaggctgcagccgtcgagcaccagcaggagcacggccaggaggacgacgcccgcatcctgcctcttctctgctgctggagcttctgctgccaggagcacggccagaaggacgacgcccctgctgctgccggtgagcggtgatctgctgcgcccccatcctgcctcttctcctccctctcggcctcgcctcgatctgctgctggttgctcttctatggagacttccaaagaacaggcttccaaggactatgctggtttcgagaagaaagttaagaggacaatatatattgaccacctttctcctcaagtaaaggaatcggccatcaaagctgctcttgcacaatgtgcaaatgttgtccatgtggagttcatcgtcaattacacgatcccatataaagatattgcttctgctgcattggtggaattggatgatgacgtgcaggctaaggctgctgtagaattgatgaatgatttcccgttcataattgggggaatgccaaggcctgtaaaagctatccatgccaaggctgagatgtttcgtgatcgccctccttgccctggccttcgaaaagatttctgctgggtaaaacaaggagataaggactatgaagcgatgcagaaattgaaaaaccttgcaaagaggcaggaatctgagaacatggccctcatacagaaaatcttgaaagatgagaaggaactggcgactcggcagcaggaggtgcttgatggaaactgcaagaagtacgacatgctggaagctctagtgcagaagggagacatcactaaccttgctcaacaatacggagtgaacttgaacgactgatgagtcattcgtgtctttttcccccttccccttggagcgatggcgcaactggtgtgatgatgatggaataggatagcatgccatagttttggtccggtatctggaccctccctctggtgtaaagactatcccaacttaggcttgggcttttcagccttctttggctctccaaaaaatctaaattagctggctctgagcctctgactttctgatcgatccaagctagctggctagctacaggttgtgtatatgaatcttgcaggggtgctgacgacgttgcaggaagggtgtagtggcccaaggaagaagagcagcggcagaggaggaggccgaccacgacgacaaggagcatgagtcggtggtggggtcggtgggattcttctccaacctggaagaactgctggtgttcaaccccagggccattctgtcctgctttgttgtcgtccacaaggcctagcttgagctgaactagtagtagtgtatggctacatgtaaggatgtaatatggtttgaaaaatattcgtccggatccggattcgaagatggtgaacaatgatttggatggaatttttggatatccgaatttttttggatattgaatcacacgagaaatcactttaagtatataa

SEQ ID NO: 27190 - DNA, 316 bp, Zea Mays
gggcgagacgctggaggaccaccgcgtcgtgaagaagatccttcgcgtcgtccccaagcgtctcaagcaggtggccgtggcgatcgagatgctcacccacctcaacacgacgacgattgaagagctcgtcggccgactacgcgttgcggaggacgccgaggcggacgacgccaaggcgaaggagatcgccacgaagggcgtcgggcagctgttgctcactgaggcacagtgggaggcgcggtgtcgggaacggaacaagcagcgcaagccccgtgacggtgacaagaggcgcggcaatggcgatcgcggcaacaac

SEQ ID NO: 27191 - DNA, 1212 bp, Zea Mays
tgtggagggagctaagtttgctgatgagggttccacataaatgcaattatggcaataaagttattgcgtgtgctatgcttccgggtcacattgtactgaattatgtggatgcgaaccttgtcataacaagccacctcaaggtgctccatggactgcaccagttttacctctgaaacctgtccaaacattggaggctggtcaagaaatagtggaacaactcataaggtcccctatggatcttattagaagaaaatgcacctgcaagaagtcaggctgccttaagaagtactgtgactgctaccagggaggggcaggatgctctatcaactgtaagtgcgatgattgtagaaacccatttgggagaaaagtcggcgttattttggatggtaaaagcagcggtcttcccgcgcccgtacatgtgcatgaaagaaacgggactgaagctgactcgagcggcgacgacgaggaagacgacgacttgtacatgaaccgacagctctccccgtctccggtgtcaagggagtcgtcgttccagcaggagactctggtcggcgtggaagtccagacgatgaacgggcacctgtacccgaagccgctgacccaggtgcgtcccgagccgtcctcctggcagctctccgccgccaggaggccggccgaggaaccgcgcggagaggtgtggcgcttctcggggaggcccggcgaggacggggcctccgacgccgtggaagcagcgcgtgccgtcgcggtcgctcccccgagggagagcaggagaccggggacccgcggtggggacaggctcaggttcagcatcccgcggtgcgtcgaggcgatgagcgccatggcggagctgtcgcccgtggagaagtcgcttgcgcccgacgtgttcttggacgagagcaaccgcgagatcttcctctcgctgagcgtagatgttaggcccatctggctgaggcgtaagatgaagagccttgtctagctctagttttttttaaatttttaattgtacccagtgctaatttatggtgcatgttatattttcgagtcctgcatatcgttagcagtaataagttggttacgatttcagctagaagaagaggagaaattgtctctgccccttgagtaaacgtgcgacaagacgatgtgtccagtgtccccctgaacagtggcagcaacgtggtgtggcaacaacgaaaacagacagctcaggcgacg

SEQ ID NO: 27192 - DNA, 607 bp, Zea Mays
aaagggccttgcatctccagcgtcggcgtccacgacgccggggaccagcgaccatgcggccactttcctgttgcgctctcgtccgtctccacaatttgtgcagaccaaagacaaagtaagagtgtgctgaaagaagaaattgacctacttaaggtggaaccaaacgaaagcgaagtggatctagaaagaagcatttaacgactggccgcaccagaccaaaccgtagcagaactcaactgaaggcaactgcgggcccgcggccgcaatgagtcaacaggaatgcagtctatcagatgatgaaaagcagaaggaatcccttctcagagagtgaaatccaaaactggtgctttcaaatatttcaagatctgatttacatgcattcgcatggatatttccaatgcgaccttaatcctgatatgtggttttgcattttttttacaaacaatattgcaatggttgatctatgattcctgtttgttgtgaaacaagtttctagccccaaccattttcacatgacattttagataagaaaatagttctccatatagctcaatcttcatgtttaaaatatcatgtgtatttgactggagggactatcagttataag

SEQ ID NO: 27193 - DNA, 3243 bp, Zea Mays
atttttacgagttcaccgagaggcggtgtatttcgcagagcgcctgttttgccaaattcctcgtttggttccacgccggacgcatcctcccacgctcgggccgggcgcgtgaacccctcgccgccgtcgcagtcccgttgccggagggcgagagggacgagaaagaagagggcaagatgaagacgaccaaggggggcaaggcgatgaaccccacagacgcgttccgcaaggagcagcggaagaaggagctcaagcggaacaaaaaggaaaggaagaaagtgcgggatgttggcattttgaaaaaggatccggaggctatatgggagcagattgagaaattggagaagatgagtaagtaaactagctgcattgggaaaaacgaatcagaaagtgatgaagtgatctttgtaagaagtttatagtcactttcataaaccttaagttctatatacaattatgcatatatcaagagatcatgttacttacttgttctgctttagttatgacaacatagttcatttgatctgtagccatagcattatttgcacattgttcgtcaacatttgctaaacactcatacactattgtttttcccctaacttagtttgaatgcaaattttagttgatttgactcttgcagttggctaattatctctctggtctggtctttctagtatgaccctattgttgaaacaactgtatgtctcaggcatcttaaaatatcagtgtattagcatgggattaccaaatatgtatgtactgacctcatgaagcattatattttgcagcactttgcctctttgaattgctagctactttggccctgttttcaacatgaggctgatggtgctctggacaaggctaggaagcataagaaaagacagcttgaggatacatacaatcttattgttaagaaacgtaaggaatatgaacagaaaatgaaagagaagggtgaacaaccgattatgttcagccatcttgcaccaccaaagaggcggcctacaggagatgaagatggtagagctaatcctaagcccgaggactctgtttactatcatccaaccttaaatccatctggagcaccgccacctggaaaacctccgatgtacaaatcatctatagggccaaggatcccaccgccttcctcatccagcactggggcctcatcttccatgtcagagtctgaagcaggtccaacgaccctgccaccccctccaccaccaccgccattgccagacacctcagagtccattgatccacctgctcctcctttccctttgcctccactcccgccactgcccccaccaccacctaaacctaacagtgacgcagcattgccaggcttacctctgcctcctcctggtccacctctgagagaatctgtatcaggtcatacagtacttccgccgccactgcctccatcacagaggtcttcaaatccaccaccagcatctagtgcgaatgaaagcaaaacagattctgcttggcccttagttgtgttgcctccaccacccccgccacctgggttgtcaccaaaatcatatgacatggaggctgctggcacttcaaaggacactcctggacttaaagaagatactgcagcgagagtcttaccaccaccgcctccacctagtttgccgcctttacctccaatgcaatctgatatgctatctcctggagtcatgagattaccaccacctccgccaccaccagattcaaggccatcgcttatggctcctggtgttagcaggccccctccacctcctccaggattcccccgtctcaaatgccaataccaccatatgcatcctgtttggttcagctttttttttgactagcttttccgagaatctagctgtggggagaatctggctgtgtagagaatctgagtattattaggattatgtgcggaggaagataaagttgtccatgtggctcaggatctatacagtgacagattactactattgcgacgactcaaccgattatatgtttatgttgattttgaatggtttttacccaaacgaattttatagaagctggctgaaaagctgagtgtttagcagtccgcagcagcttttggtggtcagaagctgcgaaaaaccgaaacaaacagggacatggtgtcctccctggtccgccaccgatgcttaggcctccatttttgctaggaccctctatgcaactagatgagcttgctgcctttgccccaaggcctcagttacctcagcagccatcatatgtaaagtcggctgccccaacagttgttaagagaccattagcacagcacactcctgagctgacggctatggttcctgcatcagttcgtgtcaagagagaatctgcgctccccaaaccaaaaccaaaggtgcagcagcagcagcagctatcaacagcatccatttcaaggccttcagtgaccctcataagaagtgatgctcggccttcttcagcggcacccaagccgccaagtatggacgactcctacttggcattcttggaagatatgaaggaactaggggcacttgatgggtaactcatagagtaactgcctgagtgcacttaacagcttaattcatggaaaacctggacatgggaccttttttttttgcaatgtggtaaatggatagtctctgctcagtcaaccggagctgccgcggagaaagaaaatcatgcagtagtttaattgaaaacccgggaaaacgattgtagtctggctggagatgtctgaacaagctgtacaagctcaagctgggagatatttgtggcccaacttgaatagctggagaccttttgcacacttgaatagctgtacaagctggagacctaaaggctctttgtggcccaactgtacacgtttgagatatttggaacttgaatagctgctggctctagcgaaggatatcttacaggtgctctttatgattcatgattgcactggctgatttgcagataataccattacaccagtcgtggggaggactactgttgtgccttaatttttgtatggtgcatttgccttgaaaaccatgacggagttgctgtcctgggaccccatgtaaacttgtgacattcacaaatgtcggtattggttctatagactatagtccggcgacattactggatacgagccacggcttctatataaaagtttcgtgctttctgtgctgaaatctgaaattaacagttttttatttggccagatgggaatatctgtttgcaaactgtgtaacgtatgatgcg

SEQ ID NO: 27194 - DNA, 837 bp, Zea Mays
cttggttcatcccttctctagaccccactcatgtgaagattttgtcagatcttactcttgcatatggtcaaatgatcttgaaggatggctttttccatgcagatccacacccaggaaacatccttatctgcaaggacacagaggtggctttacttgattatggacaagtgaaagaaatgccagaagatttacggctggcttatgcaaatcttgtagttgcaatggccgatgatgatttctcgagggctgaggaaagtttcagggagctgggtatccgaacatgggccataactgataacaaactagaagaattgtttcagttatccctgcgaatgttcgatacaagattaccaccaggtgtaactgttatgtcaccttttgccgatgattcttcgcttaacaaaattggagtggaggtatggtcactccttcaagaatcgaacagagcttcccggaggagctattttcagtgcttcgaacaatccagcttttgcgagggttgactgtgggcatgggccttacattctcgtgcgcccagcattggagaccgatagctgaggaggcgttgttaaaagctggaagacaaagcgcttcaaaatcaagaaaacagaagaggagttttctgaggagattgttttggtgaagtaggcatttagccgcatagcgaacatcaaaggacatggtatacgaacattctgtgatgaaacggaagtagccaaaagctcgagccttcgatttttagacagtacatctgtccatattcgtttaccttggcgtgcgataagcaggtagacgccgaagtttccgacgcagagcatggcgagcagccagaagaag

SEQ ID NO: 27195 - DNA, 2921 bp, Zea Mays
ggcaaatcggtctagccctcccaccttcccgcgaaatctaatagtcggcggcgcgaagcaggagttctggggaaatttcgccggccgggtgcgagcagagccgccgccgccttcttgcgtgggagatggtgaaggagcgggaggagcaagtggccattgtgcgcatggtgcttggcgagggtacaccggagatggacatcatccgtgctctccacatggccggcgacgaccccaccaaggccattaacatcctcctcgacctcaacaaggctgcgccacctctcccgccgtcgccgtctccctttccctgtccatcgccctccccttcgccggggaaacccgccaaagccctcgtcgactcaaccccaccatgcaaagcccctacccggcccatgcccacggcagagaaacctaagtccactacaagcaacggtggcagcgaggagcactggtggctggtggggagcgccgagatggtggggctgtccacctgcaagggaaggcgaattacctcaggggacgtggtcaccttcagcttccccaatgccacaaccgccgtgggcaagagccgtccgagccgtcccgccctagcttcctgctcctccgagatcatgcgcttctccaccccgagccacggggaggtgggtcgcatccccaatgagtgggcaaggtgcctccttccccttctcaaagagaacaagttaaaagtcaagggctcgtgcaaatcagctcccgaggtgcttaccattatggacactgtcctcttgtcagtgagtatatatatcaacagctcaatgtttcatgatcaaaagcaatcgtcacccaaagcagctcgatttgctccatatgactccacatttcaccccctacctgcacttttcaaattgataggacttgctccttttattaaggccgcttttactccagaagatctttattccaggaagcggccaactgaaacaaagagcagtatagggtctcctgctgcaaagctgacatccggcagattgaggttgtcttctgatggaaacgaagatgatcatggtgaagaaactgtttcagattcagatttggatgatataattgggatctcagacagctgtgcactagaggaaagggctccccctgattctctgatgtgtgatctacgctcttatcaaaagcaggcacttcattggatgctgcagcttgagaaaggtagttcttcccaggatgccgctacaacccttcacccttgttgggaagcatacaaacttgaggataagagggaactcgttttgtacttgaacgtgttttcaggcgatgctacaactgaatttcctagtacattacaactttctagaggaggaattctggcagatgcaatgggactggggaagactattatgacgatagctcttcttctttctgattctagcaaaggatgcatcacaactcagaatgctgctcagacccctagagaagctagtgggttgggtgaatcgcatgatgctgtgaagaagcttgctaaccctttctcttttagcaaacacaagaaacctaaggccccacttattggaggaagcaatctaattatctgtccaatgacactaattagtcagtggaaggcagagattgaagctcatactaagccaggcactgcgaatatatatgttcactatggacaaaacaggccaaaagatgcaagcatcattggtcagagtgatattgtcctgactacatatggtgttgtgtcatcagagttttcaatcgatggttcaacagaaaatggggctttgtactctgtacattggttcagagttgtgcttgacgaagcacacatgataaaatcttctaaaagtttgatatccctagctgcggctgctctgactgcagatcggcgctggtgtctcactggtacaccaattcagaacaatttggaggatttatacagccttttccggtttctgaaagttgaaccatggaggaactgggctttgtggaataaacttgtacagaaaccatatgaagaaggtgatgaaaggggcttaaagctactgcagtccattttgaagccaataatgctgagaaggactaaaaattgcacagacaaggagggcaggccaatccttaatttaccccctgcaaacattgaagtaaaatactgtgttttatctgaggctgagaaggatttctatgaagctctatttcgaagatctaaggtaaaatttgatcaatttgttgagcaaggaagggttctgcacaactatgcttcaattttggagttacttttgcgcctaaggcaatgctgtgatcatccattccttattatgagtcgtggggatacaaaagagtatgcagacctaaacaagcttgcaaagcgttttctgcgtggtggtaatggtgctgttaatggtgattcttgcatcccctctagagcttatatcaaacaggttgtccaagaattgcaaaaggatgaaggggagtgccctatttgtcttgaagcctttgaggatgcagtattaactccctgtgctcatcgtttatgccgagagtgtctcttatctagttggcggagtgcgacagcaggcctttgtcctgtctgtagaatgtcaatgagcaagcaggaccttataactgctcctactgataaccgctttcaaatcgatgtcgaaaaaaattgggttgaatcttccaagatatctgctctcctgcaggagttggaagctcttcgcagttcaggcgccaagagtatcgtgtttagccagtggactgcttttttagatctgttgcaaattccactttctaggaataatttctcatttgctaggctggatgggacgttgaatcttcagcaaagggagaaagttataaaggagttctcagaggacaaaggcattttgggagcccaaacaacacaagcagcggcaaccccacacaca

SEQ ID NO: 27196 - DNA, 791 bp, Zea Mays
cagctgaacgcctgaacccaatcctaaggagtagccatttcccccactcttcccgccaccatggccgccgccgctatctctttgccccgctctccctctctccttcaacccacgcgccggcgctcagcgccaccagcctgcacgcagtccgagcgcggcgtctccttcgaccccggctccgccttctaccgcagcgacagcgccgcgggtcgtgacctcgccgtcctcgcagccactctccaccgccgccgtggccgttgcctcctggatatataagacttgatgagatttcgagacgagcaaaagttaactctcccccactcggcaccctcatcaattcattgcggaaggaggggttttctgcttgtagatctcatattagtgcaaatacaatcaagaccaactgttcaatggcttcttgcatcgatgttgcccggggcatccgaaactcaagatgaatatcaattaccaactatatatggtatggctgcgtgtgcccagcgaggctcacgcgagcttggtgcataaggggctgattggttggatgcacagccagctatccaggctagttaagtatatgcaaatctaggtgtttggtttcctgtattgcttcagtagcctgactaaactgtgcaaaagtggcatccaaacttggctctaggcttgttcgttttgctcttaatccatgtggatttggtaggattaagtgggttttaatttcaaacaagataaaatcttttataatttttttccaatctcatccaatacatataagatgggaataaccggac

SEQ ID NO: 27197 - DNA, 2957 bp, Zea Mays
ctccccacatttcgttgtgtaccgcaaacagcagagagaaaacggaatcccagatccacccctccccatctccatccgcggccatggcctccgccgacgccggcacttgcccgtgggatgccctcccgttgcacctccaggagcgaatcctctccctcctccccatcaccgaactacttcccgttgccgccgtgtcccgcgccttccaccgccttctgcgctccccgaccttccatgccctcctctccccgcatcgcctcgacgccttcttcctcctttccccacggctcgccgtccacccgctgtcccgccgcgtccgcactatgcccgcgttcgccgcgctctctcctccttcctacccgctcgtctcctccccgtccccatcactccttatcacctgcgcctcactccagttcctcccgccgatccccgacggagcctacctcctatccgctatcgtcccatcgcgcggctcctccacctcctgcacccttgtcgccgtcatcaccggcgcagccgcgcgttcttacaccctggacaccggcgatccctccccgcagtgggcgtctagaggcgatctcccgctgtctctcacgctcctggaaaacgccgcggtctccggtgaccgcagcaaactcttcgtcctcggccgtggccccgaggcgctcttggtttttcatctcgtgacggggacatgggaggtgctgcatgttgtgatgccacaaggtctcactacggcgcacctgtttctttttgatgggagcctattcttagtaggtggtattgagagctttggagtagtggatcgggtggtggtctggcggttggacgacgataaggtggaggaggtgtggtggagggaggtgagcgtgatgccgacggaggttttcgatgagttgctagctggtaggtttggcagattctggcattttcaggctgcagacagattggggattgtttgcttgtacaatgctgtggatcggaggctggtcatgtttgatgcggctgatggcatgtggacagtgctgccacgattgtccgcgttggatgcatgcgagagcttcaggtggtttggacatgtcttggagccaggagttgaaatcttgatgggactacgttgacatcccgatgaagatttcatgctaacatcattaaattcataaagctagagttactagaagagctgtatgcaaatccctggaaatctcggagatatgccagaagacctatgggaaagggcactgacacacgacaagatttaccgagggtgaatcccttttttacctcacattacgctcccttctgggagaaggcattgtgagaaggtatgtcccagtttccaatacccatatatgttggaaacaatgtagactagtttcatctctatttaactcattttaccctatgaaactttgatcatctctctcttcattgatattgtgccatgtccggatatttggtagttttgtagcttattcaatgctcatgaaacttatgaaacctccactaagactggcccgagaaacacaaactttgaccaagataggtggtgacctctgctatcattaagagaaaggtttcccttgtatccaagtggctttgaataaagagaaaatttgaacaagtaatcccatgcaagtgttacatcataaaaaaatacattatctttactttagctggggaaatgagcagcaaggatgttcgtttccaggtagaaagctgtgtgtgagcctgtgacatgttatgagatttaaacaatatgagtttttgttactgtttattgtccgcatctcatttgggagttttataaggcatgattggttgtccgctcgcgttcatccacgctctccgcatgcgttgaccaagtgacggacaatgtttggtttcctgtatacatgaggtcagagactgcacccgtaactgcagcgtaaactagaaataactcttctaactgtatgcacagatacgcacagaaatcccgttttccggcgggccaagcgcacatgagccacactacgcttatccagctagccaatcaggcgcatagtgatggcctcgggacactatagaatatatggcgaacacttaccatcattttttgtactgaaaacgagccatacattcttctgacatgttcagaaatgcatttgtattgcttattcttcaaactgctaaaccaggagttagtttaagggaaatgtcacaggcactgcatccactaggcacagtgtatcaatttggttattgatatgctcgtgatttcagctggccattaaggtagatatgtggacatgtatatagtagattggtgtagctgttttagcttttttttttgttagtggcaaatcgatggatcaagtaaagttcacttcatatggaccaagttgtgaatattttctattgttctcttctcttttcttttctttattttttgcttagtctagttctacaaaaaaaattcatcatacagattttgttattggcttggtctattcggcagaaaaagaaggaaaaaaaactggtggagcaaggaagtctcataatccgaaagataacaagtgatatctacaacaaagctcatggatggaagccggtcgatagacgcattcagtgatattttggctgttgttctgtctttttgggttcatctgttttgttagatgtaatctggctggctctttagtttggtaaaatcttagctaagttcgtcgctgaagttgtcagaaccaggctgcctttggttgggttgttttggtcccttcggttgaacatcagttttcaggcggtctgaaaacatttcctgctatggaaatgttcctctattttagctgatagttgcgtatgtcttgtcggcttgtagttgatgttggcttgtatggttgtgtaagaactttgtccttgtctatttcctaatgaaataggggtgctctcctgtgtcaaaaaaaacagattttgtt

SEQ ID NO: 27198 - DNA, 1518 bp, Zea Mays
ctggatcttacagggtactgctactggtatcgtgatttcatgtaccatatatacctcgctgtaggcggcggcggcggcggccatggacttcgtgctccaggtcctgctgcgggtggtgatgagaagaagcatccgcaggctgcaagaggtcgttgacatcgccgtggacatcggcacggctgtcttcgtggccgtgcgggtctccggcctcgtcttccgccgccggctgcccacgccgactacgacatcgtcgtcgtcgacgacgtactactactccccggggacgtcctcctcgatcggcatgcatgtccaggaggattaattattgacaggcactagatgagctagctagctagctagggccagaagatgtatacttctcgcgggggcatcgaccaccccttctgttgcgggcatgccgacctctctggtcactcaggggatgtcgggagcgactattcctgacacggtcctctctgagccgtcgtcccctacagccagcccggggaggtcctagcggtggaaatggaagttggtgcttcttcgttgccgccccacgctcccttgccttcgggcattgtggtgacaagtgaccaatctgggcagcatcgacgatacgagattagattccctacggtctgcgccttttcgcgcggtcggtggctcgagcggaagtgctactggtcacctagtgggaggtggatcagctatgtgctagggccatctgttttgaggagagggagcacaagttcgatgttctcaactccgaggctgacatggcttcgtgatgaggctgcgcgcttgtgcaaagagcgcgacaacgtgtggggcgatgcaaagcgtcttcgagaagcgaggtcccagctttagaaggaccttcacgaggctaatcttttagttgaggaggttgggtcgatcctcagggaggtctttgctcgtctggagatggcaaatttagagcttttgagagagcgcaatgcggccagagcatggctccaaaagatgttcccccgagcccaagacgccaagaagacggtgggagaggcaaagaccatggcagaggacgaggcccagaagctcttgtttgcccgagacatcattgttatcgcgagagttcaagcggaggcttcactctcagagcagagcacagagctccaggctctcagggcggccgtgagcacgtatagccttgaggtagatggctctcattttgacgagaccaacacgatcgtgatcatgaagggctttgccgccggacagagcgacgaggagctatatcgtattgaagaacaaattcaccttcacgcccggttgattgcaagttgggtcgacgcgaagttcctcctgatgagcccttggagtatggagccgtccaccggcatctaaacgacgttacatcgttgtcttgtaataaactttgtttgaatgatggggctaaacatatgttcgtgccttttggtgtgatattgcttcttgcttgagtcatgggccttgcgattggtcacggtagctggtgcg

SEQ ID NO: 27199 - DNA, 1247 bp, Zea Mays
gattcttctccccccacggccacacccacgcaccgcagcgccgcctcgtctcctctcgccggcgatggaggaggtgggcggggacatgcctctcccgaaacagaagctctccgctgcaccgtacagggacggaggtggcgtcgtgctcgtggccactgggagctttaaccctcccacctacatgcacctgcgcatgtttgagctggcaaaggatgaactcgagctgcgaggttattctgtgttgggcggctacatgtctccggtgaatgatgcatataagaagaaggacctcttaccggctgctcaccgaattcgcttttgtgaacttgcgtccaaaagctcatcttttgtgatggttgatccgtgggaggcaatgcagaatggttatcagcgcactttgaccgttctttcgagaatacgaaactcactatgcaaggatggtgtagctgaccaaggtagcctcaaggtaatgcttttatgtggctctgacttgctcgagtcattcaccactccaggtgtttggatcctagaccaggtcagaaccatatgccaggactttggtgtcgtatgcatacggcgagaaggaaaggatgttggaaaattgatagacaacagcgatatattgcaagaatgcagggataacattatttcggttgatgagattgtgccaaatcagatcagttcatccagaagactgcataagaagatctctatcgataaagtatctcactagtgatgaagtaattgaatacatcagagaacacaagctgtttatggaaggcaatggcggcgacatagcattgctgtaatagaggtatttggaggtaaactctgtaatcgacaaggatcggctgtggacgtctacctcaggagtcaggataccatctggaccgtgcattctgggcaattacttcgcacaaacacagaaataaacggaactggccacttaaattactactatatttttgttaaatttgattctggaggttgaagtgagttgcatgttgattaattttgcttttgtgccagaatcaagtgctacatacaacatgaattctgacaaccatataaatgccaaggttattctgacatagcaatcgtggatatagcatcggttagacaaacatatcataaagaattaagcctcatttgcagacagttctgatgtatataagcacagacaaaagatgtctctgtaacggattctattgaacagaacacatgccattatacaactgatcaactgc

SEQ ID NO: 27200 - DNA, 3622 bp, Zea Mays
tctctctccctccgtcccgccaataaattttcccagcgcgacggcgccccgctctcccgctccgttcctcctcccttccccgaagcttcggcgccccctcgctccctccgccccgttttaagcgcgcccgcctccgaccgaccggccgccacgcgagcgaccgcttcggcaaacggggaggaggaggagtgtttgcttctctgtcttgatcggggaggcgccatggcggacacccgcaaattcgtgctgcccggccaacccccagacatctcgcagatactgcaggaggctcagaaccggtggctgcggcccaccgagatctgcgagatactgtccaactacaagctcttctccatcgccgccgagccgcccaacatgccgaggagtggctctctttttctatttgatcgcaaagtactgaggtacttcagaaaggatggacacaactggagaaagaaaaaagatggcaagactgtcaaagaagctcatgagaaactgaaagctggcagcattgatgtactccattgctactatgcccatggagaggagaacgaaaactttcaaaggcgaacatattggctgttggaagaggatttcactcatattgttcttgtacattacctagaagtcaagggatgcaagcaaagtttcaatcgtgtgaaagaagaacttatgcagctatcgaatgtcgacagtccttcatgttcaaattccatcactagtcagaatcagatgggcccacaaaacatggaggctgctgaaagcccaataagcggacagatttcagaatatgaagacactgaatcagtgtatctaaagcgaaattcggtgcagcagataattgccgagcaagctccagataccaccctctcgctgagatgcagcagcttgtggatggagtcataacggaaaacatgttatacccttccgcatcaactgttggtagtagacaaggttatcatggtgaaatgttgccaataacagataacttagataaccgttcattttctaaccatgacatagctagaatgctcgacggcgccaacattgggctaagcgatgtttccagcactctgtttgattcagtgccattcaatgagcccttcaccaattattcagctgggttcacagagccaacactccattcttcatttgcctgcttagaggctaacgatttggacgatagctcttgtttgcagacatttacatctgaggctctatacactaaccacctcaaccagaaggaagctgatgcactgggtttcactggcatattagcatcagaggtgaacagagatagatataatgatggtagcatcaaacattcactcttgaagcagtcatcattggatctattgacgattgaggctcctggtttgaagaaaaatgacagcttttcaagatggatgagtaaagaacttgaagagctggatgcttatgtagtgaacccttcactttctcaagaccaactattcagcattctcgatgtttcaccaagttgtgcatatattggtacaaatacaaagttactggtacattcttggtgaataaaaaacatgtggaaagtcacaggtggtcatgtatgtttggggatgttgaagtaccagctgaggttttgaccgatggcaccctacgctgctatgcaccagcacaccaatcaggaagagttccattttatgtgacctgttcaaacagggtggcttgtagtgaagtgcgagaatttgagtatcgtgattctgaagctcattacatggagacttctcgttcccaagccaatggtgtaaatgaaatgcatctacacattcgtcttgagaagctactcactttggggccagatgaccatcaaatgcttgctataaattccttaatgcttgatgggaaatggtcaaatcaagaatcttctgtcaaggaagtagtttccactgctagggtccaaagtttaaagaaactggtgaaagagaagctgcatcaatggctcatctgcaaagtaaacgatgatggaaagggtcccaatgttctgtgcaaggaaggacagggtgtgattcatttagtagcagcactgggttatgattgggctataagaccgataatgattgctggtgtcaatgtgaacttccgggatgctcatggatggactgcactccactgggctgcatctttgggaagagagcggacagttagtgtcctcatagcaaatggagctgcagcaggagcactaaccgatccaacttctgagttcccttctggaagaagtccagctgatttagcttcagtaaatggacacaaggggattgctggttttctcgcagaatctgctttgacaagccatctgtcagcacttactattagggaatcaaatgatagcactgtagaagcgtgtgggctaccatttgctgaagatctcactggcatcgattctgtccatctcgctggagagggtcctgatgctgaatcacttgaaggttctttaagtgccgtgcggaaatccactcaagctgcagctcgtatatttcaagccttcagggtggagtcattccacagaaagaaagtcgtggaatacggagatgacacctgtggattatctgatgaatgcacactttcacttgtttctcttaaaaatgtcaaaccaggacaacatgatacacatctgcattctgctgctgttcgcatacagaacaagtttcgcggatggaagggaagaaaggaatttatgatcattcgccagagaattgtcaagctacaggctcatgtacgaggacatcaagtgaggaagaactatcggaaggtagtctggtcagtcggtatcgtcgagaaggtcatactgagatggaggagaaagaggcctgggttacgcgggtttcggcccgagaaacaactagaaggtccatcgcaaatccaacctgcaaaggctgaagatgaatacgatttcttgcacgacggcagaaggcaggccgaagccaggctacagagagcacttgcccgggtgcactctatgtcacagtacccagaagcgagagagcagtaccacaggcttacaacctgcgttgctgaaatgaaacagtccaggatgatgcaggatgagatgctaagccaggcggctggtggtgcggacgatttcatggctggactggaggacttgatctgcatagatgatgccccgccccgatgtctgccattcggtgaagctgagcctttttacatcagataggcagggaggcggtttccttgctccccttttgtcagactagccctgtaaatattcttcagctagttgttcaccccgactgtttactcgctttctgctagtgtacaactataacatagtttcaatgcactgattatcggtagaataatcgcctcttatttgatatatagtttatattaattcaacgtattttatggttttatctgtaattctgcattcgtatcgagccataacagtgtgaatttgcgacatccgccatgacccaataatacaagcaccatggcggcggatctgtttgaatgcactatagccaaaccaactaagacttagtttcatagtttgagtactctagtattgaccataatctatatgtattgagttggattggagtgtaacttaaactaatttacatcccaa

SEQ ID NO: 27201 - DNA, 2392 bp, Zea Mays
gaacacacacaccgtttgtgagcaagacaagacaaatcgctagtggaggagcaacgcgctcaccgcctagcagcaagacacctccgctaggtttttccgccgctgaccggggcattgcggaggcagcaagccacgctacagcgcggcggaacgggagctcggcggcggcggagcgccagtccgggtggcggcggctgatttggatggtgggttgcccagctggggttcagatctgaagatggccgacggcgggggcgaagaggggaatgcttcggcgcacaagggctccgcgcgccgccggggcccggtgcaggcgggcctggacgcggacgacctcctcactctcatgcacggctcggatcccgtcaaggtcgagcttaaccggctcgagaacgaagtcagggataaggatagggagctgggcgaggcgcacgcggagataaaggcgctgcggctgtcggagagggcacgggagaaggcagtcgaggagctcactgctgaattagagaaggtggatgagaagctcaagttgacagagtctctccttgaaagcaaaaactgaagaaaacaaatgatgagaaaaaggctgctatggctgctcagtttgcggcggaagcaacactacgaagagtacatggagctcagaaagatgatgatatgccacctattgaagccatccttgcgccgcttgaagcagagttaaagctttgtaggaaggagattgcaaagcttcaagacgacaatagagctttggaccgtttaacaaagcaaaaggaggcagcactgctagaagcggaaaggactgtacaaatcgcaatggctaaagctgctatggttgatgacatgcaaaataagaaccaagagttgatgaagcaaattgaaatttgccaggaggaaaataagatcttggataggctgcaccgccaaaaagttgcggaagtggaaaagctgagtcaaactgtgagagagttggaagaggatgttctgcaaggtggtgcagctgccaatgtcgttagggattaccaacgaaaagttcaagaaatgaatgaagaaaagaaaattcgtgaccgtgaacttgctcgagctaaagttactgcaaatagggttgctgttgtggtcgcaaacgagtggaaagatgctaatgacaaagtaatgcctgttaaacagtggctggaagagcgaaggttcctgcagggtgagatgcagcagcttcgtgacaaacttgctattgcagagagaactgctcgatcggaagctcaattaaaggaaaagtatcagttgcgcttaaaagttttagaagatggcttgaggggcactccaagtggatcttgtcgtccttccatggaaggaaaatgtataagtaatggacctccccgtcgactttcactaggtggtgctgatagtatatccaaaatctctccaaacggtgtgttaatgaggaggtctccatctttcaattcaagatcccccctctctaccagcagttgtttggtcctgaagcatgcaggaagaacttcaaagtcatttgatggtggtaccaggtcattagaccagggaaaagttctggggagtggacctcattcactcaatagatctacggatgcagttagagattgtgagacagctgatagttggaaggctaatgcagaagaaaaaagtaatgaaaccgcaaacaatgattcagctgacatggtctctggtgtactctatgacgtgttgcaaaaggaggtggtttccttgagaaaggcatgccatgagaaagaccaaactctaaaggacaaagaagatgcaatggagatgctagcaaagaaagtagatacattacataaagcaaaggaagtggaggctaaaaagaagaggcaagagatagctgctttggagaaaaaatttgccgcggtgtgccttgaacaagaacggcttggtaatttgagaggacctggaacttctcagactgtttcgggaagaactgcatcacgaggtggattgacgcgcaacctccaatagcatacatctaacttcaggcaggcatggaattcgtccataggcttcatttccattgtatttgttcccgtgttcttattcgttttgtgatcaaatagcacagatgaccctgcgatacctagatggggggaaagagtaggttttcatctgacatgacttgcttgtagtgaaggtaaatccttcggtcggtgaggtttaaccttgcggcccgccctcattttgtggaggcagtgctgtagtggttgtataggttggacgagcctgtgcctttctataggtagggtgaggtactgtgtttgtgttgttgcatcttgcatgttcgggttgtgaatatatcattgtattctgctgtggtttctcctttccactcaattcgtttgcctttggttgt

SEQ ID NO: 27202 - DNA, 1547 bp, Zea Mays
ccccattcccatattaagcagagccgaggcgagcacccccacccaccgagatgcaatgcaatgcaaacatcctccctcttctcctgctcctcacagacatcttatcctagctcccggtcgaaggccgtaggtaggattcccttctattcctcgcccgcttcctcctccggcagccggacctagctagctagctttcttgccgttcgccgcccatatggctaggaagtgctctagctgtgggaacaacggccacaactccaggacctgcggcgggcacagcaggaccgcggcggccttcgagaacaacggcggcggcgtgaggctgttcggggtgcagctgcacgtggggtcctcgtcgcccgtagccgtagccatgaagaggtgcttcagcatggagtgcctgtcgccgccgccgccgctgccgccgccgcccgccgcgccggcgtactacgcggccgctctcgccgccgccaacagcagctcgccgtcggcgtcggcgtcggcgtcctcgtcctcgtcgctcgtctcggtggaggaggcacaggcacccgagaagatggccagcgggtacctctccgacgggctcgtgggcagggcgcaggcggagaggaagaagggcgttccgtggacggaggacgagcaccggcggttcctggcgggcctggagaagctcggcaagggcgactggagaggcatctcccggcacttcgtcacgacgcggacgccgacgcaggtggccagccacgcccagaagtacttcctccggcagagcagcctggcgcacaagaagcgcaggtccagcctcttcgacgtggagaacgcagctgagagggcgacgacgacgagctccagggagcgcccgaggctcacggtcacggatgcgataatcgcgaccgcctctgctgcagcacccggaacaacgacggcagcactcccggccctgtcgctcggcatccgacggccagcgaggcctgagtaccacgccgcgctgcctccgaacagcctgtccctgcagctgccgcggtgctcggcggcaatgggtagcgcgtcgccgtcgccgagcctggcgctggcgctggcggggccgaaacacaagcacccttcgccttcgtccctgacggcggcaaaggctagtagtagtggccaggcaccggacctggagctgaagatctcgaccggccggcagagcgagcaccaggtccagacgggctcgccgccgaggacgccctttctgggcaccatcagggtcacgtaaccggaaagacggcggcggcggttagtcgggaatgacctgctggtaaaagaagagcttggccggggtgggaaaactgaaaaggaggagcttttggcagtggtgttggtgtgtgtgtgttgctgcccctgccagtggcagccgagacgacgatgcggtcgtttatcacgtgggtgtggtgttgtacatcatccatcagaaagatggaaactttactttagtggcctaattagaactctataaactttactgtcctaatttagcattcgtttgtttcttgcaaataaagaacgcc

SEQ ID NO: 27203 - DNA, 840 bp, Zea Mays
tttcttcacagtgttactcttgacctatgataacctgtgccacagttggtgtggaagattatctccgtctgaagtggctgacaaagtaaagcacttcttcaagtactacgccataaaccggcacaagatgactgttttgaccccatcttatcatgctgagagctattcaccagaagataataggttcgaccttcgccagtttctttacaactcaaggtggccctaccagtttcggaagatcaatgagcttgtgcaagagatggacaaagatggcaaatggggaacttctgcagaagggaagctgggagcgcagacaggtgcacagggaactggaatgggagtggtggcagcggggtctgccaatcccagtgccggcttctgaagagaaccatactaacgcgtggaagctagttcctccagtttttcggccttgacagaataatgcaccagccgtccagcccccaccccaggacacgggctgctaatgttaatttgtctgcttggttcccttgtactgcatcacttctccctgctagagagctggaatccccacaaaattttaggctaccagttctgtttcttccatttgtcatagtacgatctacaaagtatcaaccaaagaacatgtgaaaaataagatggaatccctttaatcagattgtttgtccgaagtggcatggcgatgaaaaggaaaacatcagtataaagaactagttactcataattctttgttctgtaaagagtcctttctaaataatgctgtgtgcatgatgatgatgatgtgatgtgatttctaccatgacttcaaagaactcaatatttgcaccttaactctccaat

SEQ ID NO: 27204 - DNA, 1065 bp, Zea Mays
taaataacattttcattcccacgacacacatgcaaaaaatgtatggttggtatcacgtaaagcatatatcattatagaaagttacaaaaatacatataccgtacatcacaattaataaagaaaattctattatgggatcaaccaacagtcgcatgcatagaacaagaattggaggagatcatcgacagaggatgccgccaaggccatcagatcggaggagttggtaaacgaaggacgtccaaactgtcatgtagatcgccgaccctcgcagtcgcgtctcgcgtgaccgccggagccacctgtgccttgcgtggcaaccgctagagggcctcgctgctgtgcgcgcatggggagccaccgccgccacacgagcctctggttcacgcctcaggtaaccgccaccgaccagtgagggggcgtcggcgctcacgccaccggggtcgtcgtcgtcgctcgtgcctcaaggaaccattatcactcgcgcgagcgcttcgtcactcgtgcatcgagataggggcgtcaaaaaataaagcctatcgacctaggacatcttttatagacgacgagatctggtgcggttgaaccggatgacctggtctggtttgggcttcctctagttattaaaaacacagttctttaaatatataaactaatagtgtatatataaagattggtggggccttcatgtcgaattttgccctaggccccaaaaagttgggaaatctatagttaaagttgtttcaactgaataaatttcaaattctctctaaccatcagctcacaatagttttctcacagctcacagctagaatcaaattaccaggaatctacagctgaaccaaacagacccttatttcatcttctatattaaactcttcattctacagtacaatctttatagcgaaacaaaatagtatatttcacggtcacatatacagtcgctgaccatagccttagagctatagcacatatactttatgtatgttatcaacctcacatcatttttatggacttatagtttaaataaaacttattgttttattaaaaaatataaatatatccaaa

SEQ ID NO: 27205 - DNA, 1245 bp, Zea Mays
gggctgtcctgcccttcttcccacggttcacggctgattgagtcggccactgcccacgccacccaaaaactcatggccagcgctgtctgcggcgtcaccgcgcgcgcccacctgccttccgccgtccctgcagccgcaagaaagctcttcttccgctgcagggccgcgtccaccatgaacgaggcatcggcgagctcgccggacgccgaggagaagaagacgacgactgtcttcgtggccggctcgacggggcgcaccggcaagctcgttgtggagaagctgctggccaagggattcggcgtcgtcgccggtacgacggacgtgagcagggcccgcggcagcctgccccaggaccccaaccttcagctcgtcagggctgacgttacggagggcgtcgacaagctggtggaggccgtgcgcggcgtcgatgctgtcgtctgcgcgacgggattccggcggtcctttgacccttttgctccgtggaaggtagacaactttggcacagtgaacctggttgaagcatgcagaaaggctggcgtagcaagattcgtactcgtcagctccattttagtaaatggggccgccatgggtcaacttctgaatccagcctacattgtgctcaatctacttggcttaacactggtcgcaaagctacaggcagagaatcacatcaggaaatcaggaatagattacactatcgtaaggcctggagggctgacagatcaacccccaacagggaatatagtcatggaacctgaggacactctttattcgggatccatatctcggagccaggttgctgaagtagcggttgaagcactggtgtgtccagagtcttcctacaaagttgttgagattatcgcccgtactgatgctccaaatcgctctctgaaggatatgtacgctgcaattaagcaaaattgactgctctatttttttgacaggatgcatcaacagacttttctatgactacgggggaaagaagagcaagatctaatctgctagcaacaagtcaggttttgagaacactaaggggaaggaggatcacatcgacccttcaatccaaagaacaccaaccatcctacattgatagaagttcttgatgatcttcatcagaagattgaagccaagtctactgccaatctaaaggctttcttaaagagttaatgattagtgagacaaggttactcaattcgtgagcctaacttcaataattctattgtttctacatctgctataccagag

SEQ ID NO: 27206 - DNA, 1028 bp, Zea Mays
cctgtcagctgggccgttccatatctcaacgttctctcttgctctgcctgtccatcccgacgacaaaaaacgcctcctccgcctcctccgccgccttccgcctgttctcacttcccgccccttcctccggacctagactcctccaagcgccagcgccggtgaacaccactttcccatacctgcgccatgggccgcccaaagggcggcgccgcgtcctcctcgaagaagccgaaggcgaagcagaaacagcgaggcggcgtcgacttcaagaagtacaagcacaaggtcgggcgcaagcttccgccgccgaagaatgccaccaacacggaaatcaagtccaaagcgatcgtgctgccggagcagagcatggcgtcggagaggacgggcatggcagtgaacaagcgcgggctcacgctacgggagctcctgcagcagacgggacactacaatgccaatgtgcggcggggtgagttttctctagtctgtatgctgcactgaatggaataaaggacattgttgtcaagcacccaacagagcttaaactgcacaaggttgctataattgagaagctgcaggagagaatatgtgatactgacaaggtggtccgtgaatcgttatacaatatactgcagtctctgatcttcccatctttgaaagaggataacactatatctgtgcggagtacactgtttttgctgatggctaatattctgaatggaacgacccatctatctgtggagatccagttaatggcttttaggtttttggagcttgtggttcttaatttcccgtcatccttttctagttatgctgaacagaccttcaacaactttgttgcggtactgagcaacgacagaatcaacctacatgataggaataaacttaacagtgttcttagtgggcttggccactgcctttccttggttgctaaaacgatagaaaatgatgatacatcaaatcgacagctacagtgaggaacttgatgaaatagaaaatctgtgttctggaatgtgtatgcgtctaggtag

SEQ ID NO: 27207 - DNA, 3152 bp, Zea Mays
ccgcgtgccgagtcccaaggccgggcgttaaccccgcgtggtcgcgtgcagcagccagccagccagcgccccctgctctgctctgcccagcgggaggacaggagagaggagtccacgcgagcggagaggagaggagagggagaagaacgagggagaggagagagatctccccccacccaccccgacccttcctcctcccctcggcctctccggcgggcgggcaattcggccatggatcccccacgcggaggaacagtgattgatcctactaaatgtcgattgatgagtgtggatgaaaagcgagaacttgttcgtgatttatcaaagagcccagaaagcgctcctgacaggctccagtcatggacacggcgggaaattgtagagattctttgttctgatcttggaagggagaggaaatatactggtttatccaagcagagaatgctagattatctcttcagggtggtgtctcgaaaatcatctggtccagtggaacatgtacatgagaaagagaaagggaaagataaagagtcaattcttgagcccaatacaactaaccatcagtcccctgccaaacgaccgagaaagagtgacaatccatcacgattaccgattatcacaaacaactcagcagcatctgatgtaactgggccaactaataatctacgcttctgccaaaatttagcttgcagggctattctcagggacaatttttgcagacgctgttcatgctgcatttgttttagttacgatgataacaaggacccaagcctctggttgtcgtgtagttcagaccaacacttacaaaaggatacctgtggtttctcatgccatcttgaatgtgctctaaaggatgaaagaacgggtattctgcagagtggacaaggcaagaaacttgatggtggctattattgcattcgctgttggaaacagaatgatttgcttgggtgctggaagaaacagctggtgatagcaaaagatgctcgacgattggatgtattgtgtcatcggatttatctcagtcataggatccttgtctccacagagaagtacttggtattgcatgatattgttgatacggcattgaagaaactggaggctgaggtcggtcctttatctggagctccaaatatgggtcgtggaattgtcagtcgacttactgttggtgccgaagttcagaaactttgtgctcaagcagtagatgctgtggaatcattgttctcgggtgtatctcctgctagttcaaaaattcagggccatgcatgatgcgaccaaactttgtaaagtttgaagctataacccaaacatccgtcatggtatttttggatttggttgattgtcctatgcttgcccaagaggcaacttcttttaatatctggcaccgagtggctgttactgaatcgtacccatcaaatccgactggcataatacttgcgccattgaaaaaattacttgtcacttggctcgcaccggctacaagctatatctttaaggttgtcgcgttcaagaactcaattgagttgggttcatgggaaattagaatgaagacaagctggcaaaaggatgatccaaggggttcaatgccaggtggtaccggactaggacaaaatagtgagagcccaaaggcaaacagtgatggccagtctgatccttcctcagagggtgtggactcaaacaataatactgcagtttatgctgatctaaacaagtctcctgaaagtgattttgagtactgtgaaaatcctgagatccttgattcaaataaagcttctcatcaccccagtgaacgtattaatgacttgcaaaatatacagatggctgcagatggggtaacagaagtcacagagctggaagaagcacctgggctctcagcctcagccttggatgaggaacccaatgcttgtgttcaaacagtgcttctcagggattcaaacccactagaacacaatcagagaactgtggttcctagatcacatgatacatctaatatactggctggacatgagttggtgattgttggacctcgatattctggttctgtgcctcccactgcaccaagaagtgtggaaaacagcaaagacaatggtggaagggcctccaaacccaaaccttgtgacatagttgttcaaaatggctcttcaaagcctgaaagggaaccaggcaattcgtcaaacaaaagagcaacggataaaatggacgactttggccacaaggatagtttctctgaagtgtcctatgaatactgtgtaagggtggtcaggtggctggagtgtgagggctatattgagacaaacttcaggatgaagtttcttacatggtttagcttacgtgccaccctgcaagagagaaagatagttagcgtatatgtggatactcttatcgaggaccctgtcagtctctctggccagctcgtcgacagcttctcggagaggatatatagcaaaaagcggccttccatgccttctggtttctgcatggatctgtggcattaaggaactgcagggtcttaccgttcgctttgtagggagcatattcggcccattcttttgttgcagatcgttgcattgattcttcattggaaatttagctgaagtatttgacttgcacatcttcattgaaactttccttggtgatgacagtaggttatgttatcgtcgggcaacttctttttcccttctgttttttttttcttcatttgctccataataggttacagtgctcccatgttaatcttagagcatcaatgtgctgcattgttcagtcagcttagtgccgtcatgaattttgtggcgtgtagcttgtctgaagaagaggatggttgccaggctggatcaggaatgcgcctgtgggacgaagcaggcttcgtgtggacgctgacgaatccaagctaaccatgtcttgtcggtaaaatggttgtgctgtatcttcggggggatttgcattttcttgctgactctttctgggaatgggaggaatgatgtttaaggtgcagaacgtctgccttaatttaatgttatgttgactcatgctcctttatctgctgcatttgttggttcgatgcatggtgttctgttctatggcctccaggttctgtgttgcacctgtttgagtttcgttccagtgcactgacactgtatatgtccaatctagct

SEQ ID NO: 27208 - DNA, 2412 bp, Zea Mays
ctacaattcgcccccttcccgcacaacgcatcccccttcctcctccccgtcgatggtgttgtcttctctctcaccctaggacaagggagacactatcgctcctctgccaacgatgtcgagtgctcccccacacgtacggagttgttccaaagactcctgtacttcccctgcaagcctcggcggtgaccatcatcgatctatggacctcggtgagtggaggtcacggatctactccaccggtgtcgacgaggtttgtttccccgtcctggagaagcgacgacgcaatagatcttcgtgcactgcagagtcgtctcccccaagccgcaaaggaatcactccactccatcctcgttctttgaatcgatctggtaaaccttggcctttcccccaaatcttcccgctgtccttccaccccctcgcctccataaccccacccactgtactgcttttgtttcacttgctttctgttgaatccatgctacatttgactgtgaattcaggaaatcattaagtataatcgaagtcccgttgatttctggttttgtaggacattatgatctgttttcttgatggtacataaactgagtttttatagttgttagatgcttgttgtattcgtttgtttagttcagactgcagaggttcaacaacagcaggcttagggtatgtgttgatcttaactccattttcattagcccattagaagcaatgtgttattttttggttacattattatcttttggccgtgaatggcaccaatacataattagttggtatgcacagacaactttgtaagcctgacttggtgatagctatggtattatgtaatccaccttagtacacaacactagctgttcatgcatttacttatctgtcatgatatactccaattatcctagtacatctaaataatctggtaaggtatattacatcattcatttgagttgtacactaataaacaaatgttatccatgtgtagagccttgtggtgaaatacttgtcacttgtgtccgtcatcttgtttgttggtttgtttatctatctttttgcaagctcgtccaagagccggccaaaagcaagcaagaagagatgttgatttacttataggttgtagttttaggtgtatctggtggttttgccagaggaactcttagtagtttgagctgagtgaaagcttttaagtttacaattactgaccacaccatgaattacaacgacgtgagcatcagttttgaaggtttagcaaactctggcattttctgactttcatgctgtccatcttccaaatgaagcccttttggaggcaaatctagttttatctgctctatgttatgtcaatactgattttgtatatttgtaagtgctgtggcaatactgattagttatgattattgaaaatatataatttaatggatatgatatacatatttatccttctttaagacactctatttttgtgtgagtgcagtggcaaatgttttcggctgttggccatgaatttatttagtattttatttgatctcatgagattagaacatacatctctagaagctttgaaggacattccttagtcgatatgcccaaatgatggttttcttgaccaggtgtggatctgatttgtaatggcttattaggatttaggccaggtgtgatctggtttgtaaatgaatctctttgccatgcattgagttgttttttctgtgctgtctcatggttacactctattggcattgtacagttcatcagactaggtgcaagtttttttcctgataaaacatcaaaaaggtctaaattacatgtatgattcaggcatgttttcttaattttatgacagtcactgatgttctgaataaaatactactattttgtgacaatcttatagcatggccttcgagttgtgtatgaagtatgaactaccctcttgattaactagtcattactactccaagctactactatcaatttaagtattgtgatcattcatgcagattgaagaggactatagtctatagatcatatgctcatttcaacatcaagggcaatttgattcaattaagtctaggatgatgattttcagtacctaggatgaagtttcagagctgccacctaatttcagagctgcaagatttctacagaattggaagactatgctaccaaaaaagctttcctaatttacctaagatgaagttcagtattgtttaggacgagtcatatgtttatgtctttgtgtctccaaaaatatttgtacacgtatcaagtggtgattattttaagtttcgctactctatatattggctattttatttcaatgagaaatggtttgtccattgcaaccgtgtggagtttctcatttttattaatggcaaatgctgatgtatattcatttttgttgaataaatggtttatttcttg

SEQ ID NO: 27209 - DNA, 543 bp, Zea Mays
tgtggcacaagataggcaattgatgatgattgcaaccaaactggacaaatgttagctggattgctcaagtggccacaaggaacctttgcctccaagcacggatttaagacttaaccagccaagatatgcaactttgcccaacataatgaaggcaaaatccaaagttattaagaaagtcgccgctgaagaccttggcgtagatattagatcagacatggaggtgattgaggtcaatgaaccaccaaaacgaaaagcaggggtgattctttcatgtgtcgacgagctccttgacaagttgaaaaatgaagcacgtgtcctttaaccatttgtatattattcctcgctgaatatggtctgacgttcatttatttaagttctctctccaaatgttcagacttcagaccatttacaaataaaataagtgttaacatgaaccaattaagatactacccctgaaacatttacctgctgaattccttccaaatagctgtttacttgattgtgtacaggctaagctatctcttttctgaaatttggaggaat

SEQ ID NO: 27210 - DNA, 2872 bp, Zea Mays
cctaaacctaactactgctgagcggcagcggcccagccccgtccgtacgcgcctggccacctcctccgcaggaccgcagccctaccctctatcgcagcacgcgcgcgcctgttcacctccgccgcagcactagcgcggcacgcgcctgctcgcctccatccccggccaccgcggcgtcgcccacgcacgggcacgactcactctagccgaccagctccggccgccgcccaccgccacgcaggcgtgcactccagcagtgagcggtccagcctcggccaccgctcgtgccccgtggcccacgtgcgtcgctgcatccaggatcgacccaccggcgcggtcgtccggccagccgcagctccggcccggaacccgccccgccccgcccctgccggctgtgtccagcgcggcagcgcccagtggcccagcggctggcgccccctcgattcctccacacccgctccgtctcagccccctgcccctactgccacctgcgattgtctctgcagtatgtggcaaatgttcaaatcctaggtccgccattgcacctgaagcgtagctctaggaacaagacgtgtctagttgtgtgcgttgggactgggggaggaataagggattgatggccaacagcgagtatgagtacgtgaagagggagttcgagtttgatcgctgcctcccgccctctaactggatcgttgtccgtatcgacggttgccacttccacaggttctcaaaggtccacgcctttgagaaaccaaatgatgagaacgctctaagattaatgaacgcttgtgccactgctgtgctcgagaaatttcctgacatagcctttgcttatggtgttagtgatgagtacagtttcattttcagagaggaaacagagttctatcaccggcgagaaaggtaactcattcagtttcacttttttgctgatatttcaatgtttatttgtctgccttttgtttatgagctatgggaaaatgttcatggcaccatgatattgacatctctaccaataacttcagcaaaattctctctttatgtgtttcctacttcacttctgtgtacgtaatgaagtggaaagacttctttcctaacaaagagctgaaggagccaccatattttgatgctcgagctgtatgttacccgaatttgaagactattcgtgattatttggcttggagacaagtggactgtaagctactggaattgattcaaattatcttgtatagcaaacgccacctcatatttgttcacacaactttttttttgccctgaagtcctacaaggaaactacattatatacaccaaagttgtacaaagcatgaaccttcgtgaacataaaaagaaaagagtgatctatgtacgtgtcagaatcaaacagtaattttgttagttcactgatatgcatattctttgtttgtgccttcaggtcatataaataatcagtacaatacctgcttctggatgttggtgaaatctggaaaaagtgaacaagaggcccagctagctttgaagggaacatttgcaaaggacaagaatgagctgcttgctaaacaattccaaataaactatgatgatgaactggctatgttccgcaaaggatctagtgtttaccgagagaaggtagaaacaactgtgaagattgatgactatggggagcccataaaaagaccaagattgaaagttacagtggcacatgttgataccatagggactgcgttttgggaaaaccatccacacattcttcgagaaggaaaatttatgcacgggtttgtaaagaaatttggcatcaatcacatattttcaccttgtaattggatcattgttcgcatcattgcttgccaatttgaccaattctcaacaattcattcatttgacaagccaaatgatgagactgcactaaggctgatgaatgaatctgcatctttgatgatggagcaataccctgacattgtctttggctatggttttagcaatgagtatagttttgtgttccatgagaagagtgaactataccagagacgggaaaggtggttattatcattatgcagaatgtgttgtatttataattcatgggctaactgctttggtttaaaatgatgctaactttttttgcagcctaatcctttcatcatgttcttcatatttcacttctctttacatgacgaaatggaaagagttcttcccctacacagaattaatgcagacaccacactttgaggcagatgctctatgttatccaaaactaaagatcatatgtgaatacttatcatggaggcaagcagagtgtcatgctggcaaccaatacaacacatgcttttggatgctagtgaaatctggaaaaagcgaaaaagaagcccatgagatattgaagggaacgttgtctaaagataaaaacgagttgctttttcagcaattccaaatgaactacaacaatgaacctgctatgttccgaaagggttcatgtgtctatcggcgaaaggtggaagaacttgcgggggctgaggacggcggcaatggcacatcaagagagcggtggcatgtgaaggtggaccacgttgacctagggcccggtttctggcgaaagcacccgtggttaatgactaattgcactcagtagtcccgactgatacatggtttttgtactggtttatcagtgtatgtaactcttgctgacacaggtctagaaacgaaagacggttgtttgttcacacatcgaggcttctcttcaccctctattatgttctgatggttttctgagtcgtctgcctgaagccttgctagcgttgttttccttctgagctgtgaaaaccttttttcccatttttttaaaaatagctgccatgaacgcacgcacctcacgctttgcctg

SEQ ID NO: 27211 - DNA, 1239 bp, Zea Mays
aaaaatcgccgttctgttttcccagttcgctcctcccatggcggcgtcgcccgctctcgtctcgctgactcccgccgtctccaggcatccccacctcctcttctgctccccttgccccccgccgcgccacatccgcctcgcccctccaaccgccacacccgcctcggacggaaacggcctcggccccggccccggccccggtgtcttcctatcgccgcgcgcgctctcgcagctcgacgagctcgcggccttccgctacgagcacgccttcccgcacggcctcctcactgtgcgcgccctctcgcgcggccccgacgacgacgccgtggccgaggcgctcgtccgcctcctcgcctcctccttctccgagaccgtgcgctgggccccggcccagcggtacgcgcagctcctcacgttcgtcatccgcaggtacctccacgaccgccgcgggctcgctccgcacgccgcggtgctcgtggggttctaccgccccgccgacgccgacgccggcgccgacaacgccaacgccgccccggaggacgacgaaggggagggtggggatgaaggggagatggcgtgcaccgcggaggtgtcgtttgacgcggtgggcgcaccaggggccccgcccacgcccactccgccgctcaacttcccctacatctgcaacatgactgtgaagacgccactgagaaggagaggaattggaaagcaacttcttaaggcatgcgaggatctggttttcaagatgaatgccaaaagacgtgtataccttcactgtagaataattgaccaagtcccattcaacatgtacacgaaagctggatacagtattgtccagactgacagtatattggtctggctgagccttcaaaagcgcaagtacttgatgagcaaggaattaccccaagcttctgttgttagtgagacttcaaccaaaaactttgagtgataatatttgacaagctgaatgtgccacgggaccaacagttgttcaagttattgagcgctgatctaagtgccatctgaacagctgaagtgacatcgaagcttgtaatgttatcctctgagcagtatatgcatattgcatccaatgagtttcccacctttatacagatatttcccccctgaataactatcaggaacttcatatgactaagatattgatctcaagcaagtctgcagctaatatttcatcaagtttgtccaggtatgttccaagcagcaatcatgaacacgtcc

SEQ ID NO: 27212 - DNA, 5215 bp, Zea Mays
cctgccgcacttcagttctctatcccattatatttttaggaatgaaatgatgaagtcctgattctcttacgccacctcgggataacacgttcattcaaagccagaggtctagggagctgagtttctacctacaacattttcctcagctttatttcttgtgctacctatgtaacaaaatacatactaaaacataaaaataccatgttttgcagtagttgaaagttcattcaaataaaaaaatttggacggctgaatatcgaccatcaacaaaggtaagcaacaaaggaaatggatggcaacgacgaaccagatccccctacttctcatgtgacttctcgtgtaactgatacttgggcatttactcctcaaagaaagatttcatccatgactacccacaaaaacgttgcactagcatgaccgattagtcccccaaggtaccaatgaatacaaataattcactatattaattagttacaatgactaacaacattaatacttagtctgttgcctctaacattacagtgacctaggtctgcatctgtactttccacgacatgttcaatctccttctacggccatgtctagactttccacatcggactcatcaagtgtgagccaaaagctaacatattctccagcaaagaataaacatgaggtaagtatatttcatatgaaggaaacaacccaccatgttctacaccaacaactgcaaaaaaatcagacatgtcttctttgaatattttcaatatacgatagttatttttttcaatactttttaccaagtgttctcattttcccttttactcttttaaaaataatttaactattgcacaaacaaacccttttgatgctaacataagtgaagctactacaactacatttgaatcaccgacaaaaaggatcacagttctcatctcagcttatagtactatctccattagtacatttgctatagtatacaactaaattttcatcctacattgatacattcatccagaattaaacacaatccgaagaatcaacaagagtagacgtaaacgatgcaactagaactgatcccaagaatcaacaagagtagatgttgtccgcaacacaactagttcacactgccgacagccttagccggtatggagcttggcctcgagtgtaggcccccaggaatgtcaggctaacaccaagccaagctgggttcgtcttctacatagtctcgtttgccaatatgcgatggaccccgcgctggcgagggaggtcctggccgccatcaaggctgacgccgcgggcgctctcagtggatttgcggtggcagtgatgctgttcgtggccagggtgccgaggttcaacgagggtgccgtgagtgtgctccgggatgcggtcgtggtgtcccgccgggattaccgaatgtcaaggtgacggattgctcgttactctacctattgtgattgctagtgtttgctttagaaatttgttctgatcagatggcggatgtctctcaggcggtgcaagtggttgccggattgtatggaaggggaatatgcacgggccactcaatgtgtcgagaagggaatactaaaatctgtcgacgagagcattgttggcagggagcatgttgtgccaagcattgttcaggtggcttttcgcctgttagaagtctcagaaggtgatcaaggtgaggaagctggcttaggtgaaggagtaatgagcaccgaagaaataggcattaatatgctcaaatcattgtttgaggtccatgaaatggcacggactgagataattgaacagtgcaagttccggattctctcggcaaagcctcagcaaagtgtgccagttctcaggttgattggatgcttgattttgagtcatccatttccaatgctggaattcattgcacatttaaaggagttgttggattatttttcttttatgaatgacaagatatcaactgctttgatcagttgcatcttgccactcacaaagttcagccgtgatctgaaggattacgtaatactggttgtaagaaaggcgatgttcaagagggaggacatggttcgaattgctgctacaaatgctataattgagctgattattgcagaaaacaagaaaaatgaagccaatccttttgaagattcaacaagtcagccaagctctagccaacagcctgaaacacatctagagtttggtaggtgtctctttcaggaactaagtgggttgcttcggagatgtctctcacatcaggtttcactggtttcattatgatgtactaccatacaactgcttcatctctagtaagacatacggtttccagcatagttagtttgctcttgcaggccagtgtcaaagaggtcttgtacgagggtcttatacgtactgctatctctgatccagctgtttctgacaatatccttgattttctctggcctcacttccaaaactattactcagaggatgcagaatgtcctcttaaaattggttcatgcttcaaagtagagcatgccaaactatgcattgtggaacctttagattgtctgctgtcatgtatctcaagaattctgcaaattaagcaacatagtaaatgtgaacgaccacgtgatgcatattggaagtgctttggttttgctgcttcacaagataatgaggttggacgagcatcatcaagtgatttattcgtgaaagctttatcaagcatccaaaagtatttgaggatatccctcacaggtttgtgatatatcatagataaagcaagccaatcagagcaaaataatgctattcaagactcaagaggtttgtgcttataatttctgcatgttgacagagcagagaggacaaagccaagaagctggatctctttcttcaccatcagagatggctcattgtcataactttgctatgcttggaatcattgaggtttttattgatttttctgcttcaaaactggagaaagcctctggcaaatcgaaggaaatgatagaaaaagaaatcgtggagcttgttgatgcgcacagtggctttgagaaaaaaattagcagtggtagggaaaggatagcacggagaagagcaaatgctggtgatgctacagataagcacaccaacgaacccagggagaattctaatgcttcattgcagaaacatcatggaaacaggggtaaatttgctgattcgagtttgtatgaactttcggtaatgtgtgtcaagcagtgccatgctgataactacaacaatgttagtcaacattctagccaaactaaattgaaccagagctccaatttgacatcctttgtactgaaagcctttcttgaattgttgaaatcacttgcatcaaagcacagtagggacttcacaataaagctgcatggagattttaaaaagttaagccagccaataatgcagctagtatggtgttttctgttagacccaattcaagaaaatggtggaagcaagaagaacatgacccaaggaaagaaaaacactgagtgcaaaaaggatcagttatatttggctctgacatgcctaaaaaaattccttgagccaagtgtttcaggagaacactctagtgatatcattgattttctaatatctttggctccacctaatatagaggatacaatgggtactggggatcttgacaataatgataccactatggttgaagatagaagcacaagaaatgtccatgtgattttgaacatactgaagacgttatatgccagacttcttacccaatcagttttacgtgaatctgaggctgtaattgaattgattctgggtatttcaagaaaactgcaacttgaacgaaggcatcttgttggaaaatgggctacagatctatgtagaaagaaaaccatgcaaagtcctagaatggcacgagagatgttaaaactagctatacatcttacaccagctccagatgacatgattcttgtttatgaggtgtctactgagttgatgaatttaatgacctctggagatgatggagattcttctgatacatttcatatcattaactgtaaaacaaagagctcactcgctgctctctctcttcaaatggttgagtcatctcttactgaattggattggggctttggaaagcttaaagcaatgcttacattaggttatgattgtgctaacattgatgaagatcaaccagcagatgaaataatgctaaggttggctttggagaaagcactctactcgagatcaacattagtagttcaagtgctctcttcctttgcacatatgagccctatggatactcaagcagaacattttctgaaattgactgtcaagttctacaagcttttaactcgcatgtcaaagtcccagattgtacctaaaggctacagacaatccattccaagcctcaagtttcagaaactggcagaagtaacttgcaaaatgctcaccgctcccctttatgattttgtgtttcaacagaatcagcaaatacccataaagggaaacctcgccaaaattagaagagaaaccaaatgtatccctgatcttatttttcagattgaggattatgagaagtatttaatacagctaagcaaactaactaaggtaaaccttttgaggcatgccaaacgcagtgtagcaagagacttccagataaaagataaatctgggggacaacaggaagatgatcacattccagacaatgctgcagcatctgataacgaggctgataaggacgcaatgggtccaaacgcaccagttgaatcatgtgctgacgatgctcaaaaatcatatgctgacgaaaatgcatcatgtgaaagtgggcatgatgaggatgcaggaggtccaaacactccagcagaagcagatgctgatgaaatcattaggtctagcattccatatggtagtccagtccaggagtctgaatctgatagagaagaggaagaattattagcacggacgaagagagctaagacaaaacaagttgtgcaggattctgatgaggatgcagatgagtaggtttttaaacattatcaatagttcaattttcgaagcgtctattgtgggcaacatcatgccaaggtgtatatacataagtttttatgggttatcttgctgattatagacgatgaacacaagagatgtaaaatatatggttttgcaaaaattcttgtgggccatcatgttgattatagaccatgcacagaacatatgtaaaatactttattgtaaattataagttattctaattttctttaagtgaaaa

SEQ ID NO: 27213 - DNA, 1595 bp, Zea Mays
accattcgaaagatccctccaggaaagatttttcttccctcctccgacgccccagcccaccaacacactctataaagcagccctcagtcacacacagaacgcacaagcgcaagccgggcaagaaaactccgcaggccagtctgcgagttggatggccttcttcttggccctcgtgtgcatcctcatcttgctagccatcgcctcctacgtccagtacactcgctggcaaaaggggaaaggccgcttcggcggccatgggaggtctgctcccttgaagctgcctcctggctccatgggctggccttaccttggcgagaccctccagctttactcccaggaccccagcttcttcttcgcttccaaacagaagaggtacggcgagatcttcaagacgcaccttctgggttgcccgtgcgtgatgctggcgagcccggaggcggcgcggttcgtgctggtgacgcaggcgcacctgttcaagccgacctacccgcggagcaaggagcgcatgatcgggccgtcggctctcttcttccaccagggcgactaccacctccgcctccgcaagctcgtccagggcgcgctcggccccgacgcgctgcgcgcgctcgttcctgaggtggaggccgccgtgcggtccactctcgcttcctgggacgccggccacgtcagaagcacgttccacgccatgaagacgctgtcgtttgatgtgggcatcgtgacgatcttcggcggccggctggacgagcggcgcaaggcggagctgaggaagaattactccgtcgtggagaaggggtacaactccttccccaacagcctgccggggacgctccattacaaggcgatgcaggtgattttggagagcttaaggatggcgagcatcatctcgttcacgttcagggaggccgtggccgacgtggagtacaaagggttccttatccccaaggggtggaaggtgatgccgctcttcaggaacatccaccacagcccggactacttccaggatccacacaagttcgacccttctagattccaggtggcgccgcgtccgagcacgttcctgccgtttgggcacggcgtgcacgcgtgccccgggaacgagctggccaagctcgagatgctcgtcctcatccaccacctggtcaccggctacaggtggcaaatcgttggatccagtgacgaggtcgagtacagcccgttccctgtgcccaagcacggcttgcctgtcagattatggagacaaaacaatccggtcgacagaaaggggcgtgagaccgacgacgatcatgtggagaggatatttatttagtttgactcttgagttaggcatgaatttaaccccaagctagctagagaagttttttttcccctttgaaattcttctttgctcgcctcttcctcctggatcaaattgcgttggaggagaagaaacggcagctttctctctttcgttttctttgcctgcttcaccgctacgataatggtgaaaatatgtaagctacgtggacatcaatgatccacagcatcgttgatatatataatatatagagaaaattctctgcacgatcaatgcaattttatccggtatcttatttacc

SEQ ID NO: 27214 - DNA, 2666 bp, Zea Mays
ttctatactgctgtcttcctcatccatttctgcttcctctgctgtaactactactagttcttagttgaatcaatacctattgtgagtaggtcgctgactggtagccgcctcgggcgtggcgggatggaccgtggaggacgacgtcctcctcgccatcgagcgccaggctaccaatgatgctggtaggattgaagggcttgtggttatgaggattatcaatgagcccactgctgcggccttgtcatatggaatgaacagcaaggagggccttgtcggtgaagtgtgttcgtgccggagagcgtggagtgcgaggcctcatgacgcgaagcaagttcggtctgctcgtgcatgtcacccgtcgcgtgcgcgtgtgccggagagcgaggaggagtgcaaggcctcacgacgcgctgccaggtccgtgctgctcgtgcgcgtcacccattgctgatgatataccacaaatgttttcgacctaacaaagagggcatagaaagtagaagttggttgctcctttaaagcatcagtttcaagtagccatcagctgaaatctaccattgctgaaacaaggtgaaaaaaatgcagaatggactacttagagatagctacactatcgatgcatctacatcattttggactatatgggacaccatcagtaatggttgatcttgtctactgtgctttggagttcctttcaactttgcttggagcctttcatgccactgatggagtcatatgcctctgcccagaaattcagtttctgactgaactaaacggtggtggtttgaatcatcgtggttcactggttttcacaatattgggattcttggcaaccatgaggacattatgagattcttggctaccatgaggacaaattgttcaattacattttctacgtctatttcgaagcgtcgatggcggatgtccgcacacaaaatgccttgaagggtctggaggaagttgcaagtttcctgcgtgtccttggctactatccgtgcaacacaataacgatatgagctgttgcgtcacactgtctatcttggttgctccgccttggaagaccagagtgggagatgttgaataaaaggttcctcttcccttgtttggaagagattatggtcattatacactcccgactgaatatgaacactcttgaaatacattgcgaagctgcagaggatcgtcattagaattgcatgaaggttgtatgcgaaaccactggattgaacaattcgagaaatctacagaggaagtcgtgaacagctatgcacaagattgagtctaaggtataggcatctgatggaggacatgttgtctctactcccgcatatgaaggacaaccaggacaaggtcgagtccaagcagagcaaggggaacacgccgagcaagctgcttgagctcaggagttgctccagctgcctttcttcgagattctggctgttgaccatgcgtcggatgagggcgcgattgtaccaattggttcgcagcatgatgcacatttgaccaaactgatgaatatggaaaatgaccaacctttgttgccggcaccaccagttaatctggaatcagccatccttgagcaaaatgcaaatatggtggctctcaaggaaggctgttctgtgggaagtgagctgccacctggtctgcagggtaattttggtggtaacaaagcaaacacgtgtacttcagcactgcattctattgatgaaggtgaagaaataacttgtggtttcattaaacatgagaggagttatgatttacagaatttgactatggataagtcaattcaagtgtctaatgaaacaaagtacaagtttcttgctcataagcccagagtaggctgtgaaactgctattcaaaactgtgagttggcttctgcattgccagatacagaatttcatggccctgttgcaaccatttcaactacgggtcaatcagaaggatctgacactgagattaatgttccaaactattctgacctagaagcactgatacttgatctggacctgattccatgggatcaagaatctgacttcatccaaccagaagtttcaaggtttcagtatcctgaaagcaggaaggatttgataagattagagaaaggtgtctgctcttatatgaaccgatctatcatgtctaagggtgctttcgcaattctttatggccaacgcacgaaatactacataagagagcccgaggtaagtcttgggagagaaacagaagaagtacatgttgatatcgatttgagtaaagaaggaaaggcaaacaaaatatcccgtcgacaggcagttattaagatggacgatggtggatctttctacataaacaatactgggaagttttcaattttcgtgaatagcaaagaagtaccctgcagtaaacgtataaacttaatgtcagactcattaattgagataaggaacctgaaattcatttttcacgtgaaccacgaggctgcaaggcaatacatagttcgaaaaaggagaggaagctcccaaggcgggatcacggcgtttgattggagtcagaacccatgagtagttaacgttatgatcaaggttgtttataatctgcgatagctacctctctcttcaagaaagtattggataagcgtaaagttatttataatttccgatagctaatatttctctcttccagttagcact

SEQ ID NO: 27215 - DNA, 1568 bp, Zea Mays
gatccggaacaattgaatcgctgcatcggtgtttcgccgccgccgcaaaaagaggcggccgcggtgagttcaagggaggaggaggaagagggtgtgaggcgctgcagaactcctgtggatcggtgagccgagggcgatatggggatgttcttcagcaaggcggaaccgccgccgcccatggtgctggtgccgccgctcttcgactaccctcccatcgctgcccgcaccaggtgtctgctgctgctgatagaaacagtggaacagaagtaaaaggggatgctttatttcgctggcagagagagctggatgacccccatacctttgtggaccttcttgtgtcaacttcaaatcccttgctgcagctgagattatgtgcatatcatcctaagtatcgtattggtgcctttggaacattacctttgctaatggggaacagggtgcgttcagaagactatggggtcatgggtgtaagatatggttcagagaatttatctgttggagcatcctttgtgccaatttccttacccagtgaggtaccctttggtgcatggttggttgggagaaaagggagcttatctgcaggagtacaatacaagccacttagtggcagcaaatatcctatgccatttacagaattggagaactggaattatgcaatcagttatggtgttggctcaactagcccgctcagcccttcattcattttctccctggaacttgccagaagcacacagctaaccgcatcattctatcagcacctggttgttcaaagaagggtaaaaaatccttttgaagatgatcaggttgttggcattacaaactacatcgattttggacttgagttggctgccaaggttgataaagataaagtgagtggggatggcaactcgtttcagttggctgcaagttggcaagctaacaaaaactttctgctgaagggaaagcttggtccttccacgtcctctgtagctctggcattcaaatcatggtggagaccatcctttacatttagtgtaacagctgtgaatgatcattcaaagggcacaacatcgtatggatttggcctccgtgtcgaggaccttagacgagcgagttaccagcgagctgatccaaactacgtcatgctgacgccaagcaaggagcacttggcaccaggtgttctgcgcgagtacgggaagcggcccatgttccagacacaaatcgattcgggcaactacgaccatctgcctacagagctgaagcctcttggcaggattttctaactgtaggctggctgctcgtgctcgtggtcgtctttcgctaggagagattttttgttgttgttgttgtagatcttatccgtcttggtcctttagacatgctgctgtaacttgcattgactcgtgagcggattgcgtcatgatagctgcatggcttttggaagccagaaggatcatccaacgcttcttcttgcattgctatgtacttgggtggatatatataacggtatggtgcagtggacaggcggtcttgaatcctcattcacttgtatgatatcatcgggtcgcagtccagtacgtggatgaatc

SEQ ID NO: 27216 - DNA, 229 bp, Zea Mays
ttgccattatcaaacgtgggttgcgtcagattgccaccaaatgaatagatttcgcttagataccattatcaaccataatgcacacgctaaaaataagatagaatataattttgtagaccattttaccaaacccgagatgtctttgccgacgaaggcagggacgacaccatctgctcctgctcctcctctgccgccgcccgccgctggggaagggacgtgggtgggaggg

SEQ ID NO: 27217 - DNA, 959 bp, Zea Mays
agggagaccaatcggagctgatggaggcagcggcggcgctgccgccggagagggatacgtcagcggactggggagatggcgtggtaccgctaggtttccgggtgaaggcatcctctcgcgagtcgccgtcacagaaggcggggaacgtgctggaggccgacctgcgctcccactgggccaccgccaccaacaccaaggaatggatcctccttgagctccaggcacaaccaaggagatcacggagtccatctgttcagcctgcttcatatttgctggcatttcgatctgaaacaactatgctcctcttaaggaaagcacataaagacaaaacccttggagttgtttgtgttcgagcatcgaaggtattgcaaaaactgttggagcctgagccatttttagacaaatcgatgtatactgatgtcatgctaccaaaccaagtctctgatgaaattcctaaaagcgatgctctcagcctagtacattctacagactactccagtatgtttggagaggaatttagcctgtcagagaatcagtttgatggttcattactgaatattttggatattgctgctgtggaagaaggcattcttcatgtactatatgcggctgcatcacagcctatgctatgtcgcaagcttgctgaaactacttcagacatttggtctgtcttaccacttgtccaagctctacttccagcacttcgtcctccaatcagttctggtcctattgaacatattgatgattcttttagccaatggaaccatccaaacattcagaatgctctctcccagattgttacaatgtcagtatcgtcatcagtttttcatcctcttctcagagcttgtgctggttatctttcatcctaccttccatcacatgtaaaaacggcttgtgttttgcttgacttgtgtcggggggcattgttatcatggataccaatgataacagcaaaggtc

SEQ ID NO: 27218 - DNA, 1391 bp, Zea Mays
cagcatccgatattccgatcccggcaaaaacaattctcccagaaagagattatttcgccccctcaccaatcctgctcccgaaattcctaatcttttaatccgcgtttttcctccgtccgtcccccggcttgcagcagtaatgaagcggaggaggaaaaggagaaaacgaaaaagcgcagggaaaacaacacaccagcacccgcagagagcaggcacacatcaactcatcaagctgagcgatgcgtgtgattgcgagcatgtgagcaggcaggcgggcagggcgaaaatccgaggaggaaaagtccgcgagaatctccggactggcctccccacacatcgtcaaaaatccaatcttgacgcctccctggtcgagccgagactgttccaaagtttctgcctctgtgatgcgtgcgggattgttgccagttggttggttgccgctgctaatgaggcccgcccgcccgatccccgtggtcgccgtctccgggtttggtgcatgaagaagtggggttgatttcgaggggaggtttttctcctgcttggctgccgtcgggaaggctccggccggccagtcatgtctcaaatccaaagcttctcgaggaacaactgtgcgctcctcgcggtgctgtgtgggaagtatgctgagaaccgcacaccagcagcgaggtctgggctggaggcgaagcggccgcggccggcttacccgttcccggagctcagctcggctgggcgattggaggtccacaccctgttcaatcctacaccagagcagttcctcgaggcgcagcgggtggtgcaacctaacttcttgtacatccagggccagcagctcgaggatgagaaggagattggctcacttgtatggggggacgccgatgtctctgatccgcaggcatttagcactcttatcagcccaccattcccaacaatagtatatctggaagttcctattggtgaaaaacttgctcaagcagttcactcaaaggggatcccatatgtaatatactggagaaattcattctcgtcttatgcagcatctcattttcgccatgcgttgatgtcagcaattcaaagttcagtgagccatacttgggatgcttttcagcttgctcatgcatccttccgtctatattgtgtaagaaacaatcatgtgcaaagtgttaagcttggtccgcgtctccttggggatgctccaaaaataaatataagcccacctgagacagaaatggttgatgaagaaggttcatctgaagtgaccccggctataaaaatatatgatgaagaaatcaacatgaaattactcttatgtggagtgccatgcaccttggatccttgtttattgggctctttagaggacggtctgaatgcacttctgaatattgaagtatgaa

SEQ ID NO: 27219 - DNA, 2096 bp, Zea Mays
cgcagtctcagtcgcacagtgataaaggcctcgagccgaggcgacaagaatctctcaagacagccagccacgcacctccgcgccgagctcctccctttgcctaccgcccttcccaccgcgcgaggaaaaagccagcagcagcagcaagcaagcaactcagcggagcacggcaaagcaaacgaagagctcgcgttggcgttgccgacttgccgtgccttgcctagctagcttcgccacgacgaacctgacgtgagagcgcggcgaccacccccaccggccaccggcgcgcgagtagcttcctgtcgttcgttccctccgagagcgtctatttacccccgagagagccggacgcgcgagatggagatggcgggggcggccgaggccgacacgccgtcgcacgagccggtgcgcacgggccggagcaacaccatcctgctccccatcgtcggcgtcctcttcgcctacctgctctaccgcttcctccgcccgcgcctccgccgcggcctgcgcctcgaccgccacgtcccgttcccgtcgggcgcctccctgcccgcctggctccgccgccgcgcgcccagcgggagcgccgtgctgccctacttcgcgcccatcgccgaccgcctcggcgcgctgccgtacctcggccccttcgccgaccgcctcccgcacggcggcggcgcccacgcgctcgtcacgttccccggcggggaggcgctgtcggtggcgaccatcctcgaggcgcccggggaggtcgtcgccaagtccgcgcacagcacgctgtaccgcgccgcggtgcggtccggggaggccgcggtgctgctccggttcgtgcgccccgcctgcgccgtcgccgccgaggaggcctacgccgccgcgcggagggtcggcgcggtcagccacccgaacctcgtgccgctccgcgcggtgtacgtcggccccaggggcgagaagctactcgtgcaccccttctacgccgccggctcgctccaccgcttcttgcaagaaatatcatctcaggccaccgtcaaaacaagatctcgcacctgtattcgacaatgctatacgagtaccagcacacccccatatgtatgggggtacggcgaggggatcgaggagtctcatagatggagcatagtctgcaacctttctctgggcattgccaagggactggatcacctgcacacaggcttggacaaaccgatggtccatggcaacctcaagacgagcaacgtccttctggacgccaactacgagtgcaggatatcggactacggcctctacctcctgctgagccccgccgctgcccaggagatgctggaggcctccgcggcgcaggggtacaaggcgccggagctggtcaagatgcgggacgccacgtgcgagagcgacgtctacagcctgggagtggtcctgctcgagctgctcgcgcagaaggagcgcgcggacgacgacggccggccgaacccgcgggacatcctcctcccggcctccttcaagaacctggtcctggagaggaagatctcggacgcgttcagctccgaccttgccaggcactgcaagaggtcggggaaggagaagagcctgaacgccttcttcgagctggccacggcctgctgcagcccgtcgccgtccctgagacccagcacgaggcaggtactcaagaggctcgaggagatcgcgagataaatggacgcgagtgctgagcaggcctggcgacttgctgcttaatctgcatcgctctctattgcagcataccgttgagctgagaagcgtctaccttccctaagctaaacgaagaacgtatttttgtggtgggcgagtaggaaatggatgcatgtttttcacgtccagtaacctgtactgtacagtttcaccgagatgcagggttgttcatcagaaaacatacagggtgtgctttcggtgcatgaggaatctccatgtggcggaatgttctctacagcgcgtatgtaacatggtatttgtcgtcgacatcgtgatactcgcatgctcgcggtgccataccatcaagtctggggttggtgatttgtccttatcacttgacacttgccaatgtaatcaacggatgaagatccccc

SEQ ID NO: 27220 - DNA, 356 bp, Zea Mays
tctctgcttgtgaagtattgaattggactctaaaggcggagcatgtaagcttatatggtgatcatgcccattgatgtagaagaagtcgatgctgttgatctggaatggactaaacttattatcaaaagatgcttttttttttgtattttggaggctaatattgtggctgcttccgagcaaccttgggccttgttgtttggttagaagaggattgagggggatttgttacttcgcgctgttaaaaaacattatactttgcgctctactgaaagggcagcaaacaaagacgtcgtgtatgccatatgctccttgcctgtgaaaaaagaaaataaagtttgtacggtccagtgtttagt

SEQ ID NO: 27221 - DNA, 2329 bp, Zea Mays
gaagccgcttctagcggccacaatcggtataaaggcgaaacaaacgcagccgaagttgttcctcccgcaagctcccatccgcccgctaccccacgctctgcgcctctgcctagggttacgagcgacgctgcgccgtcggctggtgcattgacgagcgacgccgcgcggggttacgagcgacgccgtcggctggtgcgttactctcgtgtgcacagcaatggcgaatctccagagaggagaggaacccaagtgtacaagtgaaagaaatcaaaggattaaggtttaaggatgtcatcagaaactgcagctgcaccttctgaaactgaagcagctagagtgaatctcctaaaaagaaattcagatgatgttggatgggaatatggtgttcttgttgatgctaacaacaaagacaaggtgaagtgtaagttctgtgacaaggagatgaggggagggatttataggttgaaggagcatcttgcccatgttggaaagaatgtgaagaaatgcacgtctgcaacaccgcaggctctagaggctaaagagaagtgcaagaaagcaatagaggctgcaaaaaggaagagggaggagaagactgttcgtgagctagaacttagagaggaagtgaatgtatctagggttggagaggagtcagaagaagtcacttgtgttagaagctcacagcctcacaaattagggccaattgacaaatggacacgtgctattgatcctaccaaggctgattcattcaaacaacagcagctgaacaaggaattatggaaagaaagagagcatgaggtgcacaagtttattgcaagatgggcctataatcatggaatacctttcaatgcatgtgacaatgatgagttcaagcaaatgtgtgaagcaattggacaatttggaccaggacttacacctccaactcaagatgcctttcgaggtagtttgctggaagaagaatatgaaagaaccaagtgtttgttgcaggaacgtgaagccgagaagatgaaaaatgggtttgatgcaagtaccacgtgtttgatgcaagtagtcactgacaatgcctctaacaacatgggagcaaagaagctattgcttgagaagagaccacaaatattttggacctcttgtgcagctcacacaatcaacttgatgctccaaggaattggcaaattgcctcggttcaggaaagtgattgaccaagccttttggaaggatgtgaagctaatgttggctgtttttgagccattggtcaaagtcctccgtttggttgatggggatgtgaagccatccatgggtttcctttatggagagctactaaaggcaaaaagagagatcaaagaggcctttggcaatgttgagtttcgattcaaagatgttatggctgtaactgagaagaagatgaatggaagacttgattctccattgcatttgacagcttttttgctgaatccacactatagctatgctaacccatcaatatttgatgagcccaaaatgaatgaagccttcatatcttgtgtcgagcaattttattatcatgatgaggaccaacaagaacaggctgccaactttgaattgaaaaaatttcagaatagagaaggaccatttagcaagaagcttgcaagaacttttcaaaactatgattacaatccagcatcatggtggcagttatatggaactgaaacatcagctttacaaaagatggctacaaggatattatctttgacatcaagctcttctggttgtgaaagaaattggagtgggtttgaagggatacacactaagaagagaaataggctgactacaacccgcctcaacaagttggtctatattcagttcaataacaggctgatgaataacagagaaaagattaagtcaaagaaaatcactgatgttctcttgtctagtgatacaactgaagctcaaggttttctccaagagggtggagatgattgtgcacaagttgtctttagagatgaggaagatgagatggaaggtacagggataccttggtctgttattggagaggcagtgggagcagaagaacagcttgagccttgtagaagtgcaagagtgagagagctctatgaaggagaagagtttgagtctgaagaagaagagtatgaagatgaagatttgtgctatagtgaagatgaaatatgatctggaccatctccatctagtagtgaagccttttgtgatgccctggtcttatgaactgcagctgtgtcactttgtgtctgtgtgtcttcttttgtgtgagacctgaactaagaactatgtgcttgtgttgtcctttatttataaattgtgttctgcacttgtatta

SEQ ID NO: 27222 - DNA, 982 bp, Zea Mays
tgaccagcaatcaacctcatgataaatagcaaacactgaaacgaactctgctgtgccactatgatttggttccctgattcttggttcttgcacatcagaagttatgcgggtgcttccatatcttaaaaaggcatatggaaatgccatgcaaaaggttctccatgtaggccctgatagttgtacagtagtttctaatttgttgaaagaaggaaaggttgaagcttggggagtggagccttatgatttggaagatactgacagtacttgcaaaagcctcgtgcgcaagggctttgtccatttagcaagggtttccacagatggccttgttatttttgctggcaacccaggtcagcagaaagctaaggtctcagaactaccaaaatttggaagaccggcaaagttgcggagttcttcatggtggacacggtactttgtccagaccggcttgacagagaacgaagggccgctgaagaaattcgaagatgctacatccaagaacaaatacaaaccaggttgtcagatcttccacctaagttcgccaaggtgatgcgcatccatagcaccttgaattgttgtcacaccccctgccctcctccggttggcttgctcattgttcgtgtggaggaaatcgtcgcaaaaaaagccatcaggaataggttagcttatgtagagaggctccgacacttgttgctagaaattcactctggaaattaaattgtgtcccccaatgattgcaaactggagccccgctgggatatatatgtaagaactttcacgctgttgtaccgctgtgctatccatgtattgtcaggtgttcaccgagcagtttgaaatgtaaagctcttgatgatccaggaggcggggggctatatttgaccactagttgtagacatcgtaccatgtcattttcagcaagttggatgatgcttcaagccgacccgttcttttctgagacgcgagaaagatggtctaccaaattctg

SEQ ID NO: 27223 - DNA, 75 bp, Zea Mays
aaagagaaacgaatttggaaaaggattggctgtgagcagccaacatcagctcgagcctggcacaccggactgtcc

SEQ ID NO: 27224 - DNA, 1022 bp, Zea Mays
tgaagtctgagttgtttggttgctatggggatgatgacacatgtttcaagcacttcatgtttttggactcattgatattgcagcgaagcagttgctagggcaagggttggtactgttgctaaggcttccactggaacatttgaagcatggattcttcaaaattgaagctgtacatataccaggcacacctcggccatttatatggaccgacacatataccatatatgcccgatatagcgcactgcaaatccattttaaaaataagtttggaaaggagcaagactataattctgttcaagatgctctgcagaagtgtgtttcactttacaaagagcctcatacacgaaggttggtgaaaaatgctgccaagcaggactacatgatatgcctgacgagcctgatcgatatggttcagagcttgtttcccattccacacataccggggttgcaggagttgctttgcgaggccgaacaaattttaggagagctagaagaagagagtactaggaagaagcaatgatacgtaggaaccaacacccatatgggtggaagcatttgttaattgcaagttgtgagccatatattttttcagttggtcgagatcgcccacctatatgggtggaagcatttgtttgacgaggtgctgaatcgagtgacgggttaaagagtttaatgcttgtttgcgcagtggtgttatgacgtggtcttcaacatagagtcctagtttctcggtggtggtggtccacaagatagatcatgttgctgaaatcttggatgctttctaaatcaaaatccttgacattggcgaccaaaaaaaaagatccctatcaatggcggatggccaaactgaaccaaggattggttttggcatagaagctcttcctaaaagttgtgctggctgtttgcgtaattcttttagatattgtggtcttagactatctctagcaacttactcatctttatctctatatttaaactccacattataaacaatgcactttacaatacaaaacaatattttg

SEQ ID NO: 27225 - DNA, 204 bp, Zea Mays
gcaggtacgctttaggatatggttgatggtgtgacttggcctaccaccgtgccaccgggttggacggtcgagtgggatgatactccgacaggagaggagcaggaggagtagtgggctaggccttgcccaattcctcgctatcgacgttatcgattatccgctgcattttattttctgaacttttaccagctacttgaaaaactc

SEQ ID NO: 27226 - DNA, 1471 bp, Zea Mays
atgcccttggtggcgccgacattccaatgcagtgactactacacggagctgctcgtcgtctatagcgcgacggaaggatacatgatgcgatgtggtggcgctcaaacagaggcacgaccggcaggagcaagtgccacaccgacgtttggatggagcgagcaagcgtggcctggcgacctgctgatggcggcgaaggggatggcggcaggagcagttgtgggaacggaggcacggagagcaggagcaaatggcacgcctaagtccaaacggagcactctaaaggatgaacaaaaaagatcattatatgatcaggttggccctgatcagtatgagaaaactgcttctggcggaggcggaactggcttcgagggtggttttggaaatccatttgaggatatttttggtggtggcggtggcggtggtggaatgaatgatttctttaggaacatttttggggatagggactttagaggacgagatgttaaggttgcactcgaactatcatttatggaagcagttcaagggtgcagcaaaacggtcaccttccaaacgtctgtaacatgtgaaatctgtggtggagccggtgtgcctcctggaaccacacctgaaacatgtctatcttgcaggggttcaggatttatattcatgcaaaccgggcccttcaggatgcaatcaacctgcacaaaatgtggtggttctgggaaaactgtgaaggaattctgcaaggcatgcagaggaaacaaagttgtgcctggaaggaaatcagtccgccttgacatactgcctggtttggataatgaggataccataaaggtggttcgatcaggtggagaagacccagatggccgtccaggtgatctttatgtgaccctcgaggttcgtgaggatcctgttttccgaagagagaaaggtgatattcatgttgatgctgtcctgaatgtgactcaggcaattttgggagggacagttcaagtcccaactctcagtggagacgttgttctaaaggtcaagcccggtactcaacctggtcagaaggtagttctgagaggaaaagggatcaagacaagaaactcaccgcactacggagatcaatatgtccatttcaatgtcaacatccccgaacagcgggagctgatcgaggaattcgcgaaggaggagcaaggcgaagacgagaaggacgccaaggcagcagctggagcatcggggggatagccggttttaggagccacagtagtgccttttagctggtatttataccgtgaccatagacctgtctcaaattcgcagcgaaaaaaatatatagataggtctttgtttcggattttgtagctggaataaatggataatacgtctagaactgattttctgtcttctttttcgtgagtctgctaagcatgatcccttcctcgcacggtgcacctctccctcctcttctcgcttcctgcaggccaacccgacaggtcatcgatag

SEQ ID NO: 27227 - DNA, 2909 bp, Zea Mays
acctctcggttgcaaaccatgattaacatctccctggatttttccaccacacacatgcatccttttggatttgtttagttcataagcccttcagactggcagatatcaagaggtcatacacatctcgcacctctaagtgggtgtgggtctgcaacaattctgcaaccaccttatccttgcctttgggagtaagcccgacctacatctggaggcttcgtcgagccttggaaggcctttttgttgattacggctaatttccaatggcagctgagatgtaacaaatttgctcagttcagttctctaggaaaagttcccgtggttcagcaatgtgattggtttcataggttttttcgtgtgttggtgatcaaagcaatctggtgtaagcttgcgtagttgacatcagagtttgtttcttatggttaggttcttttgcttttcatcctctactgcacatcacagatccaaggaggttttttccccagcagatgaaaccatgcatgcagcgtcaaagaaggattatcagttggagtccatgactggctcagttcgttcaaaccagatgacagaagaaaataaccgttcagctgttagtggtcattgtggcagtagcccatcatctcatcaagaatgctgtaggtcagaagacttgaatagatatgtgtgctctgatgagggcaaggaggttgggcacctaaagaagagtcagtcgcttgtaaacatgcttcaaaaggatcatggtcgtaattctagcgaaggctctgaggttgatgttacaaaccatgaacacaaatatgatccctctaatttgaagagatctgaagttgttggagaatctagtaagctgtacagactgaaaaatgaggatgattttgatgcctcatctgacctaatcagccatgacttttgtgaacctttaggtgatcacactgttgattctgatagccatcatgacatgccttattcccaaagcaatctcccaagatcacaatctgcaatatttcagaatgattgcaccagtgatccagaaggttctgtcgattctgagatactagggtgcagatctgttgacggtttatgttcactgactgatgagaaatttgactacctgagaggtggtgaaatgtatcactgtaaatcaaatttggatgtttattgtgcaccttctccaaatatgcaccgggcatcaaacattgacgaccatggttcagtaggttgctctgatgttgctgcagagggtcaacggtccactggaagcacagaagaattttttgtcagggatgggatcctagtaggtcacgaatactgggatggcaaatacatttgtggcgatcactcgctgggtccagttgcccttttctgtgcagattattaccattctgggaatgatgtcgacctcagtgaagctacaggtcaagagagagagctgtcgaacagagatagcacactccaccagtcgcttgtagtggaagtacctgagtcggtgagcatttctgatacaaacgacattagtggggaacctgaacacagtagaactgacattgatgaggacccaagtgaacttactccaagaacctacaatattaaaagaatcgaggattggatcaatcagattgatatcaatgatatcgctttggatgggcaaggagagaattcagtttctgctttagccaaatctcgtgaaccgatggctggcgttcctgctgtgcggcctgatgctaaaagcccgcttggtatggagatagcttacacttatatttcgaagttaactcctgcttcatcatcggcacagttggcaaaccttggtttggttgcgatcccaagactgagcgcattctcaggtttgcgcgtattaaacttatcagggaactcaattgtgcgagtaacagcaggagctcttccaaaaggccttcacatgttaagcctgtcaaagaataacatatcaacaattgaaggccttagagagttgacacgattgcgcttgttggatatcagctataatagaatatctagaattggccatggattggcctcctgttcctcgttgaaggagttatatctggccggtaacaagatcagtgaggtagatggtcttcaccggcttctgaagctcaagattctggacttgcgccacaacaagatttctacatcaaagggcctcgggcagctagctgcgaattacaactctctagaagccattaaccttgccggcaaccctgcacagaagaatgtaggcgatgagcacctgaagaagtacctgcttggtctcctgccaaacctcgctgtgtacaacaagcagcctattagggcgactggatcaaaagacgtctcggaccgccatacccgcaagatctcttcttcgcaccattctgaccgtggtggcagacccgaccgcagatcttccaggttggtgggtgccccgtctgctcacaagccacagagctcgcggcatggacgctctggatatgtgtcaagctcagcgctcaagtacacgagagcccgcaacacgcacaagacctcgctggggtcaaggccccttgaacatgcgagtgccatagatctggcgaagcaaacccagacagagggaaggacacagtaagatcagtcaagcacgaccatcgatatactaccatggtattgttgtgaagtaaagcgaggcaccagttttgctggtggattttttttctctctcacgtgaataaagctcaaaacagtaaacagagcagtgctttcatatcagcccatatttttttttctaatattgttgagtggtattgatggcaattgggaattgtatgatttacttgccttatgaataaagcttgaaagaaacaaaataaagattagtattttttttcaagatgtcttctataagactgtactattgcttggtggtgaaattttgtgaacat

SEQ ID NO: 27228 - DNA, 735 bp, Zea Mays
atctagtttgtggacgacgacactgagggtgatgaattcaatgaccaagatgcttcggggcatgctgaatggaggaagttaaaatatggaccaccagagaaccttgataagcttgatataatgtttgagcatatagctatgaatggatcaacttcctgcacaccaggacaaaatattgatatagaaggacctgatgttgaaggagtagaagttgcaataggaggcagtcccgttagtgttggtagcatgaaaaggggtctatgcactacaagtgttcgcagtccaaagaaaagaacaaggagccctatagtcagaacaatgaaggaatgtgggagtctatgcacgaaaccaatggtgtagcctagaaggcgatgcagggagagtacataaaagaatccatcaaacaatgcatgtctttggttaaagaatgtggcgcacctgcaggaagcgcagagcactttatggctagtaaactatttgttaaggctaaacattgagaggtttctctcaccatagaagaaagtgcacaaatgctagcttggttaaagaggtggtgccaagataagaaaatctattagttttgtgtgttcagtttgtcacgatctacaaacatgaactagtgtcaagatctacatacttgaacaagtgtcagttgcttgttcagtgtgtcactgtcaagaataatgaacttctgtcatgtgcatctattatgtggagtggtacttagttgttatg

SEQ ID NO: 27229 - DNA, 1110 bp, Zea Mays
ggatcagttagaagattctaactagatattgtgtcagggaattatatagtagctattcactaagaagtacatttgcagtacacaatgagaagaagcaacgcagtacataatgagaagaagcaacgaatatgaactgcagcatcagttagatgacagagggatggcccaaacactaccaagcactttaactagttgttgctgatgcatcgagctatctcatcatcgagccatgcactttgcctgttttagtgttttgtatgcgtactgattatgctgctcaaagcttacctcctgtttcgcttcagaatccatgtttagaactgacaggccctgcgcgtgctgtcatgatgtatggtcgtgtgatatttgaggcttcattgtatgtgaaaggtgctactagatctgatgacaaagaattgagccttctagctattacttcattggggaatttgtctgatgctcactcatccttgattgagtgttcttgcagtagcagacttagcacactggaactgatgcttggtaaaatcttacttactctgtggaagctacaattcacttgcgggacatggccagctgatggttttcgttgcatctttgtggccaatgctggcatagggacaatggattgtgttgcttgagactgcagatgatcgcgctggtgataagatcagccttgcacggcaggttgtttgtgttgactgtgatagagagctgaaggttgtggccagcattacgaatggttctgctacctatacagatgaaaagggcttcaaacctctgaaaatgggtgcaagctccaaggaacttgtatcggtggcttacgggacgtttggtttgaggaatcacttcatccaaaatatggtggtgcatcatgggtctattcctcaaatttggtggaatgaccccattcctcatattagtactaactaaataactataaggaatgaggtgatgatggatcaactcaatccattccacaaaccaaacaaaaaagtaaggagcgagaagacgatggactagatcattcctcaaaccaaacagcttattagggttggaagtcactgtttattggtcctgcttcccatttgcaccggtttagttagttct

SEQ ID NO: 27230 - DNA, 1535 bp, Zea Mays
tcttccaaaaatcaagcaaagaaaatattcgcagtgttgcgcacttcgcgtctcgataaagccgaccgcccgacccccaactgttccgtcaaagcagagtctgcccctccccgcgccgttctttttggttccccactccccagtccccgccgccgccgaaacccgcagatggaggtcgtcgtcgccgcgaagcagaaggcgaagaaacacatacacctcttctactgctcagaatgcgaggagctcgccctcaagatcgccgccagctccgacgccatcgagctccaatccatcaactggcggagcttcgacgacgggttcccgaacctgttcatcaacaaggcgcacgacatccgtgggcagcacgtggcgttcctggcctccttcagctcgccgtcggtcatattcgagcagatctccgtcatcttcgcgctgcccaagctattcattgcctcattcactctcgtgctgcctttcttccccacgggctcattcgagcgcgttgaggaggagggcgatgtcgccaccgcgttcaccctcgcgcgcattctctcgatgatccccaagtcgcgcggcgggcctaccagcgtcgtcatctacgacatccacgcgctccaggagaggttctacttcggggacgacgtcctgccatgcttcgagacagggatcccgctcctgctgcagcgcctccgccagctcccggacgcagaaaatatcaccattgcctttccagatgacggtgcgtggaagcggttccacaagctgttacagcactttccaatgatagtctgtaacaaggttcgggaaggtgacaagagaatagttcgtataaaggaaggactacctgaaggccgtcatgttgttattgttgatgatttagtgcaatctgggggaactcttagagaatgccagaaagttctagctttgcatggcgctgcaaaagtcagtgcttatgtgactcatgctgtgtttcctaagcagtcatatgaacgtttcatggcgtctagttctggtgacagatttgcttacttctggatcacggactcatgcccacacacagtaaaagctattgggcaaagacctccatttgaggttctgagcctcgctggctcaattgcagatgctcttcagatatgagcgtacactggtggaatgctcccgcttttcctaaatgtaagagttggtttccagttcctggaaaagcaaataatgtgtagtaagttaagtacctgaaggttccataaacagccctgtggtttgtaataaaatcaggcattggatactcaattgttgacagctgtgtatttgtcaatgttcacttctgtttgaagtgcgcgagaccagtgctttactttcctgacccgtcggagtatcggtttagcaacttcaggtactgggctttgttgtgaacaaatagtgcaatgtaactgaacatgaacctaattgaatttctattagattggatggtcatattgcaaccatgacatgttggcctccttgaattttactgttacatggatgcatcgagcaaattg

SEQ ID NO: 27231 - DNA, 296 bp, Zea Mays
cggaggccatacgagacacgagtagccctagatttggccgctcgaatcgacttgctcccactgcacgcgggcccgtgtgcgggcgggtacctgcccgccagcccgcaacgacgcggtatatctagccacggccttatcgggtcacaccagctgacaaccagacgcgccagggtttcaggcttccacgaatctccccgccgccctcaattcccctcggcgccgccgccctcaattcccctcggcgccgccgcctcctcccctcgcttcggtcctcgttgttaaggcgtccccaaggc

SEQ ID NO: 27232 - DNA, 189 bp, Zea Mays
tagaacaggatggaggggttcggcagggagcgtggctgcgcgcagggaaatattacggcacagagaatccggtcaggcacgactggaggaacaaggagcagggcagagctccaagctgagcgcgcacaggggagctgggcgtgagctcggaactcgacgcagcggccatggagatgggcgcgcagcgag

SEQ ID NO: 27233 - DNA, 3696 bp, Zea Mays
ccaccacccaagggcaaacccgtgccgctccacagtatcctcggggccagccatccgccgttccggcttcctccgcattgtggtcttctgtcttcctgcctgcctgtaaacccactctccctcgccccgcctttgccgccggtaaagcaaaaaatgggaagtgagacatttgatttgaatgagcaaccacatgaaaatgaaggtggcggcctgaattatgtgttgttgcaaaaggattgtaagaacatatgccgcaccaaagtttatgatcttcccatagaagtgccgatcatttggtcagttactgcatttgtgccaattaaagcttaccaaaagagtgatttcccaaaatttttgctgcttccctatcctgaagacagtcgtcagaaatctgaatggggaaaattcatgcgcttcctttcagaaaataaaagggctgctattgctagatgtgggtcctcaactttccacatacttgctcctgaacctgatgaatgctcaagttttccgcatgcggtgctcttgtatgagtgtggacaaaatggccctggagattgcaaacatatggcaggaacatctgggaaacgtgtgaatagtaatgtgatgaatgcttcaaagaggccttttaagagtgactttcaatatggttcaagaaactctaagccaccacactttaaagaggaggtctgtgatagtttactgaagcccaagaagatggaaacttcacctaagcattatgatcctttcgtcacagaacaccatagactagttctggaatcctctccatgtgaatctgttgaagacagcccaagagttttgaatccggtggtaaaaaagagaatggcttctcctaccaaaaatttcattgttgcagaccctagttatctgcgaacacttagtcagacacatgctagctggatatttggagcgatagctgagctcattgataattccagagatgctggtgcatcaaggttgagtatttccatcgagcatttgttttcaaagaaagcacagaagaaaattcctgtcttatctgtaattgatgatggacatggaatgacatatcctgacatcatgagaatgatctcttttggccataaacgaccaaatggacatcgtgaggatcagattggaagatttggcattggattcaagactggtgctatgaaactcggaaaagatgcaattgttctcacacaaactaaatcctccagatcggtggcctttctttctcagtcttttaatgaagaaaaggataatcttgagatccctgtggtggcatatcgaaaggaagggcagtatatggaagttgatttgagtgtgcagtctgatgctactgcagaatataacttgaacgctattaagaatttttcttccttcaacgagtatttcattggagaaaagttgggcctatttggtgaagatactgggacacaaatctacatatggaatttagacacatggggtactgattacacattggagtggaattctggtaagtcttcagaaaatcctgtgcaccatggtcgtggagacatattaatccgttcaagaagagtcagatcacgtccaggacaaacaagtaacaaggtgctgttggattattctcttcagtcctatctggaagttatgttcttgaatcctcggatgaagatatctgtccaagggtctttggtcaaaagccgcccgttggcgaagacccttaacaagacttctgttgtgtctggtgaaattatggaaaggactattatattgactctgggaaggagcaaggtagaatgggacagaacaaactgtggaatcttcttgtattggcatggtcgtttgatagagtcttacaagcgggttggaggccaaaagcatagtactgacatggggcgtggagtaataggagttgcagatatcacaaatctcattgatgatgaagatggtaattcatgggttctgaacaataaacagggatttcaagattgtgaaatgtatgctaaactggaggagtggcttggtaggaaagtggatgaatactgggatacgaaatttgacagtctcacgctgagaaaaggggatgagcaccacaatactgattctgactgggttcagtgctacagctgtcgtaaatggagaatgttgaatgcaggcttcaatgtagacaatcttcctgaggaatggttctgctacatgccaccattcaatggcaaatgtgagattcctgaacaacaagcgggaccagacatcattgtgataggtgagaagagatctggacatgatgaacaaaaaaaggctgccctgcaaggaggtacaccggaggaggaaatgaggcatgagaaccacgagattcagatgattactcaagatgaatttgtgaagaatgttcaggatatgccggaggttgtccacaagcgaaagaaaatttcaagtggcaccccatcaaagccccaaaaaaaccgcgatgatgatctggaaggcgtgtcctcacaaactgaagatgacgtccctctcactaggttaaagaggctaaggagagggcctgcaaggactaacaaaaggtgacagaaagtgaaaatacacgccggtgcaatgcttcatttggactggacggattttggacttaacgagactgatgcatgaatcatgatgacatgagaccttcgtttagcacactgccagctataattctctagcttttgtgtagtagaatttggaaacatgcgttgctgttggattaggcgtctgtttgtaaataggtgtccctcgcattcaaatgttgcagcttaggccctgggatccattagctactattagttagctagctaatagactaagggggtgtttgaatgtattagagctaatagttagttagctaaaaagttgctagtggaattagctagctaacaaatagatagctaactattaactaatttactaaaaatagctaatagttgaactattagtcagggtgttcggatgtctccaactaattttagccactaactattagctctagtgcattcaaacactccctaaaggggtatttgaacgtactagagctaatagttagaggttgtttaaatgcactagaactaatagttagtggctaaaattagttgatgcatccaaacactctagctaatagttcaactattaagggtgtgtttggtttgaggttaaagtaagatgagtcgggggcgccaccgtcccctcaattttttgggatcacgccgcccccaaaaatcactccggtgttcacatcacccccgcttgactctcaaccaaacactatagaaaacgtggtcgtctcatttcatccctctttgtacattcaaccaaacgcaccataactatttttggtaaattagttaataggtaggtagttatttgttatctagctaattccactgacaaattttagcaaactaactattagttctagtgcatttaaacaccctcttagttgactaagtgaaattagctagctaaaaaatagttatctaactattagctaatttgctaaaatagataatagctaaattactatctagactgtttggatgtcatcaactaattttagcagctaactattatctctagtgtgttaagcactccctagctaatattatatgctattaactatttttgttcaactaatcactacagtatttaaaacttgagttttctcgtacgtcgcctcgtctg

SEQ ID NO: 27234 - DNA, 1906 bp, Zea Mays
ttcgtctagtaggtaacaatttggaattattattgccctaggcattgcattagagtactcctcttaaccacctaacctaccatatctccgtggaccttgatatgcagcgtagccctagaccacatgcagcatgatcgatgcaatgcaagcagtctctctcatctcatgcaatattgcaaacgcagtgccccacctcacaaggccatccccccatgcatgtgcactcacacacacacacaccatatatctctccacctacaccctgcctgcctgcttgcaattgcaattgcaaccaataaccatatacacacagctagctagcttcacatatcgcaagcacccagatcggcaggaccagcggcagcggcaacggtgccggcaagaagcaggccgcgcgctccactctccgaccccggccgaaacaaaggtgatggcgcagctgccgccgagggcgccggggggcgccgcgccgcaggaccactggtcggcggcgggggagttcctggggttcgccgcggccagacgcggcgcgcaccgccgctcggcgagcgactcggccgcgttcctcgaggccctgcccatggaagacgtcatcggcggcgacggcttcgaccgcctcgacgacgaccagctcatgtccatgttctccgacgtcgacgcgccggccgtctccgccggggacgcggcgcagctcatggacgtggcggacgccgacgcggacgcggacgacgacgggtcggccgcctcgtcgcgcgccgccgcggacggcgtcgccgctgaccccaaaagggtcaagaggttagtggcaactctgctagctagtacattttttaactagtagtggtcgtcttttccattcgtctacggatctaccatggcggccaaacagtagtttttttataaaaaaaaaagaaaaagaaaaattgaagatgtaatttgtgagttgtgactgcccggtctcagaagtcagaactcaggatcggagtgcctttaatttgtcgtttttgctgttcatctcttagattaacatatttcaaatcagaatggccaagcaatagtttcgatttctctgttcccttgggtttcaggatattagcaaacaggcagtcagcgcaaaggtcacgagtcaggaagctacagtacatctccgagctcgaacggagtgtcaccggtctccagatggaggtgtcagcgctgtcccctcgcgtggccttcctcgaccaccagcgatcgctgctcaccgtcggcaacagccacctcaagcaacgaatcgcggcgctcgcccaagacaagatcttcaaggatgctcatcaagaggcgctgaagaaggagatcgagcggctacgccatgtgtaccagcagcagcagcagcagcagcagatcaaggtggccaccaccggcggcgccgacatcgccgcggccgcctccatgcaggccaggcaagagctgctcgcgtgcgagggcgctgccattcgatagcagatcgagggcggaggcgttcaattggcagtgccacaacaaccagcaccgaactttgtgccgggttcctccttttctcagacaagttgttcgtcgtgcgtgcaaatacacgcgcctgttattagcctattgattttatttctgtgcagtcttaattaattcgtatatgtgatgtattcctcctcttcgtccctagcaaaaaagaaaaagaaacggcagtcgtgctgggatggggactttgttgtgaatgaatgaatgtatttggttatttggacgggcttaccgtttgtgttggtaaagattttttttctcccctccaaaaggtgatcggattcttcaggtgttcaagtcattttttacaactgcaaatgtcgtgcttttggtgtaaacttattttagatatataccattgcctcgggaaatcgtt

SEQ ID NO: 27235 - DNA, 2335 bp, Zea Mays
gggcaaggcaagtagccgctgcgcggtgctgccacctgacctgactgccgtcccggtccccggtccatccgaacgccgttacggggccgcccaccgcgacggaacggaaaggtgcggtcaacccaccccgtcccagtcccatcaccgccgggggccgggtggataaacaaacccagcggccccggccccctgtccgcctcattcccttccttcctttgctcctcccctgcctcgcctctctcccctctcctcgcctccagctcctgctcggcccgctcgcgtccagctgcgcgcgcgcctgcggtggccgtgaaggacagcccgagggacgcgccgggtgcactgatctgggggccgcgtgtccccggtggtggggcgaggcggcgccggcttccaggaatgtgagttcccgctacacaaggggtggtgccgtggtggggcagcttgtagtggctgtttcttttgcatatgcgctttctattgttgttgtcatttcaaaggaggccatagtctcctggattttgtatgccttgttatctggaattggtgaccatagatgtcatttcgtagcatagtccgtgatgttagggatggcttcggcagcttgtcaaggagaagctttgaggtgaccctcgcaagcatttatggccttactgggcatcacaaagggaagacccagagctcatcacatgtgctcgacgactcaccttccataattcgtgaaagtcgatgggcgaatctacctcctgaactcatccgtgatatcatacggagactggaggctgatgagagcacctggccagcgcggaagcacgtcgtttgcttcgcagctgtttgtaggacatggagagaaatgtgtaaagagattgtgttgagcccggagttttgtggcaagctcaccttccctgtgtctctaaaacagcctggtcctcgagatggaaatacaatggtccagtgttttataaagaggaataagtcaaaatccacttaccatctctacctgtgccttagcaatgttgttacttcagaaagtgggaaattcctcttatcagctaaacgacaccgcaaaaccacatgcaccgagtacactatatcaatggattctggcaacatctcaagatcaaaaagaacctacattggaaaaataaggtctaacttccttggcacaagatttttaatttatgatacacaaccgccctataatggggctgtagttcctcctgccggaaggacaagcaggaggttcaactccacaaaagtctctccaaagctgccttcagtcagttacaacatcgcacaggtatcgtatgagttaaatgtccttggcacgagaggtcctaggcggatgcgttgcatcatgcactccatacctgcatcatcagtggagccaggtggcacagtgcctggacagccagagcagattgtacctcgagccctggaggattcattccgcagcacggcttccttctcgcagtcgttccgtagcactgcctcattctccaagtccatcatggactcatccatggatttcaatagcgctcgcttctctgacatcgctggcagcagcgctcgcttcacgggcgttcctggtagcagcgctcgcttcgcgggcgttcctggcagcagcgctcgcttctcgggcattgctggcgccagactggacaacgacgaggagagtgaaaccaaggagaggccactggtgcttcgtaataagccgcctaggtggcacgaacagctgcagtgttggtgcctcaacttccgtggccgtgtgacaattgcctcggtgaagaacttccagctgatcgccgcggctaccccgccaccggcaggtgcgccaaccccctctcagcctgccccgtcagatcccgacaaggtgattctccagtttggcaaagtggcaagggatatgttcacgatggactatcgctaccctctctcggctttccaggcctttgccatttgtctgagtagctttgatacaaagttagcctgtgaataaatggagaagaacaaaggtaaaggagaacatcaggttgcttgcattaggccatcagtgtacctctttccatctggctctcgtgttgccttggttgtatttgtgcttaatgtagccatgaatttggtggcccatatatggacgcatgtgttgttgttggccctctcccttagaagtgattaaaagttgcatttggaccacatgttacccgatctgtaatatacttgcagtggcatcgcatgccgcgtgataacaaagttcccgttcgtgattggacttgtatggtttcagaaaagcagcaaacaaagtttggtacggtgtgcattttttttgctcgtc

SEQ ID NO: 27236 - DNA, 3160 bp, Zea Mays
gccgcgtcgtgtaccggaggcgcagagggccgttggcgctggcgagcccgggccgggactggtcccacccctacctcctcctcacctcgacccccttctcgttccgtgtcgccttctccgccgtggccgcgacagctgccgcgaattaattattcgcccaccattaaaacacctccgcccccttcgcgacctcctccagtcctccccaactcctctccatatctccacccttcctcagttcctctctcgtctctcatctcatccactcccgtcccagaatctccgtacacgcttcctcctcgccgtcgtgccaccccaccaaaccacgcctgaactgccatttcccccgttttttcccctctcgcgcaaggcgtaaccggtgcgtcgtggggggtagtttcggccgagggaagcgcggcgcgggaccgggcgcgtttcagaattcagaccggccggccggccgcggggagggcgccgcgagatcgcattgtggcggacgcggccgggtcaccgcggcattccgctccgggggtgtccgtggctgctcgaggcttttgcttgtttgtctcttacctcttgcgttgcgtcgggcggcggggctcgaggttggtggccggccaggcgcagcgtctccttttcgcggtcgcctttccggagcggctgccgccgctgctggtgcctggtggggacgcgcttcgcctttccgccgcctcggcgtggcgtgattccgaagcgttgccggggttgtactggttgctggtagatagaaaaacaccgcatcttttttggagggctcgtctcggctggcacgaaggttcctcgcggacaatgccgagcatccgagctccggcgtccaagcagacggccacgctacaggtggctgtcaagtgcaggccattgaccgacaccgagcagcggcgttcgcggcatattatacaggtcattgatgacaagactgtggtcgtgctggaccctgatctgtcaaaggattatctggacctcatccagaaccggaccaaggaaaggagctataccttcgatcatgtgtacgcgcctgggtgctccaattcggcgtgtctcgtgctctggacagttgttgaaacaatactacggagtactgacatgtacaaactactggttgctggtactagcctactggctactaggggtatcccgtgcctgtacagttggagcaatactactggcatctaaagggccaatgagcaggacgtgtataagaatatatcctctacaattgctggtgtagtccaaggccttaacgcgacagtctttgcttatggttctactggaagtggcaaaacttacactatggttggaacccatagcgatcctggtctgatggttcttagcttccgtacaatttttgagctgataaaaaaggacgacagtaaggatacgtttgaagtttcatgttcatatctggaagtgtacaatgaggttatctatgatttgcttgagagatcctctggacacctggagcttcgagaagatcctgagcatggcataatagttgctggattgagaagcattaaggttcattccgcagataggattcttgagctgttgaacataggcaacagtaggcgcaagacagagagtacagaagcaaatgctacttcttcacggtcacatgctgtacttgagattaccgtaaagcgaaagcagaaaggccaatatggtaaccaagttcttcgtggaaagcttgccttggttgatcttgcgggcagtgagagggcctctgaaacaaacaacttcggtcaaaagcttagagatggagccaacatcaaccgatcactcctagcattagcaaactgcatcaatgccctaggcaagcaaaataagaaaggtcttgcctatgttccctatcgcaacagtaaattaactcgtattcttaaggatgggctctctggcaattctcgaaccgttatggttgctacaatatcaccagctgatgatcagtatcatcacacaacgaatacactcaagtacgcagaccgtgctaaagagataaaaacacatgtccataaaaatattggaacacttgacactcatgttgaagactatcagaggatgatcgacaatcttcaggttgaggtttctcagttgaaaaaggaattagctgagaaggagcatcagttaagtgtaaagcctactgaaaaaactgcagatagtgagctatcttggttaaatgtcttgagccaggaaactggtgagaatgttcaagaacgcataaatcttcagaaggctctgtttgaactcgaagaaaccaataagcgaaaccgcatggaactccagcatcttgatgattctattgcaaggcatcaggtgaaagaaatggactctaccattctccaagctttaacatcaaggagacaagttattcttgacaacatccgtgataatgacgaagctggttctggatatagaaaggacatcgaaatgaatgagagtcgcaggcgacaactccaggatatgattgaagaggccatcagtaacaatggcaataaaacctacctgcacattctcagccagtacagactacttggaatgactaacgctgagcttcaaattgagatggctatgcgggatcaagttatacataatcagagggaagctctaaggagcctgtggaacattctctatggaacagggctaaaccagaagcagattcttaaattggctgcaaagcaagggttaaccgtagaaggctgtcctttgcctagctcaagcccagacgttaccacgccaccttcctgtcaacctcataggtttccatcgtttatgccatttcctggtccgcagtcagagccttattctccatctgcttgctttttccaacatggtttcagcactatgtctttgctgaaaaatcagcatgagacgcccacaatatgtaggcaggagcacctcagttcttactacatgatgtctggctgctcgccttactctggtgatggaaaacagtggtcaagtggaagacctacggcattcttttctactccagaaaaacctaaggaggctcagtcccaacacaacaaggaacattctggcagccatgatttcagtctgcacagaaaggggtcctcagaatacacatactgaattaatcttgctcctagttaaacacgtattgcaaaac

SEQ ID NO: 27237 - DNA, 3329 bp, Zea Mays
aagcaaaagcccacagaacgagtgaggccaggcgacttcatactgctcgcctcgccgtctttcccccaatctgttgctcctccaagctgcgggcgatcgccgtaccccggccgccgcagggaaccccctcgccatggccttgcaggggaagaagctcatcaacaaccccgacgatgtggtgacggagttcatcgaagggttggtggagacttacccgggtctgcagtacctcgacgggttccctcagattaaggtcgttcttcgtgctgatgtcgagcgcggttcctatgacaaagttgcagtcatctcgggtgatgttctgtgttctgccttggcttctccaaactatgcttttgtactacttttcatgtgaatgtgatggtttctgcttcgaactatgcttttgttcttattttcacgtgaatgtcatggttaattcctatattacattaaatatatcctaaatgattgggaattctcctgtttcaactactagatatgataacttaaaataaatctgatggtagttcgcaagaagtggttgcgatgttagtaggattgcttcagtgtgatggttatcttcctgaccagaattggcgagatatagtgttcttttgctcagcttaccttacatttaaagttccacttattgagctagttgcctggagttatgattctttttatactaagtaccatgttgcactccgcttggagacatcactgctggaagagtaacagatggcggtgtattgcatggaccacttgcatgtcatggcaccatcatacagaaatctgccagttgtcatgtcagtctgcatgtatataatctctcaatcgcttagtatgtttccttgtttgaactaatagtatgcataagcatatgtatggccatactgtttatttgtgtcgaataggaacttctgcattagaaaatatcttcattggtaactttcatggctgatgattgctgggatatttccattttttcatgtcaagctcaattacttattctagcgccttgtttataggtggtggaagtggccatgaaccttcccatgctggatttgttgggccagggatgttgacagctgctgtttctggagatgttttcgcctctccacctgttgattctattttagctgctattcgagctgtaactggtcccatggggtgccttctaatagtaaagaactacactggtgatagactcaattttggattagctgctgagcaggcaaaatctgaaggctataagatggagatggtcattgttggagacgattgtgcccttcctccacctagagggatagctggtagaagaggtttagctggaacaattcttgtgcataaggttgctggggccgcagcagatgctggtttatctcttgcagaggttgccgcagaagcaaaacatgcatctgaggttgttggtacgatgggagttgcactttctgtttgcacattgcctgggcaaataacttctgatcgtctaggtccaaggcaaatggagcttggccttggaattcatggagaacctggagttgctgttgttgaactccagccagttgacgtagtggtagaacatgtccttaaacagatattgtcacaggaaactcagtatcttcctgtcacaagaggttgcaatgctgttctcctagtgaatggattaggagccactcctatcatggaacttatgattgcagcgagaaaagcagttcctgagttgcaattggtgtatggcattgctgttgacagagtctacactggcacacttatgacatcacttgatatggcaggattatctattaccattatgaagtccggcgaaagcattttgaagagacttgatgctcccactaaagctccagcttggcctgttggttctgaaggaaaccgtccaccagcaaagtttcctgttcctctaccaccatcaccttcaatgaaggatgacgagattcttgctccatctcaggagctgagcaagcaagggtgtatcctggaggctgttattgaagcaagtgctactgaaattatcaatctcatggatagcctaaatgaatgggacagtaaagtgggcgatggtgactgtggaagcacaatgtatagaggtgcaacagctattcttgaagatatgaaaaagcgttaccctatgaatgatgcagcgggaacaataaatgaaattggggcaacaatccgaagggtgatgggtggaacaagtggaatcttgtatgccatactctgcaaggctgcgtatgcaagcttaaagcagagctcaactgtcactgcgaataaatgggctgatgctttagaggcctccattgctgctgttagcaaatatggtggtgccagcgcaggataccgcacaatgttggatgccctaattcctgcttctgctgttctgaaacagagacttgaggctggggatgatcccgtgactgctttcatcgcgtcttctgaagcagcatcagctggcgctgaatccaccaaacaaatgcaagcgaaggctggacggtcatcatacatcgctccagatctcctggcctcaatccctgatcctggtgcaatggctgcagctgcatggtacagagctgctgcccttgcagtgaagaacaaagtgcacggttcaaagagctagtagcatacgcaatgcttcattgctagacccaaaatagactgacaggaaaaatcactggggcattttctcactccccttagatttggtttccgcttgtgcttttgcatgggccgagaaaaaaaatgacttccatattgtctcacccttctcacatcatacaaagagatgttcaaagagttcgtcgtccgtacaagttaagggaagctatgcttttgcactgccgtgatatctcagcatgctgtcagtgttggaatgaccattgtttaatttgcccgagtttcgttttaatggctgagcccatgctgtcagtggtgggaatgatcgttgtttattctgcccgagtcccgtttcaattgtgcgcatttcggtaggatgtttaacaaaaaaacgttgtctttgaccgaggggtagtttgcactactgttgacttgtaatgttttttatcttgatcaatggcttgctgcatggtttctttctttctgggcaagattctcgaatggaacctaagacgtctatttatcgaggttttgcatatcatgaccaaattatcttgaggaaaacttgttactcgtacttgcctttgtatgcctgaacatctaattgtttttgtggttccgcaatttgcactttgatagcccgtaaataaaatattcaaatggagagatgcctatttaaaaaaaaagaaaagcaactg

SEQ ID NO: 27238 - DNA, 2035 bp, Zea Mays
ggattggaaccacggtcacgaagcgcagcccaagccagccccatcccccaccccccatttccccaataggccaaccccgtctccctcctcagcaacgtgctcggtttcttcctccctcgaatcggctgcaccccgtgccgcgatacgaaaacccaccaaaccctaaccctagctgcagtgccactaccgcccgcttgcccggtctccggagaggaagccgacccaagcaacgatgccgtccgggtcagcgacgcaatttcggtacacgcagacgccgtccaaggtgctgcacctgcggaacatgccgtgggaatgcaccgaggaggagctcgtcgagctctgcaaacccttcggcagggtcgtaaacaccatgtgcaacgtcggcgccaaccgtaaccaggcattcgtcgagtttgcagatcaaaaccaggcaatttcaatggtgtcctattatgcttcatcttcagaacctgctcaagttcgcggtaaaactgtctatatccaatattcaaacaggcaagaaattaccaacaataaaggcactggggattcttctggcaatgtcctacttgtaacttttgaaggcgttcagcctaatgatgttaccatagaagtcattcatttggtattttcggcatttggatttgttcacaagatagctacttttgagaaagcagctggtttccaggtaatgtgttcttctgccaatttgcttacacactattctattctacattgagcttaacggtcagacttttgacaggcacttatccagtatactgatgccccaactgctcttgaagctaaaaactcattggatggaagaagcatccccaaatatttacttccagaacatatcagtgcctgccacatgcgcataaccttctctgcacataaggatttgaatatcaaatttcagtcgcatcgcagcagggattacaccaatccttaccttcctgtgaaccaaacagcaattgaggggattgtgcaggaaaatttgcagcccactgtaggccctgatgggaagataaaggagcctgagagcaatgtacttttagcatcaattgagaacatgcaatatgctgtgacggtggatgttctgcacactgtgttttctgcttttggtgctgttcaaaaaattgccatgtttgagaagaatggtggaatgcaggctctaattcaatatccagatataacaactgcagccgttgctaaacaagctttggagggacactgcatatatgatggtggttactaccctaatgcgcagctgcaagctgctgcacaggcgccagttataagttctccgggagtggcatggcagaaccctgcatcagcaccagctgctcctttctatggaagcacggcggcttcaactcctgttggacaaccgcctgcttggaaccctaacatgcaggcccctggttttgcatctgcatcgacagcgtaccccaacccaccattaatggccaactccacgccttactatcctgctattggatcaagttcaggtgccccgccggtatcgtttcaggcttcacagcagaggccacagtatggcatgccccctggtgctccaccgcacgcaccaccagctggccaaccaatgtacttccagaaataagtggtttcgattcaatgttatcaaagagcattcacgcatattacctgcaactattgttgtccgcaaatgccatctggaatttttttggaagtgcattgtaactcttgtaacttacgagcgccctacgcaagaataccccaggctggctggctattaaaccgtcaaaaatagttttaacctattagcctgcgtggtatattgttatctcaatgccgagttgttttgatgcctcaagtgtttggaaagaaagtatttcgaaaccgtggttttggaatacagttttaagatgtcacgacatgactgtagtactggaatacagttttaagatgtcatgacatgactgtagtactccctctatagaactgtattttttatatcgttcttaacaatacgtgtttgatgattatctca

SEQ ID NO: 27239 - DNA, 3787 bp, Zea Mays
cccacctccctctcctccttccgacctcgccgcctccctccctaaactctaaaccctccaccagccgaagctactgccgcggccgcaacagaggtcgcgacgacgaacgctgaagaagcgccggcgagggagagtcctttactttttcctatgctgtagcaaaacaagcctatatcatcttccaaatatactcgttccgtgccggcggcctcccctcctacgcccctgccgattcttcaatcttcaccaacgtctgcgcgtagcaggctagcagtcggcacgacttcctcagatctgccggacgacttgctgttcgtcaccgactcaccagcaaccaacgtcagccatcagccggcagcaggggaagctgggcggagggtcattgcggcacggcgtccaggcgtacagcaggcaccagcaacagcccatggcaaacgccgcagatgaccctatggcagatgaagccagagtagaagatgccttcacacaggagatcaccgattattcgtacgtccctagataccatgtgttgagttggatggaaactgtggaggggatggtggccggtgtggcggcgcttccgccggtgtatttgatactgaacagaggtgcgattttcttttatatttcttccagttcatgttctccttgtgtggctggtgctggattcaaccgatctagggaagagatgttagttgatttgctgtaaaaatcaatatgttaacagagatatatgatacatgctcctgcttgctcatgatgccggtttggtgccaaggctgtatgccccccttcctatctgtgttttttgttctataatttggaggtttcttagttttttactacagtatttgcctattacgtatcacgttgcatctaattagctcttcttcgttgcccatgccaagatcttcttgagacgggatggggatggaagaggctggtgccctacagacctggttatgttgagtggcatgtgttcaagaaataccttggggactatttcgaccataatcgtgaagcttttctttgtgccgagcagaagcctgatccatttggatggattattgctaaaaagagtgccctgattgctgcagccaaattgttgcaaattaacttgcaccattgcaaaaacaatcaaaatgctttccagtgcctcaagatggagaaggcacttctcaggtactgtgctagctttctcactcctgacgacaaaaggttgatcctccggatcaaggaccaggcaaagcaaatgatccaatcagagggtgatcaatctttggttgtaactatatgcttggaggttgtcggtgccgagcgcgcggtcgtcgtgcagctcgtgggaccagtccgccgagcggctgctagaggcggacgcagccctcgtgcggaagaagtgcgccgagaagagcgcgccgaggccgaggacgccgccgggcagcaggtcctccagcgcggcgaggtcttggtcttggtcttggagcagggtcttggtcttggagcactgcacgaggagcacatcggcatggtgcttcaagcaatggttcaaatgggtgtccttgttcctactggagatatgactgttgtcagaagaaccgctcaatttttccttaatagctttcaagagtgcctaacagcacaaaggaaggagagagaaatggcaaccgcagaactgggtttcaaaaagcaattaactaaggaggagaagtttgaaaagaggaagcagagacttgctgcaatcggagaggatcttttggcgattgctgctgatcaaccatttcgcttccctgccacatttacatttgtggtcagagcattctcagttctagatggtactgggaaaggccttgatcctaggtttcatattacagagattgctaagccaaatgccaaggaattgctaagatttaatgacgctggtgttgaaatagttgtgaaggcaagtttcaacatttggtcaaagctgttaacctatctctatgatagcacatctcctaagggttagggcttgtttggctaggagcggattgaaggggattggaggagcctattaagcattgaacaatttacccatgcttgtttcctattctttggtcgtgataacgtttgcaaccatgaatagtacatattgcttttccaggtgtgtggagagacatgtgtattcctcctatgacgaattccttaggctccatgaaggtaagcctgtcttaatgggcttgattgttgaacctgacttagtacttttatccatgtcacggcattgaactagacagtcactcatgtccttaggatattaacggtatacatcaacaattcattctattttaattgcttgcaaaacttttttggcccttcaaatgagttccacgcatcaagaagtcaagattccaggaggcctaaaataggagaggagggcgcagcttgattcaatccatgtcaagtcagaggctgctgcgaggtttgcacatgcaagtagaatttagatggtcctgcttcgctttcatgtggatttatcttgcaaatggtatgtggatccgttccagaggcaatgagccttgcagccagtttgcagtataaaaaacccaattatgtccactgttggttcgacgcagcgtgtgccgaggatttctactgccaagcataagaaagtatttgaaatcaagaacttgcattcattcaatcataatgtgtttcctatcaagcataagtgtgtgtgttttgtttgatatctgctttaataggagattgttcttgtcaccccaaaaatgttcccattctactttcgggcaggtgaattgcagataaatggtctgttcgcaactggtgctctcgggcgactccatcactgagcaacccttcgccccggtggctgcggtgtcgcactggctgacacctgctcgcagttgcattacaagttttactgactatgtattttcaggtttattcaatttcagttgtaatgcttctgacagcagttgtatcagtcctcttgttcagcttccatgtatccctcgcatccttccttggatccacataagtgttaatgataattttgttgcatctcctctgctgatcagagctttcaaactcatgacagaataatgtactaaacttcagtttggtgtctatctcagtgtacctacactcagttggaaaacttcaaccacactgcaacaaggtttataaaaggtactgttactattgttaaaattagtcattttagctatccgcttctatttcaccgtgcttgcaggtttgctatgaggaaaaacaaatttatgggctcaaacaaagtgtgatagtgaaagtcattttgcttccagcttaagaaccaagccaagaaaacagatatcaactgtgacgccacactcaaaagcttgtttggtgagagggataaggttgggatgctggagatctctaagcttttgagccgtggcttcccgaaaatctccaagcttttgtggtccatggagccagggatggctctttggtaaaagacttcgttgtggatggcctcttttatggtccatgttaagtcccaagtcccactaggtggttaagcagaaaaatcttgtgatggcattaagactttcagactttgtttttgggtctgatgcatgtaaaaaggattcccagtgtttctgttgctcttgcgatcctgtgaggacacatatgagagaaatatttagtttgttgatggcaaatcttgtcttatgttcatgcctgtacctatctgatcaagcgttatgatatgatcccatgcgtggtactgtgttctttagagatg

SEQ ID NO: 27240 - DNA, 2413 bp, Zea Mays
aattgaattgagatttgggacggaataaaaatatcctgttgtcccgctcgctccccctctatttgtttgtttgtgtttatttatacagcccagctcatcgaaatgtcatatttgggatactgctatagcaaggggtaggagttgtaaaagtaatgggacaaaaaagaatacgaattcattcgcctccctgccctccatatgcagtcgtcgtcgtatctttggaataagtaaatagcagacgcaggcggcggattcgcggaggagagatgatgagggagcagagcctcctggaggcgacgtgcggcgacctcttcgaccacatcgacgacctgctcgacttccccaaggaggactcggccgccgacgtgctcctgctggacgcgccggcgccggggagcccgctgtcgtcggcgcgcatcatcgacgtcggccgcgccggcagtgcgcccgctccccccgcgctggcgccgtcgcttcccgcgcagcaagacaccaccgccttcttcgccgccgcggggcccgacgtgttcgaccccagggacgtcggcgctcacctcggctcgtgcgacgacattgacatggacatggacatggcgcagctggagtggctgtcggggctcttcgacgacgcatccatcccgcacgagccggcgttccccggcgcggcgcccatcatcaagagctccgcgctggcggccggcgcgctgctgccgccggacaagatggaggacgcgctgctgttccgcagctccagccccatctcggtgctggagcacggcagcttcaacaacgccaacggcggtggcggcggctgctccgcgtcgtcggagtcgtcctcggcgtcctcgtcctcggagtctttctccggcagcgggagcgggagcggcgaaggccacgcgtggtcggcgcccgtgtcgccgccgcccgtgctcgtcataccggcgcgcgcgcggagcaagcgctcccgcccgtccgcgttcacgcgcgccggggcggaggcgcccaccatcctcgtgccgacgcccatgtactcgtccgggccgtcccactcggaccccgagagcatcgctgagtccagcccgcacccggcgccgcccatgaagaaaaagaagaaggccaagaagccgccggcgccgcccgcgcccgcctcttccgacgacaacgacggcgacgccgactacgaggaaggcggcgagcgcgcggagccgcagggcggcgccgtcaggaggtgcacgcactgccagatcgagaagacgccgcagtggcgcgcggggccgctggggcccaagacgctgtgcaacgcctgtggcgtgcgctacaagtccggccgcctgttcccggagtaccgtcccgcggcgagccccaccttcgtgccgtccatccactccaactcgcacaagaaggtggtggagatgcgccagaaggctgtccggagcggtgacccgtcgtgcgacctcctgcagttcatccgccgccgggattgacgtcccggcacggcgtcgccggactgtcggtcggtctcgtcccccttatagctagctatatagtatatgtatacatgctagtatgtatgcatgcatggttgcttcagcagtcgtcggtcgtcgtcgtcgtcgtccatcatggtcatcatcaccacttcaccggtcaccgccatggcatggatcccacccctcatcacatgcattggtttctgtcaacatccatccaatcccaatccatcgccgggcatcccggcgcgtttagttcattaggtcttctttctcatcgggggctagtgttattttacctttcttcttttctgtctattggttaattggttccccctgaatgtttttttgtttgtatagagagagaaagagagaggagggtgagaggagaggcaggagaaatagatgaatcagagtggttgctgcattgcagttgcagttgcttgcaggttaggtactaggtgagaaggagagctaaaccagcagcagagggagacagatctagagaggaaactttgcagctagtcagtcagtcagtcaatcaattagaagaaagcatggagagtgcttttaagcaaatgaaaggggaatttgttggtttgctaattagaagggaggttatgcagggcaggtcagtagtagctatcatcgtccatgatgattttaaaacttaagaagagggggacagccatcatccatcatagtctgtactctgtatccggagcttggtgtactgaactctgaaacttctttttgcagttcatctatgtttagggatttgataagtgttgtttggtttcttctatactagtagtgctacctcttagcgaataattaattatatatgcttttgctctcgttcttttctcctgccttgttgcctccatggctccccatccatacagaagctgtgagctgagggc

SEQ ID NO: 27241 - DNA, 1551 bp, Zea Mays
aacagccagaaggcgccgtcgcctgcggcgacacgcgcacgcaggcatccctctcgtgagcgcgcactgctaccgtgccgcagtgtggttacagctcgtcgctcgaggcgaactccggcgtgcggaaccctagcgcaggcgtggagctcaccggcctcggcgccggcgccggtactaggatggctccacccgttacgccatggtgagggccttgcggctcggtggccgcgcggccgccgcagcgaggtggtgcacctgccggcgcgccgccgtcgccctctgcgtggccaacctcgtcgccgcgctgctcgtggcccgcgcgctctacgctcccggctccttcgcatttgcacccaaacttcgtgcctgtggctttaggcggggagctgaagtattccagggagcagatgaggtgggtggaggagtcgatccggattcgccgcgcagctgagcccgtcgagctcattgaggcggtgaagaagctgcgcaaggcattcacgagggaagagaagacacgaaaagggctgccgctggagctgaagcagaaagtttcgcttgagattctgcagagactgcacgatttgggcgaaggttctaataccacggaacaacaagaagctgtagaagcatggcgtgttgggaagctcaaggacatgagaagtgcatcttctaagaatttatcaaattttggcctctccagtgaagattcaaggatgttaaagcgagccttggagtttaactggcaaaggatattggaggacattggtctttggatacctcccactatatatcatatcgaacatgatgacaaacctgagaatgaaccagaagatgaagagataatacccggtccacctttgccccctgaatgcaatactgaactgcatactgattatggtggcacggctgttagatggggcttaacacatcacaaagaaagtgccgcagattgctgtcaagcctgtatagatcaggctaagagggccagaccaggagccttaaagtgtaatatttgggtttactgtccgtctgagtatggatgctactcgccagacaaatatgaacacaaacatcaagaatgctggttgaagcaggctgaccaccctagattaaacttcaaagaccggtaccctgagccatacagagattctcatccgactgcccctgttgttgtgccatggatgtcgggtgtcattactgcatgagctgcttgcccacaggagcgcaatgccaatgtgcagcttccagactgaactctacatttttgttttgcaaactcagaaaaccatttttcattttcattctttagtacttaggctttaggttagtctacttggtagctgaagtttaggctgcgctggggcctttgtcaaactgtgccctagggcgtggcaaacaaactgatagggcatgttttggcagagatgtgctgtaatgtatgtacatcaaccaatcatgctcgcagctatatattgtacttcaaactgaaaactaactaacacagaagcaatcatgcccatggctatattctacctcaagctcgagagatac

SEQ ID NO: 27242 - DNA, 5496 bp, Zea Mays
gactcatctctcgctggccgctgctgcagctgcggagctgccactgcctccgcgggctccaccggggcaaatcgcccctgctggagaggctggagcgtctcttcgccttctctctctactttctctgtcctcgccactcacaagtcctcgccagcggcagcaagcacactgcgcttcctcttccgctccctccactgtgtgactcgcccatcatccatcaccctcgccgtgcgcgcgcgggcgctaggctttggagatctctcgcttggcttccgagatccgcgccgatccgcccgccgccgcattctcctcgggcgtggcggttgcgtgcgccgccgccgcacgatccgtttccttccggcgctgaatcgggggacgctgccagcgagcggggcgttccggtttctctgctcgcttccgcgctcgtggagcagagcaatggttcggagtgaccggcggcagcgacgatgaggtgcgtcgcgtggtgggcggtccttctcgcggccgcctcgttggttggcgcttgggggaaccacactgtatcggcgctcacgttggtatcggagacgtggtacgatgaccgcttggcgctggttcctgttgagtttggcggcggtgacggcgaggatgccgcggggcttcgcagtgagctcccgtgccagacatactccgcgaactcgaggtcctgcgaggaattgaacggctccgggtcgttcaacaccacctgcgtcataagttccagctcttcgctggacggtgatctgtgcgtatatggcgacgggagtgtggagattcggccccatgtcaagatcatctgccccttcagggggtgctacatcaccgtcaatgtctcagggagcgtcaggattggtgagcatgttgaggtgattgcagggtcggtaagcctgtacgcggccaatgtgtcgttggatcaccactccaccatcaacaccactgcactcgccggtgagcctcctcctcagacgagtgggacgccgcacagcctggaaggggcaggtggtggacatggtgggaggggtgcatcatgtaaagtgtcaaatgacaccaactggggaggtgatgtgtacgcgtggtcgacattggattggccttggagctatggcagcatgggtggcagcatgtccgccggtcagtttggagggtacggtggaggccgtgtcatgcttaggacatccggctttctgaatgttgatggacaggtgcttgctgaaggtggtgttggcagtctcaagggtggcggcggctctgggggaagcattataatacatgctttcaagctatctggaaatggcacaataagtgctgctggtggtaatggatggggtggcggtggcggtggaaggatatctctggactgttacagcattcaacaagatttggaaataacagttcatggtggccagagttttgggtgtgctcagaatgctggtgcagcaggtacaatatatgatagttcactgcagaccctaaaggtcagcaatgggaatttcaccacacgcacagaaactccattgcttggtttcccaatgactagactttggtccaatgtgcttgtggagcgctatgcaaaagtgctggttcccttgttgtggtccagagtacaggtgacaggtcaaattagattactaaccaagggtagtatctgctttgggttatcagaaaatccaatatcagaatttgagctggttgctgaagaacttttaatgagtgactctgttataaaggtctatggagctttcagaatgtatgttaaagtgctcttgatgtgggattcaaatattcagattgatggcggtgctaaggatgttgttcttgcatctatgcttgaggcaagaaaccttgtagtcctcaggcatgggtcagtgatatcttccaacactgatttaatggtatatggacaaggacttcttaacttgagtggccctggtgatggaatcaaagctaagcgactgtttctgtctctattttacaacattgaggtaagactacaatatatctagtactctgttattgtaactcagccagggagggaaagaccgccctcccggtacaatgcctgaggccggcactcaaggcgcacacatcccgctgatggctaagaagagactgttcatgttttgtcatgtcaaaattgcatgtgataagagttttgttctaattttttggactctccctttaccatgggcatgtgagcaggttggccctggttcccttgttcaggctccactcgacgaggctgttccaagcaacttggatgcactttcacgctgtgaaagtaaaacatgtcctagtgagcttattaccccacctgatgattgccatgtaaaccgctccttgtcatttacactacaaatttgtcgtgttgaagacataactgtcagtggcatagttaggggaagtataattcatattcatagagcaaggactgtgactattgcaaaggatggcacaattagtgcctcagagttaggttgcaaggaaggcatcggaaaaggaaagtttctcaagtatggagctggtggtggtgctgggcatggaggccgaggtggcacagggatttacaatggaatgagaagtgaaggaggcctagaatatggcaatgctgatcttccatgtgagctaggaagtggtagtggcggttctgctttgtcagcagataacactgccggtgggggattaattgttattggatccatgaaatggccactttcaaggttgctagtttatggctcgctgaactctgacggggaaagccatagaggcacatcgggaaattcaaatgggacttttaaaggtggagttggtggtggttctggaggatcaattcttttatttcttcaatggtttctgctagagaaaaactcatcattatcggcatctggtggcaatggaggtgtatacggtggtggtggaggtggtggtggtagaatacatttccattggtcatatattgctactggagatgaatatgttcacattgcttctgtcaatggcacaatagtatcaagtggtggatctggtaagaatgatggacattgtggagaagatggaacagtaacaggaaagaaatgccccaagggcctatatggaacattttgcactgaatgcccagttggtacatataaaaacgttgttgggtccaattcatctctgtgcatcccgtgttctgtggatagtcttccaaaccgtgctgaattcatatatataagaggtggtgttaccgagctgccatgcccgtataggtgcatatctgataagtacaagatgccaaactgttacacaccacttgaggaacttatgtatacttttggtggtccttggtctttttcaatcatcctttctttaacagttattcttttggcacttgtcttaagtgctctaagaattaagattggtgagagtgatatcacctaccgggcaactaatgcaatccacaatgatggttgttctttcccctttttgctttctttggccgaggtaccaggggcaagcagggcagaagaaactcagagccatgtccacagaatgtacttcatgggacctaatactttccgagagccctggcatctcccctactcacctcctgatgcgataattggaattgtttatgaagatgctttcaaccgttttattgatgagatcaatttggtggctgcatatgagtggtgggaaggatctatacatagtatactttctgttcttgcgtatccttgtgcctggtcttggaagcaatggcgcagaaggaaaaaaaaccatcgtcttcaagagtatgttaaatctgaatatgatcattcatgtctccgctcctgcaggtcacgggctctctataaaggcttgaaggttggttcaactccagacttgatggttgcgtacatagatttctttctcgggggtgatgagaaacgacttgatgtagcatccaccattcagaagaggtttcccatgtgtctaatttttggtggtgatggaagctatatgtccccatactatctacatagtgatacattgctatcaaatcttcttggccagtatgtatctactgcgatctggaatagattagtcgctggtttgaatgctcaattaaggacagtaagacaaggaagtgtccgttctactttgggccctgttgtttcttggatcaacagtcatgggaatccccaacttgagagacatggtgttcgagtggagttagggtggttccagtccactgcttctgcatattaccagcttggtattatcgtagctgtgaatgagaacttctacaagaatctccgccaccatgagcatgccacagaattttgtgaacgctcaaggaagaacgttgcagttccacttcaggatttcaatcaggcaaatctggatcagccttgcacaagctatgctgtttctagaaagcgattgacaggtggagtcaatggtgggatcataaatgagggaacgctcaagtcactgcactataaaagagactatctctttccattctcattgttattgcgtaattccaggcctctaggctatgcggaaacattgcaattgctcatttgtattgtacttctgggtgatttctccatcaccctgcttatgcttgtacagtactattggatatctgtcggagcttttcttgccatactgctcatcccccctcttgctttgctttcaccttttcttgctggtctcaatgcactttttagccgaggactaaaacgatcttcagtgacccgcatttttgcactttggaacattacttctgttgtaaacattattgtagcaatcatatacggctctttgtatttttggctctcttctttggcggtgtcctcagttcatcaagtatacaacacaaaaagcttcaagagtagagaagacaatgaatggtggatactgcctactatcctttttctcatcaaatcactgcaagctggactagttaactggcacgttgccaatttggaaatccaggactactcgttatttagcccggacccagatagattctgggcaatgtagtcgcctgcagcaagctaagaattgcagaaagcatggtttagtgatcgcaagaatggcaagtattaattattggatgctgaatatttgcgttttgtcccttgcaacgtcatcagcccaatacaatctctgaatctgaaggggtctaacacgctggctggaacttccttctatttatgggaagcgctcctgcgtagtgcactagtgcagatatgttcattttctttttctcagtttttttcccgtcttggtcgtgtgcctagaataggtctgtcgctcggtggggattagatttgtgcattttctttggttcaaattaaaccgttgattcgagtgtacagcaagaaactattgtgattgtcgctctagatgtacatcactgtaagtataatagtagaaccatttcaactgtatacaatcctcaaaggaaagtatgtttctttctattttctttttcctattgtcatcgtt

SEQ ID NO: 27243 - DNA, 874 bp, Zea Mays
taaagttgttactgctttcgcatactcgtacctacgatgtgttgtaatatctgtgtgacgggtgaaacgctcttgggcaaggtaaagaatacagataccgaatttgtcaagtgatcaggtgcacctgcagggttatccgaggtccgatggacaaggacaactgtaggtgggcctaatgacttgggaggttccatcacaaatgcaccgaggcttgcctggaataaacactatgttagtgtttgttaggtgacgacaacttggcgaccttcctttgtcttggcattcgtcagattatccatcttcaggttcatccgactgacgacatcatcttgcggagatgtccaatctctcattatcctagggtcgacttgggtcgtcttccgcatcacgtgatcaattaatgtacatcatgggatgcacgatgcacatgtatgagtgccagtataaatattacaatttagatacgactacttgaagaatattaaatacctatagcaagacatcgcaaatctagtacgaaaatactaaatgtcgatatcacattaaaactatagttatgccattctaacttaatcgaattcaattctaacaacacacaacagtaaactatgtataagcattttattcttctaaaacctacccctcgacattcaaacttggaataagtatagaaattgtttaattaactttttaaactaattctctaggttaacttgtttagcataataattaacatggcatcacatcattcgctttagcaagtggaacctcatcagacatcaaaaactaccaccagaccataatctttaaatctaaggacctatagtgtttatttcgcactgaattcttagattacaattgaattaacctattg

SEQ ID NO: 27244 - DNA, 244 bp, Zea Mays
ccgccacccctttttctcccccttggctggacgccccctccccctatggcagccatcctccattgcttcctccccaagatctccccctacgcagcaaggagcgagaaaaggaggggcacgttgaattgaagaggaagagaggatcaaggagatgttcttccccatctcctcttgaagatttcttggataaaccctaggtatggatgagatccttgttcctccctgtaattataggcttttggag

SEQ ID NO: 27245 - DNA, 937 bp, Zea Mays
cccagccggaaaaatataggatggacaattgcaatttaaatgaaccacttttacctctagattttatcttcttcatgccaagataagagggacaccacgaccttgggccgtcattgttgctccatccatggccgccgacacaaggcgaccttggtctgaaactgacattgtaaatgtcgttgaacaaagaatatggcattcaatggaggaagggcactttgaaaatctaccagggaagggcaaacccttaaacctcacttcaaatcctcatgccgatcctgccgaagacaccctttacaggatactttcaaagaatggttgtgcacctgaatgggttgaactgaataaggaaattcgtggcatgatcttgagctggaggtcggcattaaggaaagcatgggcaaaccgctctgaagatgatgattctaactggagtgatgacagcagggctctccaggagcgaattcgccagataaatgataaggttttccggtacaacctgatagtaccctttgggcgtcagttgtttggtctgaactgggacaaggagctggacaagttgaaggaagaataaaggacaaagaggtggacacattggtgaacatagcatggaggacttttgttgtatcaaaatgacctgtaactaggaatacctgataggacatacacatacttaagaaaaaccatgaaagctgagtataggtatttacacgtaggcttttattagtttatatatttttggagaaccaagttttccggtgtttccggtgctgtagccgattttgtgataaaactctgtcacatgggtaaaacctgagataatttcttagcggtaaaactcgatctatgccacatgggctaagctccattaggtcttcttttcaatcttgttcgtttgacttcaattcttgttcgtttgacttcaattcgtaccggc

SEQ ID NO: 27246 - DNA, 2022 bp, Zea Mays
tctcggcctgccggcgcggcggcctcacctccacccgccccgtcccgttttgacggccctttctcccctctcctccgcgagcgccgccgcagtagaacccggtggtaacccactgccgcaagcatcccaccgcgccgagctacgcgacggacgcggcgcgcggcccacaacccaaccgcagcggcaacaaccgctctataaagcaatccccccacctaccggctccgcggcctcgttcgcttcgctttcccccaaatccaccgcgggctcgagctcggaggagaggagacgagacgacccaagactttctcacccccctttgcttcctgcgcaattcctgcggcagcgcctttctctctttcaatggacagcgactacgttgccagcctgctcatgggcatgggctcatccgcccctgcgctcgacttcgccgcgctggacgccgggttcctcgaaacgctctgcggcggcggcggcggcctcttcggggtgtccggggtcgccgcgggggccgggtgtggcggcgtgtccccggaggggtcgtcggtgtccgacccggcgtgggcgcgcgccaggggcgatgacaatgtcaggaagcgcaaggcgccgcccacggggtccgccggcggcaaggaagcctgcccgggcaaggctgcggaggccaagggtccggacgggaagaggtgcagagtgggcggcagcgacagcccggtgaagccgaaggtagaggaggtggcggcgagcgacgcctcggttgaactcaaagcgcagaagaagggcaaggggaagaccgccaagccggcagtcgaaccgcccaaggactacgtccatgtccgggcgcggcgagggcaggcgactgacagccacagcctcgcagagaggaagagagaagatcagccagaggatgaagtttctgcaggacctagtgccaggatgcaacaaggtagttggcaaggcactcatgctcgatgagatcataaactacgtccagtctctgcagcagcaagtcgagttcctgtccatgaagctcgccactgtgaacccacagcttgacttcagcaacctgtcgacactcctacacaaagacatgtaccaaccatgtggcccttcggcaaattcggtctttccactggaaagtgacggtgcagctttcccattctgtgaccaagcggatcttttccacagctttggttcgggttcggctgctatggaggatcagtgctctctaagcctgctagacacggctctgccccacgcggccaacccacagttcgcttttcaaaagcagagggacttctgggaggatggcctacagaacgccttgcctaccggtagtgagcaaagacaggaggaggatgggcttttagtacccaactttgatggtacgtaacctgtgcctaaatgatgggcgatcgattgaagggcacgcacgctttggagattaaccatttggctgataccccatcatacgttgtgtctgatgcaggccagttacatgctgaccagacaaaggttgagttctagtccctggtgatcctcccaaggttgatatttttgtatataggtgggtaccaagacctgtggcaagcaaagcgctctctctctctgtgtgtccgaagctgaccatcattagagtctaggcctgcgaactgatttcgttccgtgataatgctgcatgtatggcatctcggttcttcccacagagatcatgtgatgtgatcgacctcgagaaattaaaagtagattgtgtactagatatggcgcaaatattacatgcgccatcttctaaagttgtactgattggtatgtaagggcgctgggtggtgttggaacggataccgtgtactgttttgttgcttttttttctctagtattaatgattatgatgacgaaagtccaagtatcctctcagcttgttgcaattgtgtctgtgtcctggtaccttttttttctgcaggtgttgtaataaaatgtaaaaagctgatctgaaactgttggagaaatcagaagtgagtgttgcac

SEQ ID NO: 27247 - DNA, 1857 bp, Zea Mays
ctctctcacacacacttgcctaatccagccacccgactcctatcggttaccggcgacctcaccggcggctaaaaggatttgacttgcggccgccgccgcgcgtcttcgaccgtgctctcccaccccaatctccgggttgattactaccagagactaactcgaatcgtcgatgagcgctcgatcgatcccgtgacggagcggctcggttgctccaaagctccgttctacgccatgctcgccgccgccgccgccatggcggtgaccgtccctcgggcggcttctcattgttttccagcaaatacggccaggaaatgtaggacttgctggagctgtcgtgcggcaagagtcgaggctgggcactcccgattggaggtgagaaaagtcacctatcgacctcctggaactgaacagaacttgttgaatgaaattaacctctctcttcaggaaaaaagttttggtttgatatttggacggagtgggagtggaaagacaacccttttgcagctgttggctggtctatcagaacctacctctgggtctatttgcattcagaagtatgatgatactgggaatcctattggcttgcctgaactgctaacttctcaacgagttggaattgtatttcagtttcctgagaggtatttcttagcggatactgtacttgaagaagttacttttggatggcctaggcaaaaggcagacctcctattaaaagaacagctcgctttaaatcttcaaaatgcttttaactcggttggtctgacaaccatctcattagatgaaaatccgcaagctctaagtggtggatttaagaggcgacttgctttggcaattcaactggttcaaactcctgatctgttgctgcttgatgagccacttgctggtctagattggaaggctcgagctgatgttgtgaatctcctaaaggacctgaagaaacatcatactatactggttgtaagtcacgatctaagggaactatatccactagtggatcgctcatggcgaatggaaatggggggaagtttgaaggaggaagctttgcctgtctaaacatgtgcttgtcagtatagctgtcagacagcatgtacatattggtcatccaaatctagtcacatcaactacttttacaaacttagattatgtcggctgggaaatttcttcaagatacaatggagtcagagatggttgtgaacagtcatttggtaatgcgtggtaacttccgagcacgaaaaaatgctagaaaaaatcagcagagatcgtgaatgttagcacggagctttgactactgctggaacggggaacagtctgacgcagacattgttgagctaccatgaacgttgaacattccattgaagtttaggttcaggaatcaggatccagcgatagctccttgttgcaaacatgaggattgcagaaggcctgtacactttgaaaggtggggggtcaagtttcaaaatggtgcggatgatggtttggaaatggtttcctttgttgaagtttcccactggagagattcagagaacatcatttacttgcactatcgatagtctgcatcattcacaatttgctgttccttacgaactcatttgtctggattctggaagaatatgttgtgcacatgagtagattcttgtttcctccaaagatctttgacctgctgttatcaccacttctggcatgcgaggagcaatctcagtcatgcagttatgtatatgaatgtgcacctctgtttgaaacgtccacgtcaccgtaccggcagaagggaggtatgtttggctggttcggggggctctgaacgctatgcaagtgatgctattgctatccaagatcctgtaaaaggagccaaagaatctt

SEQ ID NO: 27248 - DNA, 2410 bp, Zea Mays
acaagtacgggagagaaaaagaagaagaagaaaaatacacaaggaataattcaacagctaggtactagtgtagtagtagtactacgtaccaaaacgaggtcgttgccgtgttgcgtggcctgaggttgtcctcaacgcaaaggcaaagccaaccagagccagccagccagccagcggctccatcccctcctgccgtgctgccaggagcttggcatctgcggctatgcaatctcggccgtcctgatcgagcagcgcggggccgagagatggagggtgtttcgtcgtctgccgccggaggttcttcttcggcagcagcggtgcagggcggccggggccgggagcccgggcccgggagggtgggcgcgaccaacatcggcaggctgcggcaggggaagcagcagcacgccacgaggcccggcgtcggggccattagcgtcacgtcctggcacctccgggtgttcgcggccgtcgtcgccctcatgggctgcctcctgctcgccgcctccctcgccatgtccgcgctccaccaggtacagttcaggaacgccgccatctccaggaacttcaggggcctccaggagcttaagcaaagcatcgtgaggagggaaccagtggagcagatcatgcatgcaaggcttctgcaaatggccacttcagctctcacaaagaacggctctgaatccgaggatttcgcgctatgggaagagccctacaagcaagcgcggaaatggaagccctgcgctgcgaagcatagcttggctgacgaagaccctgatgatgagaccaacaacggtttcgtgctggtcagcgcaaacggtggcctgaaccagcagcgtgtcgctgtgtgcaatgctgttgtcgtcgccgctctgctcaatgccacgctagtagtcccacggttcctctacagcagcgtgtggaaggacacaagtcagtttggcgacatctaccaggaagactacttcgtgaagtacatgaagaacgatgtccgaatcgtgaaagaactgccagcccgccttcggtcgctggacctcgaagcaatcggcagccagatcactgacatggagatctcgaaagaggccgatccatctgagttcgtcaaatcgatcctcccaatccttgagcaaaacggcgtcgttcacttcctcgggttcggaaaccggctgggcttcgactcggtacctgttcatctgcagaggctgaggtgcagatgcaacttccacgctctcaagttcgtcccagagctccagcgagcaggctccgtgctggtccagcggctgcgccaggtgggtgggatgcagaccgagatggacaagcagctgttcggcaacaacatgctcgaccaggccttcgccgagaaggacgacggcgccgacaccggcaccggcaccgccacgcccaacaggtacctcgccctccatatgaggttcgaggaggacatggtggcctactcgctgtgcgaattcggcggcggcgaggaggagaggagggaactgcaggcctacagggagacccacttccccacactcgcgctgcgctcccggaacaccacggtttcgccggaggagcagcgtagcctggggaggtgcccgctgacgccggaggaagcgggtctcgtcctctccgcgctcggctacgaccgccggacgtttatctacgtggccgggtcgcagatatacggcggcacgccacggctgcggcccctgacgcggctgtacccgaatctggtcaccaaggaggataccctcaccgccgacgagctggccccgttcaagaatttctcttcacggcttgcggccttggacttcatcgcgtgcgcctcggcggacgtgttcgcggtgacggactccggcagccagctgtcgtcgctggtgtccgggtaccgcatctaccacggcaggggccgcgcgccgacgctgcacccgaaccggaagcgctacgcgcaggtgctttccgaggaagggagcattgcgtggggcgggttccagaagagggtgaggcagatggtggacgagtacaagcgggtgagcccgcgcccgaggggccggagcgtctacaggcagccgaggacgccggggtgcatgtgcagggccggcggcgacggcagcgtccacttctgacgcacgcgtttgcagcagcgtcggtttcttggggatcaagcggccggctgctctgttccattaattctttcctacacgtttttttttttgcatagattttatgctccttaactttggtgggtccttttagcagctcaggatacgtggcgggataggtgacaaattttgagtcctacggcatggttcttacttcttagaggttctaaacacagctatacgcctttaccgacaggtttggtgtacatagggaaataagtacaaaatgttgagccgcaaaacaggcggccgga

SEQ ID NO: 27249 - DNA, 3874 bp, Zea Mays
ctaggatttgaagctagggggtccaattagtcaattttttaatatcataaataacaatcaccaatttataaaaaacaaatacaaaagcttaatagtcttacaaatgtcttcaaatccataaataagaaaattgtctcaaagaagcttacatagtagatagatagttcaataagattagaatgctatttcttcttatctggcctacactttctaatggccataaaagtctattatatcatcttccttcacatcaaggaaaatatctcgctcaatgaaagtgaatagacaatcatccaaaagagtatcactcatcctatttcttgacgttcttgacaaatttcattgctgaaaatgctctttcgatacttgttgttgccaccggtaaaatcaataccaacttgcaaagcgactataccaaaccataaactttgtccctctctatttcaatgagcttacatgagagatcaacaagattgcctttaaagctatcatcttttcttaagtcatcaatatagttatcaagttctgtttcaaatcttagcatgccatttcttgaaagatcattagggtaaaactccacaagtctaagtaccttgtggacatcaaaataagtaaataagtttgcattgaaatcctaagccatatgagaatcaaaagaaacaaataaattgaaacaatctacataccttagtgggatcaaaagaagcaaatgaattggtcggactcaaggccgccatacaagaaatcaactccagattaaccacatcaaaccgagcatcaagatcttggctaatttgatcaatgatgtcaatatatacttttcttctaaagtgatcatcatttgtttggtttgtaacaaaacattttgatcttccataaggcacataattatccttcgttgcaagaacttggacgccatatttattgcaaaaagtggccctcgaaggaatgcattatttagttcatcacattcaattgttttaatccccttccactgtctagttcatcacattcaattgtttttttcgcattttgaagattaacattttgaatcatgtcatgaggtttacaagaaacctcaacaatatttagcaagagagatacttgatcaaaaaatcacacacaattattatttccctagacaataacaagtagttggagttgatgtgcaaaacaatggacataacaagttgaaggtgactctttcatgatcaatgtttttgagccctttaatctcttctttcatgttgctatccccatcatatccttgaccatggatttgtcttatagtcaaatgatgtctaacaattaaatcttgaattgattacttaaatgttaaagaattagtatcatgtacatgcacaccactaagaaaatgttcacaaggccttcccagtttatcaacataacacaagcaaacaactaatggttttttgtgtgatagttcacttcactcatcagctagaattgcataattgtcatcaccaagttctttaataattttatttttagtttctatggcacaacattgaataatttgcttctgtatatctaggcaaatcgatgtgcaattacctgaagcattattcaaaacaacatgcttatccacatcttgactgtttgatgcaagctattttcaaaagttcaagaaagttttctctattgctatagcgttcacttttatcattatcacggaatgacaaaccttgatgcaaaagaaacttcaaacatctaactgaataagtccatctaatcttgtaaagttttaattcttcactattcatctttcgcatttgtttatcaattcttgcagtaggattcatgtataagttatatctcttttggactgcattgtgtatgcttcttacatcacccttgcgtttttgaagtgtatcatctctgttctaatttctccatccaccgctagtaaatgtccccttccccttgtctttcttgtttctgaaaaagtagcatacaaagcaaaatgcagtttcattgttgatactatatagaagggtgggcttggtgtagcggtagagcctaccatatgtaaccggaaggtcccaggttcgagccccagcctctgcatattatgcgggtaaggtttggcgcttaaagatacccttccatagactccgcacagtgcgggaagcctatggcactgggtacacccttttttattgttgatactatattcaagccacttatattcacaaagccataaaggattaaaagcctgatctctaatttcaattttctttttcttaaattgatgtaaaaggcttgaatgtacctttaacaatgcatgctctacgaactatatcttgatcattgatagaataacttgaaatgggaattctgtttattggatcttgtggatggcgatcaggatcataaattggtgggacgcttggtgctgatggtggcggcagtgggggcgatgaacacataagatacttacatgtctcctagttgttgtctcaactgactcccttatcttacctataagtgaccctacaattcaactacctaaacatattctagttggttcaactagcttatttacccttcacacccgtcaatgatgtgaagaccctcacatatttttcactacacgtgatcgcctatgtagcgtgccggaagaagcgacctgatccttgctcacttgacataatgcccagatcacgacatggtgtgtcaccaaggggggttgacccgacccttgtctgtttaacaccatacccaggttccaatatggcgcatcgctaagcgagtcacacccaacatattttgttcggttttgtctcccttagaatggctaggtttaacgttgtctcgtcaaggctatgacagccctactttaccagagcttgggacctgctatgttgagacaacataggcggagttggtctgaatagcctatcgagttcaggagaactacaaaagcaggggatgggggggcatggcccacacgtagctctgccattgaattgaaccatctttcctgcttggtacattgaaatacttaacaaaatccatatgctttaccaacagatgacactgtacttttttctcagacaattcagtgtatggatttggctcagcaagacgaggacaagttggtaaatgtgcttctaggatccaaaaatcatataatgttcctagactgattgatggttttccaaattgtaagatagtaaatatatatgccaatggcgatcacagtgctgcattggacgaatctggtcatctgtatgtctggggaagagcattaattggacaacatgatgatgatcaaccttcggaaattttgccctccttgagtgtttctcaagtggcactaggatggcaccatgctttagttttatctgctggagaattgtacacacttggtgtttaccgccaccagaaatgtgatctccctgggttaggaaatgtattggggcagcaatcggacacaagggcaacaagcagttctcatgattgttcatcctctttgtcagtgttggagacggttccattccttgatggagaacaggtggcgcaaatagcaagtggaactgagcactctgctttggtaacaggaacagtcttcacctggggctggggagagcatggacagcttggtttgggtgacacttcggatcatgtagctcctcagagagtaaacgtaggtgacaatgggcagggcatgtccggttcatttgccgtctactgtgggagtggatttaccgttgctgtgaaatcgccctagtggctgtctagtttgtaatgcatgcaccaaattctccttcccacataacagtgaagaaataaacgacaacattttgttgtgatgccgtgaaggtagtggttggattattattttgcaaat

SEQ ID NO: 27250 - DNA, 911 bp, Zea Mays
ccacatgctggtaaggttttaggcgagaaagctattttaaccacagaggcacgtgagcttctatcacgacatcagaggctttcggatgagaggaataaatatctggtgataattgaagagatacaccaaattcttgctgaaagattggttgctgcacaacaagaaattgcagcagctgagaaagaaaatgctgaaaaggaggctgctgctcaggcagtactcgatgaacaggaaaaaatgatgaattctatcgtagaagaatcaagaaagctgcagaaagaagctgaggagaacctgaagaggtgagatggctgtgacatgtgaggacgtttcgttgctcaagcgagtggtagatgagcgcctaccgttgagcaagttgcagcgctcagctatgtcgagcctctcttcttcactgcattcttctcatcacaagagctggacttcctcggataaagccattagatctccagataagcacacccttgctgaacctgcaagcccagtggggaaagatctggatggcaacgagtgcaccgtggaagtgtcagatggcaacgacagtggtgaaggcattttgaagcgcgtggattccaaggaggatgtcgatggatgggagctttgctgaagatgttcaggaatagcggcgttgccagaggatgctgaagcataaactaacaataattgtgtataaacgcatactagcacggtgctaatctaatcgttttcacatgaatcgggaagtctcgctggctcaccacagttgtacgtgagatgagtccaactggcaactgcagcttgatgtggtatatataaaagtgaaggtttcagctcccttactgtccaaattttatgtcgtttctaattttgttctaggttaaatatctgacttttactatgtcttctaaaaatat

SEQ ID NO: 27251 - DNA, 1412 bp, Zea Mays
actccactgtacgccacgcacgattacgtgggcccgacatttgctccgtcccctctggtgcacaaagaccaggcgcacctgatcgtgcttcacctcgaaggaatcgaccccatcaccatcctcctcgttatctcgcagctaccgccgccgccgcaaaccctaacctgagttccgatccggttaatcgacgacgaggaagacgacggtgcgttgcagatctgaggggatctgacgacggcggcggagggggagatggtggtcaacggccggccgctgaagagggcgagggcgcgggtcgaggccagggacttcgcgaggttcccggcggccggagactgcggggcggccgggacgttcagggaggcggtgagagggttcctcgcaaagcatgcgaggctgctcccgttgccgtccatcttctctccggcggccgcggccgccccgccgcacctgctgatctggagggtgtccctaagggtcggggaggccggggaggaagagagcggcggcggggtagagctcaacgtcgttgaggaggatgtgctccgatcccgatctgtgtattgtgaccagtgcagagtcgtgggctggagtggacacccggtctgcgtgaagcggtaccatttcatcatcgagaacgacagtagccacctttctggccgccggcgcacctgctgcctccgctgcggaacacccatggccgctggagaatcaaggtgagaggcacatttcagaaagaaaattatataccttctcacacaacagcgaatgggggaaatggaacatgcttgtgcgttcgatgtctataatgccgaatgttaatacatgaccaactttatgccaacgtgctgtgccattgatgcctgtaatgatctggatcacccaatctgaatgtaagatgagtgcttcatataggtctgtgtttggatggggcgtgcttgcttgcatttgtaatataagatgagaattcagaagtgtttctattactatattcataggcagcacatagaaaatttctcggaatgaaggattcgccaagtaaccttgtgatgctccgaatatgcaacatactcttactctgaatgcactgccgtctccaggtgtgctctgtgcaatttcgatatggatggggaggagattgaagagtgtgcatacctgcatctggatgaccccacccacttgctgcacgctgtggtgcatgcaaatggttatgggcatcttctcagggtaaatgggcgtgaaggtggctcaagattcctcactggccgtgacataatgagcctgtgggatcgcctgtgcaaggtgttacatgtgaggaaggtaactgtcatggatatatccaagaaacatggaatggactacagacttcttcatgcagtcataagtgggcacccttggtacggccaatgggg

SEQ ID NO: 27252 - DNA, 1632 bp, Zea Mays
cttagatctattgctccagttttgcatttctttttgcgattttaccagtttctacgagaggtcgaatggatcttttaggatgatgtaaaatacaattttgccaaggagcatgagggcccacaattttgacggttctgaacttgataacaagacaaattcacttcatgatcagttctcgacacagttgtcattgtcatcattgtctaattccagtgatggcgaggagattgcaacttcttcatgtcctgacaaggggtgccctttggccatccttcatttatgcctaaagagttttaagcaggatgctactgaggaggatgcagctaaatggaagcttgacgggacctttgttctttcagacacagaatggggtgattcttcatatgctagttctctcagcgaacagtcatctacaatcagtgcccccagtacgccattcactcagcctgaggatcttgacagaacagatatctggatttcatctttagatcttgatgccgaggattgtgccttgctgccagagccagacaaggaacaatttccagatatactcggttttgatttccccagcccttctttcagcgcaatcagaagcctccagtttggttcttccagctttagtgctggaatgtttttgagcaaagaagccaacgactctgatgagccaatattctggccatttgagggcacctcctacaacagtcctgaatttgacagatttctgactctgtcgcctcgtagaaacacaatggatcccgggtacgctcaagtccgtcactcgaatccattcttgcggaggctccgtaacagcacactatcttcagtaaagaagtgcattgaactgcaccaaaggaccagaaattcagacgcaaaaggaagcgtggcgtcctcctgccaagagaagattcagaagacggctgcagttgcctccaggttaacaaaagcatctgcaccctccagttacagtcatcaccagatgccgagcatctgtcagaaaagaaggccgcctcacttgaaactcggtggtccaagaaagattacctctccacagttgcaggcagatcgatctagtaataagaagattgaagcagcaggcgtccaaaaagtagcggataagaagagtcggatcgaagagttgattggattggatgagtttgacggcaacgaaggcattggctcgggttcgtcagattaccagtttagtctatggatatctccaagatagttggtctgtgcaaccatcctgcagtaagcaacttaccatgttatctgtgaggtcagaagctaggattttgtaaaccagatagttggcctgtgtaatcgactcaacaaatccttgaaagctggcactgccgtagcaggagtgtacactacaaaatccttttggcagctgcgctggttccagaactgatggcgtacggggcgtgaagaaaagaacacccatattactataaagaaaaatatacagaaaacctgatggttccttattttcctacgtggctctttgactattgctacagtttagcatggggaaattatccttgctacgatcctgtactctcgacaatttttatttttgaattttatacagtaaggaaattttgaaataaatgtctttcatttctttgtcaa

SEQ ID NO: 27253 - DNA, 1789 bp, Zea Mays
ttgctttcttcccatttctctgtctagagtctagaccagctcatggtcgtgaacttgctttgtatggaaacatccttattttaaccaagctcacctcattgttgttaaattgagagcaagcaataagtatttgtttatttccttgtctctgtttttctttgtactggactccccctacttctgacaagaagaaaatgcaacgggcagtgcaggccgtcaggtcacacggcaatgttcttaaatatgctgttctacaacacatcagcgctcccaagccagcaatgcttcctgctgccttttctcgtttcatgtcagtttcatctgctcgcctagaggatcgtggatttgaaactgccactgtagcagatgtcttgaagtctaaagggaagagtgctgatggatcttggctctggtgcaccacagaggatagcgtctatgacgctgtcaaatctatgactcagcacaacgtgggagctttggtggttgtcaaacctggacagaataaatcaatcgctggcattgtcactgagagaggtgatgaacaaatttctgtactcttggcatctaacttttggcctgtgggtatgatgggaaaaatacaaaatcatgtaccactacctccattttcatttaactggcacccttgaccaaagtttttctgatcataaatacttgatttaagataaagctggtcagctagtgcttgtagcttgctatttgaaacaatgggcttttgaggtgtttcccaattttctctcatctctctatgttttcatagttcttgccttttcctgttcctttaattggaaaaatatcattagatgcaaaaccatattactttactgcccctttatggtgataagaaactccgacgcattggaaagggaagtatgttcggcgggtaggttgtgaatgtataactccgctttgtttttacttcagctgtgcatcatagtacttttggcatcaaagagtctcaactctttagagcactttatagtagatacaacagaaattgcatcaagttaaagtatacgtattatctccggaaaatcatagtgcagggaaggtcttccaagtcaactaaggttggcgacatcatgactgaagagaacaaactgatcacagtgaatcccgacaccaaggtcctgcaggcaatgcagctcatgacagaaaaccgcgtcagacacatcccggtgatcgacggcacggggatgctggggatggtctccatcggcgacgtcgtgcgcgcggtggtggccgagcacagggaggagctgaaccggctcaatgactacatccagggaggctactaggacggcgtgtgcagcgacgaccccctccgatcccgccagtcagtgaagtccgcctttgaaatccaataactcggaacaatgatgatgacgaaataggccgtgttttcttggacaatgatgttaagttcggcaaggttttcctttctctttttttattctactgcgtggtctatgtgtatattgccaaaggcatgcgtgagccatgcgcccggtgctggggcgcagagaccatctgatggtggaaacaccggaaataagagcgtgccgctgtgtgtttcctttgaaggaataaaaatggtgttcgtgttgtgcattgcttattgttgatgttcgctttggattaaggccttgtttatgaacggtacggattcagtgcagtactgtacgtgcagaactgggaaggctttactttatgaattacatcttctgtttttagcttcatcatgaaatattttcaacagattcgtatttag

SEQ ID NO: 27254 - DNA, 879 bp, Zea Mays
gctatgaagagaactctcttctcagcttatgtgggctaccaaaatgttcgtggggcttatgatgatcaaaatttgggagtttcctctcacttgggcatgaccacaataagctcgacagactttttatgaagggcccagaaggacgtggagaggtggaagtagctgtctctggcattgcagatcagagcagtgggaagtcgaagaaagatccaggagatagctttcgagtccttgttcacagagcagcttctgctgcatcaaagctagtgaagcatgcttatgagtcttcatctgctaacagacaaatggatgatgagcttgtccctctgaagtgttgcttgatgtctgtgtctcttccttgggactacattgcccacgatcttttgcacaaggacacacctccgatggatctgtgatagcaattccagatcttcactgccagtcatgggaggaatccaggcgtgatgagatgcaaggtaaagaatcgaagtggaattaggatgtagatgcttttagaccaaatatgtgaagtgtagggtttgtaatgtgcttgtgcacaggttaccatacaatgtaaatacaatgtacatatcatgcatgccttacagaacttgattgtatttcttgaacttgctgttttttccttagcaaataattcttcaatttgcattgatccatagtaggtgctatattcttatctgggatgtagtttgctctgcataggtataactgatacgtaactatgactatttaactagagtggttttgagtgaccaagtgttagctagttagcaagtatttaatttaaaaaatagtaaatgaaagggatctaaaataatctcaactgtccttgtatttttatttataataaagtataaa

SEQ ID NO: 27255 - DNA, 1573 bp, Zea Mays
aggagatcacacacgtgtagggcgtcacgaggtgggtgacagcgcggttgtcgagtcggtggcatgccctataactagggcattggaaggaggcagaaggggacctagattcattataccatgtaaacattgggaaatcacctcacaccctttgggggggggtgcaactcatgttagagtaaaactttgtctctagtaggtctagtagggagtactgaatggatagtcaggtaagcagcatccttgttatcaaatcctctataaatactgttaccctaccccaccgtcctttgccagtgacagaagatttttgtatttctgtttagtccagaaacaagtactagtttacactctgttagacagatacaagtttataagcatacagtgttggcgcttaaaagagaatgggttttataatcattagttgatcaacatgtatcaagaaattgaatgaacatgtttttgctatcatctaggttatgaacagtttggaatctcaagaaaaggctcacaggacaacactgatgaatactgcacaatattctatgaaaaggagaaggtggagcttactgaaggtggcactttttggttgtcggaatcaccatcggttccaggaagcatttcatggggagcaaaggcaccctgcattgcaacatgggcaatatcctgtaatgtgattctttttcttgctctttattgttctattgttttcttagtatcttgatggcagtgaagattgttgccttaacatgatgtacacacgtttcaactcaaaagactagaaccacctggattcagtttccagatcgtaaatacaaatcttgatgaagttagccctcgtgctcgacgaagaagtgctttacttacatggcaacatatagcatcgctgccacccaatttgcctgttatctattgtggaggggagaaacaaggtgccctggaatttcttaaattgatatttagagctctttgcctctgctgggatcgacagacacaggacttgcatatcgactggatcttgtttagaggacgcccattggttcctgcactttgtgaggtcattaatgacaatatagatggtgtttatccgtcgtcgcacttccctatctttgccgagtttttgcttccacgctcagtccgcctagctgagacaccttcatagctattgtgtcaattttctgttctatttttcccaatcttattttgattacggctgattgtttctttcgaccacttcaccatgatcttgcggtaacccccctttacaaccattgttgggtttctttctgttatcccattccgcaaaacaagacaatgcacatgtgcatccttgtatgtttcctgtcactagtccctattatgtgttcgccttagctttgttatcttcttaaagttcactttttccttatgtcattgatttttagactgtcatatataccgtgtatatatatggtatgaatatgttgtcatgtatagtcggccgatccttgtatatgttataccgttatatatgaagtgtgtatagagatattgggagatttcatttggttctgtttccataaaccatgagatc

SEQ ID NO: 27256 - DNA, 3836 bp, Zea Mays
cggtattctagctcgggctcggtcgcctcgccacagagatccattcatccgtgtgccaccttcttcggcgcagcggcggttgctttgcccgatctcaacccgcgtcctcgtcagtcctcagttcctcacttctcccctcctcggcacgggccacctcgccactcccgagtccgggcccgccgcgccacctgaccgactcgaccgcggctcgcatcgggacgcgtccgactcccatgtaacagcagctggtcagcaacaacgagcagctcctcaccctcactggcaggacccgaccgactcgccctttgccgctccgctccgatcgccgccgccgcggggttgcattccaatgtggcggcgcggggcgcacgccgacgccgcgcaccatctccccaccgcgggcccgggagcgtcctcctcctccaccgccgccgcctccgcgggcgcggccgcagcgcggagacggcggcgcccagggctgccctgccgcccgagccacctcttcttcgcgctcctcgtggcactcttcaccgcctccctgctagtggtctggcagctgctccccatcggcgacggcgacgcagcggagggggacggggaggcgccgccgcgccttcaaggaggcgaagccggaccgatgcggttctcgtcctccagcctggcgctgcgcgcgttcgacggcgagagccggctcgaggccgcgagatccgggcggcggctgtgggccagcctcgcgcccgtcagagtagcgctcgctgttggaaatatgaacatagatgcacaatctctgatgcttgcaactgttgcgaaaagtcttgtgagtctgggctacgaggttgaggttttagcatttacagatgggaaagctcgtgatatttgggaaaatatttgtcttgtaaatgttgtgaacactggggctttgaaatctgttgactggtcacagtacaatgctgtgctagtaagctctctcgaagggaaaggggttgtttcaattcttatgcaggaaccttttcggcttctaccagtgatttggcttatacatgaagacactcttggacaatatcttagaagttatgcaaagttacatgattctattcaaaatgtcattgaagattggaggactcattttaatgcatgcgcttatgttgtttttccagatagctaccatcctttgttgtactcgcctcttgattctggtaactttttagtgatttctggttctccagttgatatctggtctgctaaaagatttggctcatcacattctgacgaaactacaagaaagcagcatgggattgaaaaagatgatgttgttattttggttgttggaagctacttattttttgatgatttaccatgggattatgtcacagtcatgcgtgcatcagctacacaaattttggatatagcaaaaactaaaaatctgagggtgcagtttgtttttttctgtggaaatggctctgatgcctacaactctgctttccaggaacttacctcacacatggggttacctgatgtctccataaagcgattttctgtgactcatgatattagaaacctgttaatgtttgtggatgttgttctctatggatctttaagacaagaacctgtcttccctcctttgttattgctgtccatgtcctccgaaattccagttgttgcaccaaatcttactgttataacaaaatatgtcagtgatggtgtccatggattccttttcgattctgctgacccaagcacgatttcttcagctttcatacaaattttaggagaaaaaaagcttttggatactgcctattctgttgctctggaagggaagctactttccaagaacatgttagcacatgattgtatcaaagctcatgttaagcttcttgaaagtgttattcattttccttcttatgcaaaattgccatcttctgtttctaaagttcaagaacgaacatggttgtgggatcctttcgagttgaaagctgcactagaaaatagtttgttggaagatgaaagccatgccagcacaaaggctgttgatattcttagagaattctctcaaagtaaccaaacaacttatgctgatacaaatgatacttcttcatatgattaccctcgtttgtccgattggtatgatttaggtgaaattgaaatctttgaagacattgagaggagagaaatggaggagattgatgaaagggtggaaagacctttgttatcatgggatgaagtgtacaaaaacgctcgtaaatcagaaaggctaaagtcagaaggaaatgaacgtgacgaaggtgaactagaaaggactgggcaacctgtgtgtatatatgagatctatagtggagagggggcatggccatttttacaccatggatctttgtatcgtggtgttacactttcgaaaggaggaaggcgaccaagatcagatgatgttgatgctgttaccaggctttcagttctagacaacccatactatcgagatcttctttgtgaatttggtgctatatttgccattgcaaacagagtcgatactgtacataagttaccatggataggtttccagtcatggcgggctgctggaagaaaggtatccttgtctgaaagagctgaagaaaccttagaggaaattacatctggagaaagtaacgaggatgttatatactactggtcaccaatggatatggaccaaacttctgacttttggttgacatgtgattctctaaatgctggcaattgcagatctcttttcgaagatgcatttagggctatgtatggattaccagagaatgtcttggcccttccaccaatgcccaatgatggtgatcattggtctactcttcatagctgggtcatgcccaccccatcatttctgaaattcatcatgttctcaagaatatttgttgattcacttcatagcttgaatgtgaatagtactgaaacaacgtcttgcttccttggggcatcagaacctgagagaaggcactgttattgtcgaatcctggaagtccttgtaaatgtctgggcttatcacagtggaaggaagatggtctaccttaaccctttcactggggataccagtgagcagcatctgctcgataagagaaatgggatgtgggtaaagttcttcaatttcacccttctgaagagcatggatgaggatctggcagaagaagctgatgatggcatgcatcctggaaacgagcagtggctgtggccattgactggtcaggtgttctggcctggtattgctgatcgggaaagggaggagaaatacattaaaaagctggataaaaagctcaagaacaaggtgaagttacttgaaaggcagaagtctggttacaagcagaagcccctgggacaatgaccatgactgaagagctaacaattcaagatttttttccttgccacgtccggtgcatgcacgtggaagaagagttggagcacaaaaggcaccgctgttgtgaatacgcattctttctacacctcattgatctccctctccaaagatgtttggtgagtctggaggatattgtcaggatggaaaagcaccattttttttcctgttcgtataaacagattagataggatttgtttggttcgctgtctaatttaccacactttgtctaacttttttgtctaagtttagtttttcgatttaaacgactaaccttatgtaaagtgtgacacagttagccacgaactaaacagacctgtaatgcgccatatagttgaactgattcttttctttgctttccccatccgccatggaaagtcagctggacgagcagcaaaattttggtagggtgacactaaccatcgttgtacatgtaaatatctagtgctgt

SEQ ID NO: 27257 - DNA, 1271 bp, Zea Mays
gggataaattgaggcaagccttccacccacaaatacggagagattgttttgaacctgtgacctagtgacttagtgaaacaactctcaccactgcatcagccatcagacctgcccttccttttggctttctttagttcttcacaaactattgaatggtggttcaagttacacaatggcagacatgacatacacagcgtcgtttatctgactattattgttgaagacattgccacattggcaatgggttagaaacagctgactattgtatgcgtgttgtttaggtgaagattttagcgagaaaaggtccagttatagctttacaaaaaggaaattacttggttgctcaaagacgcttcaagtcttgttttggtgagcattcattcggctggacttattgtgggtctcataacttcagtccggctgcatggggacagccgctgtctcctccctccaaagcaaatcctagcaaagccagatcagcaccttctagtccaatgctacacatttgcaactatgagcttggcatcatactcattgctctgccaccaggcatgtcaaagcatgcaagtgaaagtaggcacaggatcgaggacatcgccctgccctttgttgtccctccaccgcgatataaggggagtgataagccagccactcggctagccatgcgagaggctgtggctgaggcttgtgttctgcagggtaacgatgttgtagatttgccagatgatactgacgaagatgtgccagatgaagacgatgagcaggtggttgagctatctgattgttctcaacaagagaaggaagaagagaagatttacgcagagacgttatgggggcaggtagattcttcacagagcctggaaaaggattaagtgaagctggcgtccagttcttggtgtagtcctatggatctatttcgccctgatagttcaatggagagggattataaaagagagtacagtacccaaggttgatatgacagtcatttttgaaaaggtgttggaagcttcggattcgcatattacaagcgaactgaactttgtgaaggactgttgtattgtctgtcgaccaggaagagaggcggccagagccacgattcttcgttgccccatttttaatgtttacatttatgttgtgtagatatcatgtaatgtttacatgcattctattttttaagaatctattcttgcattgaaaaatatggtttgctcattcaactaatgagagaatgtatacatgatctgctgagtgaataacatactgaaactgta

SEQ ID NO: 27258 - DNA, 2217 bp, Zea Mays
cccatagaggtatggcattgtagccgacggacgaccgacgcgcaccccccgccatgctctccagccgaaggatcacgccgagaaggttgctgccctgaaggatccgcccgatgtgctagacgttgctatcgttggtggaggcatggtgggcttggctgtcgcttgtgcattgtcaaatatgccgttaacgaaacaccttagagtcgctattatcgatagcaatccagcgctgaagtcaaggagttacctggataaaaacagtatacccgattctagggtcagcaccgttacccctgcaaccatttctttcttcaaggatattggcgcctgggagcatgttcaacagcaaagacatgctttctttggtaaaatgcaggtgtgggattacactggacttggatacacgaggtataatgctagagatgtgggcaaagaacaccttggatgtgtggtggagaacaaggtgctttgcaactcactgctcttacgtttacaggaagaattggatgatattgaaaatgtgatatatcctaccagattggtgtctcttactttcccgttgaagaccagacaagcaggaatgaaaccaacatcaagagaaccattatctgttggtcatactacagaagagttccatcgcagtcatttagttaaacttgatctcagtgatggacggagtttatattccaaattggtgataggagctgatggttcgaagtccaatgttagacagattgcaggcataaaaacaactagttggaattatccgcagagtgcaattatctgtacagtagagcatgttgtggaaaatgattgtgcgtggcagaggtttctcccttctggtccaattgcgctacttccgataggcaataacttcagcaacattgtatggacaatgagtccagaggagtcactgcgccataagtcaatgagcccagaagagtttgtgaattctgtgaaccacgcattggattttggttatggtccgcatccacactctaccgctcttgaccattacatggaacagttcttttctggcattgggagcagtgcagcatctacaaaggaatgcttcgaagtgccaccgaaagcaacccgtgtagtttctgagagaatggcgtttccattgtcgttgatgcattcccatgattatgtttccaaaaggttagcattagttggagatgctgctcatactgtccaccccttagccggccaaggtgtaaacttgggctttggtgatgctgctgctttagcaaaagttattgctgagggagtttcagtgggctcggatgttggggatctgactttgctacagcggtatgagaaggagaggaaggctgccaatgtggcgatggcagcagtgctagatggttttcagaagatgtactctgttgatttggggccccttaatgtagtgagagctgctgcgttccacggtgcccagtacatatcaccactaaaaaagaacatcatctcttatgcaacgggtgacacgaaatggtcactatttcagtgaacagcactgctttgaaactcttgtcctcacctcgttctttgtttcggcatgtactggaaacaaagaacgcaatcagtaatttcgttcgaaagacatcctcatttgggctgtttggttactgggacacgtcaagcgcccgtctcgcgctagcctggatccctgggaacgtagctcttctgcgtttctgctcgtacaggccagcgaccaaaaaaagctctatactgcatgcgcgggtgcaagcagtcgtcatgcactacagtcatccaaacacgagctcagcatggtcaacgtgacgccgtgggcctagacgccaccagccaatcaaccaatcatgcgaattgtgttgctttcgatcttagtgttaatttgagcgcccgaggcccgacctagtttgtgaggttagtctctttccgtgctcactttgtatttgtactagctagagatataatactcagcgcgttgctacgtgagttgagttgctgacgatttaaataaaagtagactatatacaattatcagtacgaaggagtaaactattccctgtgccctaaaatataatttgttttagactaaacacatatgtaatttgtatgtaagtctacaatcattattatgattcattcgcactataaattaatattaatggactctggcatgttgacgtggacagcaaaatgctttgttcttttttttttaatttc

SEQ ID NO: 27259 - DNA, 500 bp, Zea Mays
agcagaccgcacacggcagtacggtccacacagacacagcgcggagccgccacttctcttctcagcgctcccaatctggcggcggcggcacgccggcacccacccggttccaaggctaagagtgttgctattcctaatatggtttatgaaatggatgaacttgaggctcttgcaagaaatatttcatttgaggatgaagacctagatgatgatgatcatgatgatggacctgaggcatcgttgtaagcttgttgatgaagatctagatgataataacgtaccatgaatgctatgaatgtttcttattgtacttgctccgtaatgttttgtgaccttgcgaacttgggacttgtggctttgtgaactttatgatgaacttgttatattgtgtacttgtgttctttgtgatcaacttatcatattgtgaacttgtgatctatgttatcaatttgtaatattgtgaacttgtgatatttgtgatcaaactattatattgtgaa

SEQ ID NO: 27260 - DNA, 1129 bp, Zea Mays
gttttctgaccgccaagataatttgaatgattcaggggatggtggaggagccccagtattcaaatggttctccgtattagaatttgagagtcttgcccaggagcttgttcagatgtttgtttcagagcaaaagttgaagaggctgctactcttggaatttctctcgattgctttaaaggaaggtgtagaactccagacatcattaaattggggtgatgaactatatgatggtgaatcaaataaacttcagagtattggccttcagtcaggagatgcctactcaccgcctgaaaattggtgtgcagaacgtttagggagtcagagacctggcaatctccctctgcatgaagttttacaggtttatttaaccacttggcatgctaatatgaacatcaaccggagtagaattggtgaaatatttgagcttgttgaggaggagatgaagattaaactgtcttgaagattccgattcattttgttgggctatccatcaaggaagaagaaatggaaaagaaagatcaatcagttcactattcaccaggattctatatccagtgtctttatctgccttagtagaagccttcagagcttacctatgatcttagaatatagtactggtctccttgtgacccataatttttttaaaaaatttaatgttgggttacactggaatcatattgggaagagcgttggaccaacatatgttattgaaatgagatttctaagttatcaggatcattcgcctagcttcagggtttagatgggcgtcgaggcagcaatcgaggcaaggaggaggcgggggtgggggatgctacaccgaccgtgacgtcgcctactgtcttggaccttctgtgcgccctccttgacaccctcgacgctccacggagctcggaggcggtgaccgtcgaggaggtcggtccctcgaggcgacccggggaaccggttgaaaagtacatcatcccgcctcctatcgttggggcgggtggcgacctcgttcgtgccggatcggacctctcgacatggggagggccgaccctgaggtggatggccaccgagggcaacccctacttcgtccttaatgacacggaggagagggagatgtgggcggagtttcgagcaatggctcagg

SEQ ID NO: 27261 - DNA, 1069 bp, Zea Mays
gccatggctgcctgcccaccgtcctcccccaccacatggccagtccagcgcacagatatagcagcaatcacttaatgctagctcctctcccccgtgagccgtagcttcactctgcatgcactccggccatgggcccatggctatataagccgctgagctgcgatgccacagcaccgcgcggcctcaagcagctcctttcttcagcagcacagctagctagccatggggagcaagggggtggcgctcgcgctgctgctctgccttagcggcgcggccgtgggcgcgtgggctcgcccggtcgccaccaaggacgctgctgccgacgagaagttcctgtggctcaagaagcactttggcaagggtggtggcggcttgggaggcggcggcggaggtggcggcgggctgggtggtggtgttggccacggcttcggaaaaggtggcggccttggcggtggcatcggccatggtcttggtggtggctatggtaaaggtggaggtcttggtggtgggatcggccatggcattggcggagggtatggtaagggtggtggctttggaggaggaatcggccacgacattggtggaggcattggccatggcatgggcggtggccatggcaaaggtggtggaattgggcatggcatgggtgccggattcagcaagggtggtggtcttggcggcggcgatggccttggcggtggaagtgggcatggcatgggtgccggattcggcaagggtggtggtcttggtggcggcggcggcggaggtggtggcggtgggtttggcaaaggatttggctttgggtttggcaaaggcagcgggttcggtggtggtggcggcggtgggggcggcggcggcatcggtgatcaccattgatacgtcagcatgcagcatacgtctcctctcgttctatcacttacttttgtattcgttcatgcttcgtaccttgtcatgactatgggtgatggtgatatccttcacagtagtattatgtgtgtactccatgtaatgctcgctccctaaaagattcgagaaatataaatgaagttaatgcttcgtttgaatttga

SEQ ID NO: 27262 - DNA, 1667 bp, Zea Mays
tatcaatcgaattaattaacaatactggtgtggcagtgccgaatatgaaattccgggtggcatgtttatttactctgaaatgtaatcagtgtctcattagtgtgtcgggcttactgttccctagcaataggcatcaagggcctgtttgggttggagtaacttcaaatgaaaagcataggaataagaaaacagaggaaatatagttcatgtgcatttggaatggaggatacaaccatccatttcttattgaatactgcagtgggggcattgggcccccctatgcgccgcctcttccacatgctgcggcgtctaccaggttctgagaaaccttcaagtcgcctgtcagcttcaaagtgggaagcaaagcgagaacatttcccagtgcgcgcacggcctgaggtgacaggtatttatatcttatgggaagaaatccagtggtgagctattgctttcatatggttttgttccaaaagagggaacaaatccaaatgattcagttgaactgttggtgtctcttgataagtctgataattgctataaagagaaattacaagcactgaagcgaaatggtttgtcagaatctgaaagtttccctttgcgggtcacaggatggccagttgagctgatggcttatgccttccttgtggtcagtccacctgacatgagtcaatgctttgaggagatggctgctgctgcatctaataaaacttcatccaaacctggattgaattatcctgacctggaagaacaggcccttcagtttatcttggactgctgtgaatctaatatagaaaaatatacaaagtacttagagggtggcgctggctctccagaagttccaatgaatgcaaagcaagccaacagaacattactgctaaaacagctagcaagagatctgtgcatcagtgaacggagaatcctgtatcgcacacaatatatattgcgtagaagattgagggacatgagaggcggcgaacttagagctctgtcacttttcaacgggctgagaaaactctttaaataaatggatcggctatcttatcttggcagatcttactggacagatttgatttctccagtaacatggtgctttgaccttgccgccaaagcctcagatacttgtatgccaaatcagactgcagtccaggctctcggccgcaaatttcatctagatgctagaaacaagtaaaccttcgatgaaggatagctgtgcgttgagattgaacaacccagagcttatatgtatgtgtgtaatgtagattcagtccaaccatggagtcgttttacgctaggtgcgagcctggccttctgttacgtatataattataaatccagtagccagcaaggcaaccccccacccccatgtgtacacaggatcgatctcagaacagatgatttggttctcccttcatcatgcttcaactttgtccattacccccttctcttagctctcagactgttgtggaaaggggacgctgaaccggatactgccattaagcattgcaagctcccgtagctgctgctgctacttcaaaacgtcatgggattcatcctgcaaagtagaaaacaggaactatcaggtatcagttcttcaagatggactaagagcaagctacataggagtttaaaagataattgtcagatcttaaacgaaacccgcgggcctg

SEQ ID NO: 27263 - DNA, 5446 bp, Zea Mays
atggcctcacccacggtcgcctccccgatccgggcgagccccgtcgacaaccccaccgtcgcgccctcactggcctcctgccgctgcgccttatcgctagatgctcgacatccccatccgcgcgctcgaggcagaggccagggacaccaagatgagcccgaccgcgaccgcctagccatcagctccaaagaagaagccaggggaccgatggacgtcagtgttccgtcgtggtggcccgctagatccatattcagcaagaaagatatctcgccatgccggcccagggccgcagcccgtcaccttcctccccccgcacccgccgtgacagccgcctccccacgcccgcttacccgactggccgcacaagatgcccacagtggcccccatcgcgcccacccgctccccccatccaccgcgacctcagccgccacgccgacgccatccccgtcctctagcgcgttgtcgccgtcgtcacaccgccaaaggtgcctgccccctgctaccgaggtcgacgaccagcagcggcaagctgccgagctcgacgacacgcacgccatgcttggccatatggacgagtccatcgcctgctacgagaaggggctccagatccagatgtccgcgctcgatgagcgcaatccctgcctccctgagacctgcaggtgattgacaaggtttaggaggaaacttccaaaagccggtcaagtatggagtgcttaacatcactttggcaacttatatttttttacatgtttgctttgtttgttaacaacataatttatgggctgacaatgtgatcatgtattctttctggtagtcttcgtgtcactgcttgcagttgcaggggagggatcatggctttcttttattttccatgtgcaatgtttaatttaggtgatgaactccaaagcttatcccattgttttctagcaagagctaagcaatactggatggagaacatttatctttttaataacgagtaaaagcataatggcatgcttgtgtttagttctctgtttgttgaccaatcgctatatttaatcttgattttttttatctataacttgaatttcaaagattcaatattttttattcagacattttctcttctctagatattcttttatgcaaataacgcggttacactagatcagccaacattctgggaaataagctatatggtcagagtaagaggttcaagagttgatagttcaacaactttaactgagagcaaatctacaagaaaaaggaaacaagcaacctggaacctacaactgcaggagcttgcttgaaagtgaacaatcaaggttgtgtgtatatattatgcccgacatttttgaaggatattgcgagggccattgtatctgctggaaaaatcatttcaacttgtcgaacatggtattaggatacgaattggagtggtcaacagaaattctggacagatatgtcaaatttcagaatccacgatggtcctccaagaaataaagatgctcttgatcatctattgagaagtggaatactaattttttgctgcagcgtgatggataaaggtttttgcgtattcttgggtttttttcctttcctttttggctacacacaactctttttaaatatacattcagtaggtggcaatgcctcctatttccctaaaaatatagcgccaaagagttcaaaattgaattctcataatctgctattaggaaaagaggtcaacttctatattttttacatcaggtaatttggctataatacaacggcatgctgaggtcaacttctgtatttttttctgcaagtaacttggctataatacagcggcatgctccattctgaagctggtcaagaaataaatatagcacttgcaatattttccagtagtcaaacctctccattacttcaattctcgttctcatttttgactatgttcttcatgtcagttcaacataataattaagaggtcgcttgcccctgagacggcttcatgatccatcgaagatggcgcttaatctcgagagctagggagatgaaatgccttttgtacatgatggaaggaaacaaattacgtacatgtatatgtggatcgaattgactgttgcattctgcctgtatttaagcaacggtttccacccaaaacgtctataatttggtccttcctagatgtgtcaaatgtgtttactgcactgcgtttgcttttgtggcagcgccctaatagttgtttataaagtctgatgttaacaaactattgtcatgctatgtaatatatagtcttaacatgttggtttgttgagtgttcgaatatcagttttatattattatgtcaggtgttattagtgttcaattttttaagttcttgttgtacatcctatcattacatgagacaatgttgtgatgtttacaatattgtgttatgtatgttatatcattttggtattatagtataatttaatttgtatcagtttagttctgtattggttgttgccaaaaaaaattatgagatattaaggtcgataataatgttcgtttttatataatcgttttgcactaatattttgttaatttttttgtataccgttgcaacgcacgggcacctaactagtatgagactatgagtacatcaagtgcattcccttagaactcttgttgtgtaaaaaaatgtgtaacatgtcttggtacagagattaatttggtttgtgttttttagactgcaattatatctgggttctcagccttgccatggttagtcaagcccctctatgattttatcagttgattcaggtggttgattatatggtggttcagagagctcgaggtgaatcacagagtacatatagatctctccactccagtcactatgttgggaatcctcagcctttggaggaatcatgagtgcatacttcagtggttctccagtcacttatggcgtaagatttgtctttggtgttacagcacttttgccactgttccgagtagcagagaaggacaactctggcaaactgtgaagaaaataaaagattttcacaagcggaatcttcagaatctgaataaaggagttcgtgggaatcagttgtaccaaaaactggttcagttttcgtattccaagcatactactggaagttcacactgatcggcgacaaactctcgcccaaggagaagttgaaggaggatcagcgtgaacacccactgaaagagagatggagttgaatgagaaatctgaaaagaatacgcaagaggtagatgagaagttccaaaacacaaacttgtatctcaagaacttagagatggagcttcgggagttacaagtgcttcataagcaatcagatagatctgaaagttttactgtgccaacacatgcacacactggtggtgcctgcatctagctattcagatcaaagcctgacaggtaccatagggcaaagtgaagaagaaacagaagagttgagcaagatcacgctagagaataaggatattcagcttgatatcaatataagagtgtttgatggagccgaccctatggagctgcatgtttatgattttaaaggacctggtgtaaccttatcaatgtacaatagcgatgaggccttttgctaagtcctccatggatatggctctttcaaaaaagtcgtctcttcatctcagcaccaagaatacaatcatcaagaagtatgacgacaggcatggatcatctatgtttctacaagctcgcggtcacatttattaggccttttgctaagttcatggatatggctctttcaaaaaagtcgtctcttcatctcagcaccaagaatacaatcatcaagaagtatgacgacatgcatggatcatctatgtttctacaagctcgcggtgatcaacttgctattgggaaagaaactgcacgtcgtttgggaatgggtactaatatgtacccttcctctgctttactcagacagaataaggatgagtcaattgcttccttgccaattgatgaattgatcgagaaggctgatggctttgctggtgtctttccagaacacaagtatgagatcgtgaaaggcttgcaagcaagaaaacatatatgtggcatgactggggatggtgtaaatgatgccccagctttgaagaaggctgatattggtattgcagtagcagactctactgatgcaactcgtagtgcttctgacattgtcctaactgaacctggccttagtgtgattattagtgctgtgctgacgagtcgggcaattttccaaaggatgaagaattacacgatctatgctgtatcgattaccatccgtattgtgcttggttttatgcttcttgcgctgatatggaagtttgacttcccaccatttatggtcctgatcattgccatcctcaatgacggtaccattatgactatctcgaaggacagagtaaaaccatctccacaaccagacagttggaagttagctgagatttttgcaactggagtagttcttggtggttatttggccatgatgactgtcattttcttctgggctgcatacaagactgactttttcccgcggctgttccacgtcgaaagcctcgagaagaccgcccaggatgactttcagaagttcgcctctgccgtgtaccttcaagtcagcacggtcagtcaggcccttatcttcgtgacacggtcgcgcagctggtcgtttgtggagcgtcctgggttcttgctggtcttcgctttcttggtggctaagctgattgccactctgatcgctgtatatgccaactgggcgttcactgcgatcaagggcattggatggggctgggccggtgtcatctggctctataacatcgtcttctacttcccgctggacatcatcaagttcctcatccgctatgcgctgagtgggagggcatggaacctcgtccttgagcagaggattgcgttcacgagcaagaagaatttcggcacggaagaaagggagcgcaagtgggcgcatgcgcagaggactctccatgggctccagccgccagaagcatccatcttcgagaacaagacgacattcaatgagctgaaccagctcgcggaagaggcccgcaggagagccgagatggcgaggttgcgagaagtgagcaccctgaaggggaggatggagtcagtggtgaagcagaagggtctggacatctagaccatccagcagtcctacactgtgtgactgactgactgacgacgacggggtttatagaggtttcttcttatactatacaatctgtactaggtagcaataaggatcaaggaaggaacccctatatattggctgcggttcgcaggaaatgaatgatggtaatatttatgatgtcggtgtggtgcttctgtcgccaactctcgaccatactaccctcaactcacccccggcaccaccggcaggcattgatattcagagatgagatcacaatgagtcgacgaagtctgccaatgcaattggtgctggattcatct

SEQ ID NO: 27264 - DNA, 2850 bp, Zea Mays
cgggcccaccgcgcagcgagacggacgggctccgttttaccgagcaagctaccccgcagaccgcagaccgcagacgtattaaaagtccgtgcgagccgctgggatccgaaaatattttttggcgcgcatcccaacagccgccgccgcttcccgtccaccggcaccgccgccgcaaccctgttagagcttcccttccggtcgctggagtgcctggttccggccccagcagcggtttcgggcactgggttgggagtgcttggaaggggagaaacatggacggagtcgccaagccgtccacgagctcggggtcgggggtcacggatagtgcctccgccgccgcggcctccatagatgagaggttcgccgatctgtgcgagagcaagctgggactagacgacagcatgacgaggcaggcaatgcagcttttcaatgagaccaagaacatcaagtccagcatgtcttccttgggcggtggatcgcccgaggaggtcgagaggttctggtctgcctgtgttatgtactgtgtgtcaaggctcagcaaagcgcggaggtcgaaggaaagtggcagtgtctcactttgccagattttgagggcatctaagctgaaatgccgcaattctgcataaaggttgcacacattttgactggcctatatggttcagattgggaaaagaggcttgagttgaaggaactgcaagcgaatgttgtccatttaagcttgctaagcaggcactacaagcgtgcatatcaggagctattcttgccaaatgatggaaagtgttcagacagctcttcagaatcaaacaaccaagaggtttctgattattatcgctttggatggttgctctttttagtcctaagaatccaaacattcagcagattcaaggatcttgtgacatctacgaatgaactagtttctgtgttggctgtacttatcattcatattcctgtgcggctaaggaatttcgatataaaggattcatcctactttggtaagaaatcagataggggagtcagtcttattgcttctctgtgtgaaaaatatcatacctcagaagatgagttgagcaaagcactggagaagacaaatactctcatactggatattttgaaaaagaagccatggacagctacttcagcatgccaacaggataatttgactttcattgatccagggaggctcattgaaatcaagtcttctaatcctggaaaaagaatatgaaaatgcaattaacacaagaggcgagctagatgagcgcatgtttgctaatgatgaggacagtttacttggcagtggaagcctttcaggtggagccattaatttaccaggcacaaagagaaagtatgatgttatggcctcacctgcaaaatcaatatcaagcccaaatccaatgtctcctccacgtttttgtctatctcctaaaggaaacagcttttgcaactcaaagatggctcctatcactccagtgagcacagccatgacaactgccaagtggcttcggagtacagtatctccgcttccatcaaaaccttctggggaactattgcgcttcttctcagcatgtgataaggatgtaacagatgacattgtacacagagctgggattatacttggagccatattcacgagcagttcttttggtgaacagatctgtactaatatgcgaagcgctaataggatggatgctatttggacagagcaaagaaaaatggaagcccttaagctatattatagggttctggaatctatgtgtagggcagagtcacagatcttgagtgggaacaatcttacattacttttgtctaatgaacgtttccatcggtgtatgattgcatgttctgcggagttagttcttgcaactcacaagactgtcactttgatgttcccagctgtgttggagaagactggcattacagcctttgacttgagtaaagtcatagagggttttgttcggcatgaagatacactccccagagagttaaagcgtcatctgaattctcttgaggaacggcttctggaaagcatgtcatgggagaaagggtcatcaatgtacaattctttgattgttgctaggccagtactatctatcgaaataaatcggttaggtttactggctgaaccgatgccatcacttgatgcaattgcagcacatcataatatctcaatgggtggcctgccgcctcttcccttccagaaacaggagcgtttgcaagataaagatgaaatcaggtctcccaaaagggcgtgcactgagaggagacatgtgccggtggacagcaattcatttcgatcacaagtgaaggacagtattaaattgaagctaccacctcctcttcaatcagcttttgcaagtccaacaagaccgaatcctgcagcaggaggtgaaacatgcgcagagacaggaatagctgtgttctttagcaagatatcaaaacttgcagccattagaatcagaagtctctgtgaaagactgcaactttctcagcaagttctggagcgagtatattcccttgtccagcaaatccttagccaacagactggtctcttcttcaacaggcacattgatcagatcatactatgcagcatatatggagttgccaagatctctcaactgcaactttcattcaaggagattgtttttgggtataggaaacaacctcaatgcaagccacaagtttttcgaagtgtttatgttcattggcccccaacaagccataatgggaaaacaggagaagatcatgttgatattatcactttctacaatgaagtatttattcctgctgtcaagcctttgttagtggaggttggacctggtgctagtccaaagaggaaagaagagggaaaagtag

SEQ ID NO: 27265 - DNA, 1462 bp, Zea Mays
atcactcacagtcacaggtaaaagtaccttggcatgtacattaggccgtgagctccacacaagagggaagcttgcatatgtccttgacggtgataacttaagacatggtctgaacaaggatcttggcttcaaagctgaagaccgtgctgaaaatataaggagagttggtgaagtagcaaagttatttgcagatgcgggccttgtatgtattgcaagtttgatatctccatataggagagaccgtgaatcttgccgtgcattgttgtctgatagtagcttcattgaagttttcttgaacatgtccttggaattatgtgaagcaagagatccaaagggcctctataagcttgctcgtgcaggaaaaataaagggttttacaggaatagatgacccttatgaagcaccactgaattgtgagattgagatcaaagaggtagatggtgtatgccctccgcctgctgagatggcagggcaagttgttacttaccttgaggagaaaggcttcctgcacgagtaggctgaatccaagcaacatctggggaagatttcagtaagactagcgcagaataagtcaaaggcgctggcagttacggtatagcagttgcatagattggcctcaatgccttagtattttctttccgtacttcctctgccacaggctccatgcaatttcattcagatgagcctggatggttcctaatttctttgacctctagagtagattacttgtaatgcaactctgataaccacttggggcagtatcgatgtggcaatcgcaatcctcacggcagtcaccctcgcccgcacacataaaattcccgcgcccaggtgacaccgcgcgcggcaacgcgacacaacccgacgaagccaaaccgagcaagcaaattaaagcaagcatccgaccaacccgtgcgcgcggcgcgaggaagctcagccaacgtgatggtgttcagcgcctcgttcatggcggcggcggcgcgcgtgccggcggaactgtgccagcggcccccgcgcccggggcagcggcgggtgagcgcggacgacgtcctgcgcgctctgtacctgcccccggcgcggcccccggcgcgggagctcgggcgcctggggacttcctcttcggctttttctgcctgccgctgccggagtacggccgcggcggagggtgggtggcactggcacgggtgcccgacgcggtgctatacacctaccggaggtctctgtcggtcacctcgtcgtcctcatccttctcctcgtcgatgtcctcgtcggaggacgactgattgctgacaaggaacagtaaatacacgttgaggaatgcgccttgcttgtactgtattttttttcgtttgtgcaggagaatcgattagatgtgacttgtacgcccaattcctttgtgacctctgtatatgtccaattattgagtaaatttcagtggcggtcatcgaactcgtcacgagttctc

SEQ ID NO: 27266 - DNA, 1354 bp, Zea Mays
agcaagacagtctacaactacagggtctagctgttgaaaatgcgcaaggaatatcaaaagaaaagaatcaacgaatgatgtagaagctaatattattgatgatgagggtgatgaggtcatggtggacgtagaagaagctattgaaggacaacctgaagtcaatggagtttccaatcagttgatcaaaactctgaatatcactaaagatggctcaagcagaagcattgatgttctctctgattcaacagcacaagaatcatttttggaggcggtgaagcccagtggtcgtatcaatgcatgcttggccgtagggaaagatatgctctacttgtatggaggaatgatggaagtgaaagatagagaaattactcttgatgatctatattcacttaaccttagcaaacttgatgagtggaagtgtatcatatccgcctcagaatctgaatggttagaaatttctgaggaagaggatgatgatgatgatgatgagactgatgatgatgaaaatgaagagggggatgctagccagacagatgaagatgaagaagagtctgatgaagatgctgcaaagaacgtgtccagtgctgtgtctctgctgaagggtgaaagtaagaccatgcgtagaaaagagaagcgtgctcggatagaacagatcagggtcatccttggcctttctgattctcaaaggactccagtgcctggagaatcactgagagatttctacaagaggacaaatatgtactggcaaatggctgcctatgagcacactcaacacactggaaaggagctccgcaaagacggttttgatcttgccgaaactcgattcaaggaactgaaaccgatacttgacgagctggctgtgctggaggccgagcagaaagctgaggaagaggccagtgcgtcgactagttccaagagggacaccaagaaacccaagcagaagagcgcacgaaggtagctttggttctgaacgagtgtgtaagcggaagccagctttagatgaagttgctccaggaagaggccagtgcgtcagctagtcccaactcccaaggtgtgaagaggggacaccaagaaaatccaagcagaagagtgcagggagatagttttggttctgaacgagtgtttaagcgtaagacggttttaaacgattgctcaaatgctcaagttcctttgaggggatttccattttctttttgaacccaagtagacaaaattgatatttgttgttttataatagtgtatgtatatactcgtacgttgaaatttgattcatgtgcaatcttgaccgtatattctcccactattcgactaaacgaacgatcttcctccacacagcatagaccatagagctcca

SEQ ID NO: 27267 - DNA, 3364 bp, Zea Mays
caggaccctagtcatctagcttggcccatttacgtatcgtttttttttctatttcccgcatcttccccagcacgcttccctttcctaccgccaaaatttttgcatccccttgcccaaaatccattcaactcccaatcgaaaccgcggccgcctctccacttgctagtcccgaaagccgaaacagcaatcgaagcatctcagagccagctccattcatccccattccgtttattcaccgtccgttgcagcgaatgccctcgaggagccagtacgaccgccgcggcagcgatggcgacgaggacgagatcatttcagtcccatccgacctggaggaatcagagtcggaggcgaaccgcggggccgaggcggacgacgacgaatacgtgggggaaagcagtgacgcgagcggcggggacgaagcggaggaaggaggcagcagcgattgcggcgagggctgggacggggacgaccacggtggcaacgtcaggcggccacttcggggcctgcaacgcggcgtggcggctcccgataaggagatgaaatcgcagaacgtcgatgctcttgtcaggggcaacctggttgtaaggaggcaaccactcattccacgtattctttcagtttctgatgcagcagcaatagttcgtaagccattcaaacctccatgccaaaatggatatagtgacagtaatgagcagcttgctcgacgcctttcagctcgtaagagatttgtcccgtggggttcaacacagacatttgcaattaatattatacaccatcttccacagtcaccagttgttgcttctgatagttcatcagaaaaggaggaacctcttccacctggtattgagccattgattttgtggcaacgcgatgagtgtgagaaggaaaattgcaattctgcttctatcgaagttgaccacttgctcgtgcgttacctccgaccccatcaaagggaaggagttcagtttatgtttgattgtgtctctgggtcactgagtgctgatggtatttctggttgcattttagctgatgatatgggattggggaagactttacagtcgataacattactatatacccttcttttgtcaaggctttgatgataagccaatggttaaaagggctgtcattgtaacccccacaagcttagttagcaactgggaatctgagataattaagtggttgaaaggcagagtgcaggtgctggccctctgtgaaagcacacgtgctgatgttctttctggaattgaaagtttcttaaaacccttgagccgtctccaggtacttatcatatcttatgagactttccgcatgcattcttcaaaatttgaaagacctggcagctgtgaccttctcatatgtgatgaggcccacaggctgaaaaatgatcagacactgacaaataaggctttggctgcccttccatgtacacggcgtattctcttgtccggtaccccaatgcagaatgatttggaagaattcttttcaatggtgaatttcacaaatccaggggttttgggggacgcttcatattttcgtcgttattatgaagcaccaatcatctgtgggagagaacccactgcaagtgcagaagaaaagaaattgggatctgagagatctgcagagcttagtgcaaaagtaaatcagtttatcttgagacgaacaaatgctctgttatccaatcacttgcctccaaagattattgaagtcgtttgctgcaagctgactcctttgcaaacaacactgtacaaccacttcatccattccaaaaacattaaacgcttgatatctgaagaaacaaagcaatccaaaattctagcatatattaccgctcttaagaaattatgcaatcatccaaagctgatctacgacaccataaaaagtaacaattcaggtgtatctggttttgatgactgtctacactttttcccgccagatcttttttcaggaagatctggatcatggactggcggaggaggaatgtgggtagagctatccggaaaaatgcatgtattagcaagattactggggcatctacgtcagaaaaccgatgatcgtattgttcttgtatcaaattatactcagacattggatctatttgttcaattatgccgggaaagaagatacccatatgttagacttgacggatcaacatccatcaataaaaggcagaagctggtgaaccaattcaacgatctatctagggacgagtttgtctttctacttagtagcaaggcaggtggctgtgggcttaacctggtaggtggaaatcgtttggttctcttcgaccctgattggaaccctgccaatgataagcaggctgctgctagagtgtggagagatggacagaaaaagagagtttacatatataggttcttaagcacaggaactatcgaggagaaggtatatcagcgtcaaatgtcgaaagaaggcctgcaaaaagttattcagcaggagcaagcggacaataaaatgcaggggaattctctttcaacagaagatctgcgcgatctttttatttttcatgaacatgtcaggtctgaaatacataaaaatttgaagtgtagccgctgtgacaaggatggagatccagctttggatggtactggttttgcagccactggtcataaggcttcaatacctggagtgcaagattatgctgatattggtgggtttggtgagatatctggatgtttgcagaaaatgaatagcacacatcagcagattggaagacctactgaagaagacttaggaagttggggacatcactgtgacccatcaactgtacctgatactatactgcagtgttctgctggcgaagaggtttcttttgttttcaccaatcaggttgatggaaaacttgttccagttgaatctatggtgcgatcagcagctcatcaacaaaacggaatagcagccaccggagaaaaaggagtgcagatacccaattctcctagcaaacctggaaagcaatccttaaatggcaagaatttgaagatgggatttcatttaaagaattcgtctttgaaatgttcaaccaaatccagaccatcaccaaattgcttgcaagggttgatgaaaaccagcccctttttggatcaacctcaaattaaaaagcttcatgttgcttctgatatatctgacgatgattttgtttgagtgtcaattcagaattacttagtctcatatatgttgatgtgctatctgttgcatatataatgccatcagctttgtcggtgcctattgcatcttttattcaggtttctacaattttcttttaataaaaaataggtcctaataaggtatgtacatagaaaagcaaaaactacttacaatttggaatggagtataaacaatcatttta

SEQ ID NO: 27268 - DNA, 1425 bp, Zea Mays
ccagcacgccactggttatcggttaccgcttgatcacacacacgactacacggctccagcgtgcaccgtgcaacggtgcttgcccagcccttcgccgccgctcctcacctctgcagtgttccttccttcctgtggaagaaaccgcagtaggcagtagcagagctgcagagccggagaggccaggctcgccgctcgtggggaagagatggagcacagaagagtgaaggatcaggagagtgatggcgtatctcagaaggacatagagaactttgataagatatctctttctagcaatacatcaacttcaagtcttagcactgcaggagggccgaaggatagttcgaagctaaagtccattgttacacttgcattgacattgctaacaagttcccaggcaatattgattgtatggtcgaaaagagctggaaagtatgactatagtgtcacacagcaaatttttcggttaagtcaaattcagtgggctgcatttattcttttatgtgctggatgcactactgctcagctcagtccctcgtcagaccatgttcttcagacccctattcaaggttgggtgatggcaattgtgatggctcttttaagtggttttgcaggagtatatactgaagttatcatcaagaaaaatccttcaagaaatatcaatgcacagaatttttggctgtacatatttgggatgctcttcaatttggttgcaatttgtgtccaggacttcgatgctgtcatgaacaaaggctttttccatggctactcgtttattacagttttgatgattcttaatcatgctttgagtggaattgctgtatcaatggtgatgaaatatgctaacaatattatcaaggtttactcaacatcagttgcaatgcttctgacagcaacagtatccgtcttcttatttggcttccacctgtctcttgcattcttgcttggatccacggtcgtttctgtgtctgtgtacctgcactcagttgggaagctgcagcaacggaactagggtttttcttcctgcatgctgacggaagagtgtttttcttcgaatgccctacaagatcaggcagttggagcgctgtagaatgtttttctagtagcactgtgaacattgttgcaccatgagggagaacgtaagatggaaggcattcctgttcatcagaagaagaataacgtgcgatcattttttttgaaggaataagaattcgtagccaaaggaagaggatagtcatgaagggtactaaactatgacatatgtttggttcctcgcatgaagatcatcctgcatatgggtggtggatatgtgagaatgtatccagtgctcccatacccccccacttcaaagtaataatctagatcaaagcatgcataaaaaataaccaaaagtatgggtgggtagatgatacatgcgccttgcacaaa

SEQ ID NO: 27269 - DNA, 1529 bp, Zea Mays
gcaaatacttatattttatgttaaacagctttccagtctgcttaccactataggcaggtgcacttgatggtttatggcatgatatatcataatgtatggactaatttggaatattcaacatattttaaatcaatgtgtcctttgtattacctcttttacagtgggttgtaatgtttatgagaaatggagattgggacttttaactgtcatatttactgacatccaggattctatggttgttaatttagtttccacattgaaattctgtgtattgttaattttttcttttatgtttgcatgtgcttctttctattttgatcactgtgggctgttctactgatgcattgtgtgcttgacctgttcctatcagcatggaactgcatccttcgatgcattgattgtctatggtacaaattgatatttcataattcatataaacaaatacataatgcatctatatctatatgtatctctacaaatcaatgcagagtggactacatttgcttttatgtgacccgcagaagatttctgcactaatcaatcatttagcattagtcatatttctatctttagctaggacatgccacttgtgccttttccttctcttcatttttaaatgtcatctccattctgatgtggtgttccttcaggaaaggggaagatctcagttctatatccaaacaagactaccacccccaagtcagttaaagaccttgaatttgatggtttctccttgactactgaccttcgtgagaatttgcaggacggacctttcaattttgttttgcttgatggcacctggagcaattctgctgcactgtacagaaggttgaaggagagatggactgcagtatggggagatgaagctctaccttgtattgcactatctacacttagtgcctcagtgatgcataaactacgaccgcagcctgcctgggatcgtacctgcactgcagcagctgcagctggcctcctctgggagttgagctcgcggcctgagctcatctcatttgggttggaaaagcaagccgaggcggtggagtgctcgttagacaacttgctggatgctctcactgccaggcggcttcgtctgggccgatcgataactcggaaacagagacatagtaggaactgcatatagggaaagaagaaactcacagtaacagaggagcatggtgtgccatcaagtggaaggctgatttcattcttttttgtagaactcaggagctgatcattgtcaacaagttttctcccctttctatataggttactagatcttcagttcagtgctgtagattacttttaatggtcattgacatgagctgttaccgctgctactgtcgaagaggagggttaccaaatattagggtgctaaaacttgggttgtattctgacagattttgccataccatgaaatcaagttgttttctcatgccaataggttacagctgacaaacaatccctcccatcctctcttttccagtcgcgtattgtatggtatcgtgcccagtaagggcttattcggtttt

SEQ ID NO: 27270 - DNA, 1654 bp, Zea Mays
tattcttccttctaaacatatttccgtgggctggcctgttgggctgctgtattttgtggaaagtttcggacagcccgtaaacttgggcccgttccggttcggcttagctttgctcttcttctccccgttcaccgactaaacaaataacatttttaataataataataataataaaatctcccgtggcctccttcttctccggttctcgctcgtgcccttctctcctggcggcgacggctgggcgagcggcgcggcccgttatcacttcccaggtcttcggcggcgacgagtttccaccaggctgaccggaacgcagtgggtggagaaccggtgagcagctgcagccatgtccgtggcggccggcgtgagcgacgcggccatcgcggtgcgcgacaagctccgtggaaagattggtcagaccaaggtcaaacggtactggccggggaaggcgcctgagtgggccgatgacgtcgatgaggacgtcgacctcaggacggcacgggtctccctcgacaaggcgttccccagggacgaggacggcgatgttcccgccaaggatgaccgccggctccgccggctcgcggagacccgcgaggagaataagggcaaggcagctgctgagggagcaggaagagctgcttcctcaggaagaggaggaaccggtggaggccgaggagtctgaggaggaatctgagtacgagacagactctgaggatgagcagatgggaatggccatggtgaagcccgttttcataccaaagtcacagagagacaccatcgcggagcgcgaacggctggaggaggaggaacggcagcttgaggagctggtcaagaagaggctggaggctaggaagatcgagactagacagattgtggtcgaagagattagaaaggaggagcacatcgagaaggcactgaacgaagaggccaacatcgaggatgtcgatacagacgacgagttgaacgaagcagaggagtacgagtcgtggaaaaacagagaaatagcaaggattaagagggacagggaggaaagagatgcgaggttgaaggagaaggaggagatcgagaaagtcaggaatatgaccgaggaggagcgtcgcgaatgggagcggaagaatccgaagccgcttcgtcagacgaaacagaagtggaagtttatgcagaagtattaccacaaaggcgccttcttccaggaaggtgctgatgatgttatccagtcagcgggtaaagaggatatctacacccgtgatttctctgagcccactggagaagataagatggataagagcatcctgcccaaggtcatgcaagttaaacatttcgggcgcagcggcaggacgaaatggacgcatcttgttaatgaagacactacagattggaatgcaccatggtcaacaaatgggcctctgcgagcaaagtataatgcaaaaatggcaggcatgaatgcacctattgctaaaccaaagggaagtaagaagctgaaggattgggatgcaaaatgagatgccagggtgatggtagcaaggaaatggcttccgtggggaccaagtgaagataaaggaaaagcgacggcttgggcatatagaaacgaaggacatggttgtggtgaagaagaaagtgcttgcatttagtttttcactattcaagttagaag

SEQ ID NO: 27271 - DNA, 2717 bp, Zea Mays
gccggtgctgctgcaattaacgccgcccccggccaaccacccgaaacctacctccgccgccgttgtcgccaccgtcaacatggcgagccaaggggagccctcggcctctgcttccgatccgaaggagaagaaggacttctcgacggcgatcctggagaggaaaaagtcaccgaaccgccttgtcgtcgacgaggccaccaacgacgataactccgtcgtcgcgctgcaccctgacaccatggagaggctgcagctcttccgcggcgacaccgtgctcctcaagaggaaagacactatttgcattgtccttgcggacgaaacctgtgaggagccaaaggttcggatgaacaaggttgtccgccagaacctaagggtgaggcttggtgatgtggtttctgtccaccagtgccaggatgtgaaatatgggaagcgtgtccacattcttccaattgatgatacagttgaaggcattacagggaacctgtttgatgccttcttgaaaccatatttcctagaagcatacaggccgttgaggaaaggagaccttttccttgtcagaggaggaatgagaagtgtggaattcaaagtgatagagactgatcctgctgaatattgtatcgttgcgccagatactgaaatattttgtgatggggagcctattaagagggaggatgaggagcgtcttgatgaagttggttatgatgatgttggtggagttagaaagcaaatggcccaaatcagagagcttgttgagcttccactacgccatcctcaacttttcaaatctattggtgtgaagccaccaaagggcatattgctgtacgggccacctggttccggaaagactcttattgctcgtgctgttgcaaatgagactggagcctttttcttcctgatcaatggtccagagattatgtcaaagctggcaggggagagtgaaagcaatctcagaaaggcatttgaagaagcagagaagaatgctccatctatcattttcattgatgaaattgattccattgcacccaagagagagaagaccaatggagaagtagagcgtcgtattgtttcacagctactgactcttatggatggactgaaatctcgttcccatgttattgttatgggtgctacaaaccgaccaaacagcattgatcctgctcttcgaagatttggaaggtttgatcgggaaattgacattggagttcctgatgaagttggccgtctcgaggttctccgcattcacactaagaacatgaaactagctgaagatgttaatttggaactcatttcaaaagatacccatggatatgttggtgctgatcttgctgccctttgcactgaggctgctcttcagtgcattcgtgagaagatggacatcatagatcttgaggatgagacaatcgatgcagagatattgaactcaatggctgttacaaatgaccatttcaagactgcgcttggaacaagcaacccatctgctcttcgtgaaactgttgtcgaagtcccaaatgtctcttgggaggatattggtgggctggagaatgtcaagagggagctccaggagactgttcaatatcctgtggagcatccggagaagttcgagaagtttggcatgtctccatccaaaggagttttgttctatggtcctcctggttgtggtaagaccttgttggcaaaggcaattgccaacgagtgccaggctaacttcatcagtgtcaagggtcctgagttgcttaccatgtggtttggtgagagtgaagccaacgtccgtgaaatttttgacaaggctcgtcaatctgctccttgtgtcctcttctttgatgagcttgactcaattgctactcagagaggaagcagtgtgggtgatgctggaggtgcggctgatagagtgcttaatcagctactgacagaaatggatggcatgaatgccaagaaaactgtgtttattattggagctacaaacaggcctgacatcattgaccctgctctgctgaggccagggcgtcttgaccagctgatctacattccactgcctgatgagcagtctaggctccagatcttcaaggcctgccttaggaagtcccctgtggcgaaggatgtggacttgaatgctcttgctaagtacactcaagggttcagtggagcagatatcacagaaatttgccagcgtgcgtgcaaatatgcaatcagagagaacattgagaaggatattgagagggaaaggcggagaaaggacaaccctgaggcgatggaggaagacgaagtggatgagatcgctgagatcagggcccctcacttcgaggagtcgatgaagtatgctcggcgtagtgtcagtgatgctgatatccgcaagtatcaggcgtttgcccagacattgcagcagtcccgggggttcggcagtgagttccgcttctcggatcagccggcgacagctggtgctgctgctgcagctgatccgtttgcttctgcgggtgctgcggctgatgatgacgatctatacagctagttgggttgttcaatatcagtcccgtcactcatctgtttaaaactgatcatactaaacacgcttgtcatgcaatgatatttatttgccgtacatttggacgtcgctgagatgatgcactctcggccttcggttaacttttcatgccatattctccatgtcattgtctgggccatgacattttattaattattgtgaaatctatcatctctca

SEQ ID NO: 27272 - DNA, 1582 bp, Zea Mays
cggcgccaggaaaggcaagcaactgatatcactgccacgtgggcccttccccttcgaggagcggcgcaaccgcgcttcgcgttatccgaattccgaaaaaaaccaacagcgcgggcgtggggtaactgacgtgtgggccgagaaacatgtcgtctcacctcgccgcggccgcttccgcccttcctctccctcttcctccgccggcggtcgccgcgccttcccgcgccctccgagctctaatcctgtcccggggcggcgccgccgccgtatgctccagtctgcgccgcggcggcacgccggcatgcctcgtgcgtcgcctgtgctcccaccactccgccgcggcggcggcgacggcgttggaggaggcgcggcgcgggcggaagcagctcggaatgacgcctgcgctctacgactacctcctcgccaacgtccgcgagcaccccattctccgggagcttcgcgaggagaccgcggctatgagggggagccagatgcaggtttctcccgctcaggctcagctgttgtcaatgcttgtgcaaatccttggggcgcgccgttgcattgaagttggtgtgtttactgggtattcatcattagctgttgcactggcccttcctgaatctggtcacttggttgcttgtgagagggatgacagatgcctagaagttgccaagaagtactaccaacgtgctggtgttgcacataagccgaaatgctatctggatctgccctacaatggtaataattggtattatatgatagagtcaatttatgcttttatactctaaaatttctgtgtggattggtgtgtaaaaaatcattagattgatgtgaaacatgctttggctgcggattctctaagatctcttcttgattgcggcgaagcttccagctatgacttcgcatttgttgatgctgacaagagaatgtatgaggaatattatgaacttctactgaagctagtaagagttggtggtttaattgtaatggacaatgtcctttggtatggaagggttgccgatctactggttgatgaccaaaagacgatcagtataaggaacttcaacaagaaagttttagaggacaagcgtgtcgatatcagcatggtgccaattggagatgggatgacaatttgccggaagctagtagatacttgagttcacaacgtttttgtgtagatgcggaaaacttcttaccaaggtcaagccctgaaaaatcaaactggtatgcattaatcaagtaaaaatgattataggtgatgaacctcttggcattgacaatatctgtactgcaaatgttgctagtggcctgggctctactaaccacagtggtggggaagcagttggtggcagtaattttgattcgctgcttagaacgctgagatgagtgtggcgtgtcttgcacacagtataacttgaattcaagtacaaaaccagtgttatggtgttttgttgatagaccacagtttcatctcaggtgtatatggaactatggaagtgtggtgcacgtattaaattgtgagtcgtgatcatccattttatatctaatggttgctctatatattttacaaacaacatcttct

SEQ ID NO: 27273 - DNA, 634 bp, Zea Mays
cagagtccagcagcccagtaaacccaccaatccgagcaacctctcgcaacggagacactgctcgctgcttgctttctcctctcgcgcgcctgccgcctagccctactacagtcagccgccgcaagcccgcaaccggaaccgccacctcctagcactagccacgcgaccggcgctggcgcgccctcgctgccggctgcgtcccgccaccgccgccggacggtccctggcggcctcgccctcgacgatcgggcctcgcctgctcgaccacgcgtgacgccgccgccgcggatcaccacccaccgtccgccgggctcgcgccccgccttccagaagtccgagcgccgcctctcgcccgtgtccaactccaaagtctgaagttcgatccacatccactgacccgcagaggcgcagactaccggtagtttcgttgctttaaactttcaacaatttaaatgcgacgaactgatgattttgtaattgtctaattgatagatcgattaatacatcaatcaggaatatcattataaaaacagatgaaatgttgttatgttgaaaagaaatgctcttctatcactgctgtttgatcttttttttttgcttcgttatgttcaatctctctgtacatttatattat

SEQ ID NO: 27274 - DNA, 3296 bp, Zea Mays
aaggagtcgcgttccattttcattctcccacccacccggatcctccgcgcgcgccgccaggtccgtcgcgatggccgcactccgcctccccgcccagccggtggcgaggtggccccaccttccttccgcctacgccgccgccgccgccgcgcgtcgggtctcggcccctcgcggccatctcgcggcgcggcgggccaagggggaggagccgccggagccgccggtgaggacgctgctgatcgacaactatgacagctacacctacaacatcttccaggagctgtcggtcgtcaacggcgtgccgcccgtggtcgtgcgcaacgacgagtggacgtggggggacatctttaaccggttgtacaaggaccgcaccttcgacaacatcgtcatctcgcctggccctggatctccggcatgccccgccgacataggggtatgtctgcgcatacttttggagtgtggagatatacccatcttgggtgtctgccttggccaccaggccctgggatttgtacatggtgctgagattgttcatgctccagaagctatacacgggcgactcagtgaaattgagcacgatggatgccacctctttaatcgtgtcccctcaggtagtgaggtatcattcccttgtaatagaatctggttctctacctgatgatcttacatcgatagcgtggactgcttctccaaatttgctttcttaccttgaaagtgatcgaaccaatgacatgcttgtgagtcagatgatagccgagttatcatgggcatcaggcactctagcaggcctcattatggagtgcagtttcacccagagagcattgctactcatcacggaagacagattttccgaaactttaagaagataacaggaaattttggattgcgctcatcgtggattcaggaaagaaaggttcacagtattggtcaattctgcaagtcatcatgattctattcctaaggacttgttgcatactgaaagaatggaactttcagagtctgtacttggaaagagagggattgggaagaagtgtttacgattacaatggaagaagattgaaaattttgtctgtcccacagtaggctctgaagacatatttgcggtgctttttggccatcaaagcggtgaagacacattttggttggatagctcatcagttgaccagaacagggcacgtttttcattcatgggtggtaaaggtgggtccctgtggaagcaaatgtcattccacctatctggtcaaagagccaattgtggaggaatgcttagtatccaagatgcttatggatttactgccaaaaaatttatcaaagacggcttcttggagttccttaacaaggagattgagtccattcaatacaatgagaaggattacgaaggactgccctttgaattccatggtggcttcgttggatatcttgggtatggtcttaaagtggagtgtgatgcatcatcgaacaaggccaaatcaagtactcctgatgcatgcttcgtctttgctgataacactgtggtggttgatcacagcaatggtgatgtgtatattttgtcactgcatgatgaattttattctagtaatggagatgggatatgcaaaaattcaacgcatacttcatggttagtggagactgagaagaagcttctcaggttgggtggtatgccctcaggatcaccaattatccgaaagacacatgctagatcatccagtgtgcataagcaggcaggatcaccaattaatggaaagacatatgttagatcatccagtgcgctgaagcagagttttgttgtagagaaatcaaaggaccaatatgttagagacgttcagaattgcttggattatatcagggacggagaaagctatgagttgtgcttaactactcagatgaagagaagagcagactgtataaatgcactccaactctaccttaaactgagaaaacaaaatccagcgccttatgcggcctggcttaacttctcctcagaaaacttgagcatatgttgctcttctccagaaaggtttctacgactagaccgagctggagttctagaagcgaaaccaattaaaggtactatagcacgtggcagaacaccagaggaagatgaatgcttacgtctgcagttgagatacagcgaaaaagaccaggccgagaacctgatgattgtcgacctcttaagaaacgatctcggcaaggtctgcgagccagggagcgtgcatgtcccacgcctcatggacgttgaatcatacagaagtgttcacaccatggtgagtaccgtctgcggaacaaagaagccagatctaagccccgttgattgtgtgaaagcggcctttccaggcggttcgatgaccggggctccaaaagtcagatcaatggagatccttgattcacttgagacaagcccaagaggagtgtactcaggatcgatcgggttcttctcgtacaaccacacattcgacctgaacattgtgatccgaactgttatcctgcacgacggagaagcctcggtcggggcgggtggggcgatcgtagcgctgtcgagcccagaagcagagtacgacgaaatgctgctgaaagcgaaagccccgactgaggtggttgaggatctcgttcagacgatctacagctcagaccggtcggattccatgcagacaactatcagctagatcagataggcaaaggaccattatttgtcgcgacaccaagcgcttacgatggacctcggcaaacaccatgtgtctcagaaatttggtatcagtgaccggtgcgtgctgatgaacattggcagtgggagaggggggggggggggggggtgaggtggcgtatcttctttgcgatggtcatccctttgccagaaggaaataaaggagacgcgaagaggatgtcgaggtcagtcggatccacggttagcatatagagtcaggtgacatggcctctctcaactatagtgtgtgtgtgtgtgtggcatatacggtgagcatatacaagaacaacagtgtgtgtgtggcagaagtgaaacaaactgatacggttgtgttgcactgtcgtaccagttcaatgttcctgaagtgatattattctttgacgttataaatacttcgagggtgggtgggcgaatttcacgttttgtcgacgtttcctgggttgagctttccatccagcttctcaaatcccattttactctgaatattctgttgacagggatttctgttattaaagattcggagcagtttgttgttgttgcttttgacggtgaccttcatgaatcctgactcctgagatgcattttttttgtgttt

SEQ ID NO: 27275 - DNA, 726 bp, Zea Mays
tgtgttcttgtgtgttttatgttactttttttacaggtgatgatggagaggatatcctggatgtataacttatcaaggctagatccatcatacatatctgaggtccataggtttattgttgtcactacgaaccatgcttggagaacaaagacaaagcacatatattgtccatgcatggactgcaaaaatgctgttgtatttgatgacacagaacaaattatatctcatctggtatgctgaggatttgtgaaggattacataatttggacaaagcatggagagggtagctcttcgccttatacagctgggaaccctgcgaacatcgacgacagcttccagttcgttcacgagacacaacaacctcttccacagagcgaacatgtagtgccaaatgttactgatcatggttacgctggaggaaatgaacgtgaaagaacccatgttctgccaaatgttatggacgaggaagatacagagttgttagaggcaatgttgtgtcgtcatacagatccatcgatgttcttcatgaaaggtatggagtccctgaagaaggcagcagaagagcctttgtacgacgagtctaagggctgtaccaaagagttcacgacgctccggtctgtgttaaagctgttgatgttaaaagctagatatggtctgtctgatgctggcttcgatgcgttcttgagtattgtcgcagacatgcttccaaaggagaacaaagtgcct

SEQ ID NO: 27276 - DNA, 5203 bp, Zea Mays
gaccttctagaaacggtaagtggcccagcccggtccagcaatgcagtgaatcgcgccaggcccagggggggtggcggggcgaggtgtcaggtcttggtagcgactggcaactggaggagcaagcaaagcggcctccctcggcggcgcggctctgaccgtctgtcacgagcccacgaccgggaggcaaccttccccactgcttcgtcccgctcccgtcccaacgcgtcgtcaccccacccctacaaaaaccccaccctccgcctgagcgctctcccatcgtcccaaagcgtggcaagcgcacgccccatcccctccaaggctccaagcctccaacacaacggaatctcgttggtaacccggtgcctgctcggcgttgtggacttgtggtgcggattggtagggggagcaggaggcggcagcagagggaaggaggagggacggcgagatggacgcggcgggggacattcagaaggtggcgagtatgcggcggggcgacagcggctccatttggcggcgcggtgacgacgtgttctcgcgctcctccagggaggaggacgacgaggaggcgcttcgctgggccgcgctagagaagctgcccacctacgaccgcgtccgccgcgccatggtcccgctcggcctcggcgccgacggcgccgaggcggcgggcaggaaggggctcgtcgacgtggacgtgctcagcctcggcccacgcgagaggcgggcgctgctggagcgcctcgtccgcgtcgccgacgaggacaacgagcggttcctgctcaagctcaaggaccgcgtcgacagggtcgggatcgacatgcccacgatcgaggtacggttccagaaccttgaggcggaggcggaggtgcgcgtcggcagcagcggcctccccaccgtcctcaactccgtcgtcaacacgatcgaggaagcggcgaacgccctgcacatactgcccagtaggaagcggatcatgcccattcttcacgacgtcagcggaatcatcaagcctcgcaggatgacacttctgttaggtccgcctggatcaggcaagaccactttgttgctcgccttggccggaaggcttgacaaagacctcaaggtttcaggcaaagtgacctataatggtcatgagatgacagagtttgttccagagaggacggccgcttacatcagccagcatgacctccacataggagagatgactgtgagggagacgcttgcattctctgcacgctgccagggtgtcggctcccgttttgatatgctgactgagttgtcgaggcgagagaaggcggctaatatcaagcctgatgctgatattgatgcattcatgaaggcgtctgcaatgggtgggcaagatgccaatgtggtcactgactatattctgaagatattaggactagagatatgtgcagacacaatggtaggggatgagatgctcaggggcatatctggtggacaacggaagcgcgttacaactggtgagatgctggttgggccagccagggcgcttttcatggacgagatctcaactgggcttgatagctccactacattccaaattgtgaactcgctgaggcagtccattcacatcctcggtggcacagctgttatctccctactgcagccagcacctgagacatataacttgtttgatgatatcatactcctctcagatggtcaggttgtgtaccagggtcccagagaagaagtgcttgagttttttgagtctgtaggtttcagatgccctgagaggaagggcgttgctgacttcctgcaagaagtgacctcgaaaaaagatcagaaacagtactgggcgcgacctaatgagccctacaggtttgtggctgtgaaggaatttgcgactgcattcaagtcatcccacacagggagatctataacaaatgagcttgctgttccgttcgacaagagcaaaagccacccagccgcactaaccaccacaaggtatggtgtgagtggcaaggagctgctcaaagcaaacatagaccgggagatccttctcatgagaggaactcttttgtctacatgttcagaaccttccagctgatgctcatgtcaatcattgcaatgactctcttcttccgtaccaagatgaagcatggcacggtgaatgacgggggtctctacatgggcgcactcttctttggtgtgcttatgatcatgttcaatggcttctctgagctggcactaactgtcttcaagctgcctgtattcttcaagcagagggatctccttttctttccagcatggtcctatactataccctcatggatcctcaaggtacccatcacatttatcgaggttggtggttatgtattcttgacatactatgtcattgggttcgacccaaatgtcggcaggttcttcaagcagtatctgcttctgttagtagtcaatcagatggcagcatcactcttccggtttattggtggggtatcgaggaacatgattgttgctaatgtcttcgcatcgttcatgttgctagttgtcatggtgttgggaggatttattctagtaagagataaagtgaagaaatggtggatctggggctactggatctccccaatgatgtatgcacaaaatgccatttcagtgaatgagatgttgggccacagctgggacaaaatattgaatagcactgcatccaacgagaccctaggtgtgcaagtccttaagtcgcgtggagtattcaccgaagcaaagtggtactggattggctttggtgctatggttggtttcaccatactcttcaacgctctcttcactgttgcccttacatatcttaagccatatggcaactcccggccatctgtatccgaagaggagctgaaggagaagcatgcaaacatcaaaggggaggttctggatggcaatcacttggtatcagcaagcagtcatcgatcaacaggagttaaccctgaaactgattcagcaatcatggaagatgattctgccttgactaaaaggggaatgatcctcccatttgtcccgctctcgctcacctttgacaacatcaaatactctgttgacatgccacaggaaatgaaagctcaaggtgtacaagaagatcgtttggagctcctcaaaggtgtcagtggatcttttaggccgggtgtgttgaccgcactgatgggcgttagcggtgcaggaaaaactactttgatggatgtgttggctgggagaaagacaggtggatacattgaaggagacatccgtatttcaggatacccaaagaaacaagacacctttgcacgtgtatcaggatactgtgaacaaaatgatatccactcgccacaggtgacagtctatgagtccctgcttttctcagcatggctccggcttcccaaggacgtcgattcaaacaaaagaaagatcttcattgaggaggtgatggagcttgtggagctgaaaccactgagaaatgctttggttggacttcctggagtgaatggtctgtcaactgagcagaggaaaaggcttaccattgctgtggaacttgttgcaaatccatctatcatctttatggatgagccaacctcagggcttgatgcccgagcagctgcaattgtgatgcggacggtgaggaacactgtcgatactggtagaactgtggtctgcacgatacatcagcctagcattgacatatttgaagcatttgatgagcttttcctcatgaagcgtggtggagaagagatctatgctggtccacttggacatcattcttcagatctaatcaagtattttgagtcacttcatggggtcagcaaaattaaagatggctacaatccagcaacatggatgctggaagtgaccacaacttctcaggaacagattctaggtgttgatttcagtgacatatacaagaaatctgaactctaccagaggaacaaggccttgataaaggaattgagccaaccagcaccaggttcaactgacctgcatttccctagcaagtatgcgcagtcttccattacacaatgcgtggcttgcctatggaagcagaacctgtcatactggaggaaccctccttacaataccgttaggttctttttcactaccatcattgctctcctccttggcaccatcttttgggacctcggcggcaaaacgtatacatcacaagacttgatgaatgccatgggatcaatgtactctgcggtgctgttcattggagtcatgaattgtacctcagttcagccagtggtggccgtggagcgaacagtcttttaccgtgaaagagctgctggcatgtactcagctttcccatacgcgtttggccaggttgtcattgagcttccatacgcactggctcaggatatcctttacggtgtcatagtgtactctatgatagggttcgagtggacggctgctaagttcttctggtacctcttctttgggtacttcacgctgctctacttcacattctacggcatgatggccgtggggctgacacctaactaccacatcgccgcgatcgtctcctcggcattctacgccatctggaacctcttctccgggttcatcatcccccgaccgaaagtgccgatctggtggaggtggtactgctggatatgccccgtggcgtggacgctgtacgggctggttgtgtcacagttcggtgacgtcatgactccgatggacgacggaagggccgtgaaggtgttcgtcgaggactacttcgacttcaagcacagctggcttgggtgggtggccgccgtggtggtggcgttcgccgtgctctttgcgaccctgtttggctttgccatcatgaagcttaacttccagaagagataatgacgataggagttgggaaatcacctcctaggagacaaagggatttttgcattcgttgggtcgtgcaagtagatttgactgtgcatattgggagagtacgccataatatatggattcgttgattagttaaagttatagaagttattgtgtgctcctgttttttttttttgataggatattgtgctcctgtttttttttgataggatatattgtgctccttttctaggagggtgatgccgtagtactttgtaaagaatatttcacacatccagtaaaattccttgtcgccccttgcaaatgatgagttggagaaagcaaacgaaatacctcgtgcactgctgttgacgtataagtgtataatgtatatatgtttttgaatataatggcaaga

SEQ ID NO: 27277 - DNA, 947 bp, Zea Mays
ctcaagctccactgctggtgcctgcaagatccaacaaaatccgccgtcttccagagaattcctttgacatatgatgaggagaaaggagcttggtttcttgagaaagagttgcctgtgagtatacaatgtttatgttaggaaccatctaaaagtttatggaatgttgatagtttcattgtggaacgtaggcagctcttgaccatacctggtacatgtagaccatatctgtgtgcgacatcctgcttgatcatttatgatattacattcgaataacctcctcttagggaattttgaaagcccagaaagattgtaagccagtatggctatatcttacacctttgggatatctgtttcctgaaggaaggacggtatgaatacaaatacgtagtggatggcaaatggctatgcaacgagcatgagctgataacgaaaccgaatgctgacggccacgtgaacaactatgttcaggtctccagagacggcacgagcgatgaagagaaggagcttagggagcggttgactggtccggaccctgatctcacggaccaggagaggctgatgatcagagagtacttggaacagtacgcggatgccgccgagcgctaggagaagaatgatgatgactgaggaagagaagagacacaccatgagacgacggaccgaagccgacctgaccgcaccttcctttacggagaggtcgggcttcccctctcttgtcaatcaaatactcgtagcttaaccgtgcaaaagggcacgttctgctcgcatacttggagaatgatgatgaaggagcaaactgtacgtattgttgaacagcagctgtgcagaaataacaaaggtagtagcgtaaaactactgtactgaccataatgttactactgtatgctccttcttggctatgaataataataataataataaaagagtaaataaacctcatcgatccc

SEQ ID NO: 27278 - DNA, 1311 bp, Zea Mays
acgcggccacaccgcctactctgttctcctccccaccactgccgcagcaccgagaaccatggccgccacgtcgcccttctcctcgtacccccctcgcctacactccaaaaccttgaagcctcgtcattctcgcccgctccaccacaaggccgcgcccgccgcctccgccccgcgtccgctactcctctccttccccgcgcctgcacgccactgcggtgctgggctccgcgcttcagcggcgcagaaaaactctgctgattacaagttcgatgaagacgacgacgacgacgaggaggaggagtacgaatacgacggcgaagaggaggagtgggaggaggaggatgatgaggatgcgatgaacgtggaggcgatggaggaggaagcccgtggcgccgctgccgacctcgccaaacgcctcgctcgggagctccacatcgatgatgatgtcagggagaaacgaagaaacatcagggataagacatctgtgtctaaacacattccagataatcttcttccaaaggtggcaattattggtaggccgaatgttggtaaatctgcactcttcaatcgtcttgtcggaggcaatagggctatagttgttgatgaacctggtgtgacaagggaccgcttatatggacgatcttattggggtgatcatgagtttatggttattgatactggtggggtaattactttgtcaaagtctcaagcaggtgtaatggaagaacttgccgtcaccactactgttggtatggatgggattcctctcgccactagagaagctgctattgcaaggatgccatcaatgattgaaaaacaagcagttgcagctgttgatgaagcatccgtcatactattcgttgtggatggtcaggctggtcttgtggcagctgatatagagatttctgattggttacgacgcaactactctgacaagtgtattctacttgctgtcaataagtgtgaatctccacggaaagggcaaatgcaagcattagacttttggtcactcgggttttctcctctgccaatttctgctatcactggcacaggaactggagatctccttgacctggtgtgttcagagttgagaaaatttgaggtattggatgccgttgaagaagagaaaaataaggttcctgctattgccattgtgggaagaccaaatgtgggtaaaagtagcattctaaatgctttggttggagaagatagaactattgtcagcccagttagtgggacaacacgtgatgccattgatactgagtttactacagcagatggggagaataaaattattacttggaaagcttg

SEQ ID NO: 27279 - DNA, 1785 bp, Zea Mays
gtaaattgccccttcaactgcacatctcctctccatcgtctccttgaggcttattatatgcatgcatcatccctgatctctttcatctcttccttgctagctacttctctagttatagctctctctctctctctctctctctctctctctctctctctctctagctctcttctctctcgtagtacatgtctaccgtcttcatgacccaactgccgcgtactctccgtctaatggagggagagcaggatcagggactctttccggcgtcgaccttccatgtcgcaaaggaccctccaatcttgttcccgttcatgatcaccagccccgtccatgtagatcagctccaagggcaaagcagctatggtgatcagcacttggggcagcatgtcttgtctgaatctactcaacagttcaccgatcggacgatgataagtgggtcagaagtcttccctaggcggccatcgccgttcgggcagactatccaaagcatcgatggtgatatgatccagccatctgcgtatgatccatatgatatagtggagaaccagcgcacggaaggattgagcggcggcggctggacagtgtcgtcgtcctcgtcgtcaccgccggcgaagatgaagatcatgcgcaaggcgacgagcgagtatcccgagggtggagctgcaagaaagccaaggagaagagcccaagcgcaccaagacgagagccagctactgacgatgcagcagcaggctatgggcgtcgtcgttagagtgtgctccgactgcaacaccacaaagacccccttgtggaggagtggtcctcgtggccccaaggtgaattaccaatctctctgcaacgcatgtggcataaggcaaaggaaggcgaggcgggcgatggtggccgcggccgcggcagctgctgccagcaacggaggcgcgcctccacaagcggtgagcggcgttgccacccagcagcagccgaagccgaagccggccaggaaggagaagaggtcggacgccgccgaccggtcgctgccgttcaagaagcggtgcaagatggtggttgtcgatcacgctgccggtgcagcggcagccacggcgacgccagaggccgcagctgctcggagtaccaaggatcaagcggatcacgtctccggcgacaagcaggttgttgcccctgccgccgcgatgaggagtctggatcagagcgagatcgccactcctcctccctcggcggtgtcgtcgtttcatgctgctttcccggccgacgagatcaccgacgccgccatgctgctcatgaccctgtcctgtggtctcgtccgcagctagctatatatggctagcttctacctgctgagaaatccgtcgctagcaagtgcaacctgattctgcacctaaaaagtaccctagctacatctaccatatcttaatatcgcttgtgttcttttgtttgattttgtgttgagaccggaagaggaaggagatcgccaggagatatatagagtgatcacatgtccaaggcggacgacaataattatgcgaaaaactctcgctagccaggaattagtcattttctaccataagagtgagccttttaatttcaccctttttcagttcttcggctaattatatattcaagtccactatatgctatgtaactttctttgttccataatttgtattacttatatatgttgtactggatcatcggagctaaataaaaatattgaggatatacagtgatcgaggggtgttgcatggttgtggcgttttttcactgttacatttgtgtagtgtatgtcag

SEQ ID NO: 27280 - DNA, 4819 bp, Zea Mays
ccaaacccgagccccgaccgcccacctcgccgtcgccgccgcaggcgatcagccgccgccgcactaatccctgccttgtccttatcataaaaccgcggcgctggagctctgatgcttcccaccccatggtcttccacatttccctcgcccgccactggcttcctccttctccttgccctcctccccgtcgcatcggggacctcagtccctaccctaggaggtttcgatcgtggagaggcggccggcgcggacgcatattcgatccttacgtttcacgactacacgccgcctccgccccccgttctgccgccgccaccggcggccccggcggcgacctgcgcgggggacctccacggcgtgggagaccttgacacccagtgcgtggtccatgagtcggtgaggctgggtggtggggtgttcatcagtggcaacggcagcctcctaatccttgatggcgtcgcggttacctgcgagcggcctgggtgcgtcgtctctgccaacctctccggcgatctcctcctcgggaacaggtcccgcgtcgtggccgggtgggtttccctcgcggcggccaacatcacactcggcgaggacgctgttattgacaccaccgcgcttggcggtgacccgccggaccagaccagtggtgtacccactgggacgtatggggatggcggtggacatggcggccgtggcgccagctgcttcgttaagaaggggcaagcacaagaggactcatggggtggtgattcctacgcttggtctgcactgaagaccccaaataactatggaagcaaagggggatccactaccgtcgagaaggactatggtggtgggggtggcggtgtcgtgtggttgttcgctgaagagattgtgatgaatggaacagttcttgctgatggtggagacggtggcaccaagggtgggggtggctctggggggagcatctatctgaaggcttcaacaatgcaaggaggtggcaaaataagtgcttgtggaggcaatggtttagctggtggaggtggaggacgtgtttccatcgatgttttcagtaggcatgacgacacacaaatttttgtccatggggggaagagttcaggatgcttggacaatgcgggagcagctggaacactttatgaagcagtacctaagagtattactgttagcaacaataacttgagcacacaaacggatacagtttttctagaccccccatatgagccactctggacaaatgtttttgtcagaaattgtgccaaagtttctcttcccttacggtggagccgtattcaggctcaaggacagattcttttatctggtgctactctaacttttggcctgacacattatccatattcagaatttgagctgttggctgaggaacttcttatgagtgattccacaatcaaggtctttggcgctttacgaatgtcggtaaagatgctccttatgtggaactcaagaatgactattgatggtggccgagaactaggtgtgggaacttcattactagaaggtagcaatttgatagtgctgaaggaagcatctgtcatacattcaaatgctaatctagggattcatggtcaaggagttctaaatttatctggtcaaggagatacaatagaggcacaacgccttattttatcactgttttacaacattttggttggacctggagctgttctaaggggcccacttataaatggaagtcgtgatgagatggccccaaaactgaattgcgaagatgagagttgccctatggaaatctttcatccacctgaggattgcaacttgaactcttcattgccttttactttacagatatgccgtgttgaagatattgatgtttctggccttgttcaaggaactgtagttaattttaacagagcaagaagtgtcactgttcagacatctgggaccataagtgcaacaggattaggctgccgaggtggcattggaagaggaaaaatgttaagcagtgggtttagtggtgggggtgggcatggtggtaaaggcggtgatggcatttataatggtggtcatgtagagggtggatctgcgtatggtcatgctgatttaccatgtgaacttggcagtggcagcggtaatgtcagtggatcttcaactgctggtggtggtataatagtgatgggttctttggaacaatctctgccgaacctctccctttctggctcgattgaggcaaatggtggtaattttactggtttgatgtctcatgccacaattggaggacctggtggcggttctggtggtacaattcttctttttgtgcggacattactcttgaagaaggactctgtactttctagtgttgggggagttggtggcaatggcagtggtggaggtggagggggtcggattcacttccactggtttgatattcccactggagatgattatattccttttgcaaccattaaaggaacaatacttgcaagaggaggagtcagtgaagggcaaggtttctctggtgagaatggaaccatcacaggaaaggattgcccaaaaggtctttatggaacattttgcaaggaatgtccctcaggaacatacaagaatattactggatcatctaagtccatgtgctcaccatgccctccaaatgagctacctcgccgtgctgtatacataagcgtccgaggaggtgttgctgaacccccatgcccatacaaatgcgtgtctgatagatatagcatgcctcactgttttactgcccttgaagagctgatatacacgtttggtggaccttggttgtttggtctgcttctgtctggccttcttgttttattagctcttgttttgagtattgctcggatgaagtttgttggtactgatgagttgcctggaccagcaccaactcaacagagctcccaaattgatcactcttttcccttccttgaatcactgaatgaggtattggaaacaaacagggcagaagaatctcactgtcatgtgcacaggatgtatttcatgggcccaaacaccttcagtgaaccttggcatctcccacacaccccgccagagcagatttcagagattgtgtacgaagatgcatttaacaaatttgttgatgagatcaatgctcttgcagcctatcagtggtgggaaggttcagtttttagcatcctatgtatactttcatttcccctggcatggtcgtggcaacagtggcgcaggagaaagaaattacaaaaactacgtgaatttgttcgttctgaatatgatcattcatgtttacggtcctgccgttcgcgtgcactttacgaggggctaaaggtagctgctactccagatttaatgctgggttatttagatttcttccttggtggggatgagaaaaggactgatcttcctcctcggcttcatcaaaggtttccaatgtccctgatctttggaggtgatggaagctatatggctccattttcacttcatagcgacagagtggtcacaactcttataagtcaggctgtgccatcatctatatggcatcgtcttgtagctggattgaatgcccagttgcgtttggttcgccgtggaaatctaaacacatcacttctccctgtgctcaaatggctagaaagtcatgcaaatcctgaattgaacacgtaccgtgtgcgtgttgaccttgcatggtttcaaactacagcattaggttaccttcagtttggtcttgtccttcatgctgtcgggggagtggtggctgctgaactccaggatggctgtacaagtaaaaccgatcagcattcagtaaaccagaatacatgcactgactctcaaatgggccactcaaggaccaatgatgttctgcgtaaaaggataactggcaccattctcaatgttgacaacttaaggatgcttggtggcaggagaggtttcttttaccttctctctcttatcttgcacaatacaaaaccagttggacatcaggaccttgtcggcttagtcatctcaatactgcttcttgcagatttcagcttagtcttgcttactttcctccaactatattcatattctatggtcgatgttctgttagtcttgttcattcttcctcttgggatactagcaccatttccagctgggataaatgctctttttagtcatgaacagcggcggtcagctggtcttgctcgtgtctatgccttgtggaatattacatcactggttaatgttgttgtggcttttgtatgtggatttctgcattacaagtcatcaagcaaaaaacatccaagcatgcagccgtggagttttggtggggaggaaaccagctggtcgctattccctataggacttgttctatgcaagtgcattcaagcaaggcttgttgattggcatgtatctatcttggagatccaggatcgtgcagtttatagcaatgacccaacaatattttggcagtgaaagcatttcgatttacaggagttctcatgaggagagcttaatgcaactcaagtttttgtgggagttgataaaaggaaggctatggagttagtctgttctttgtccgcccagtcaggggaagcatgtacaaagtagatgctggaaacgggtttaattagttgaccgattcgttgtaggatttaggatttagacaccatagaattatagattacccaaggtaatctcaaagagatggtggaaaacatatatacttcttttgtttaaagctttgtcttttgcattgatgttgagctgggaaacgggtgaggcatcaaatagagcttttttcccctctgttaagattaagacaaatgttaacgtgctgatgttttattcaagatctggttgccatatgttcccgtga

SEQ ID NO: 27281 - DNA, 1437 bp, Zea Mays
cgacctgatcgtcgttgtcaacgtcgaagtcgccctccagacatgctaatcacacttcttgcgcgtcaagtagggagctgatgccggcgaactgcgcgctgatgctggcaaactgcgcgatgagcagatcaagtttggcggagaaggatgtcgtaggattggggacgccgccggccatgttacttttgttgaagctcttgatcaattaatgcctgggtttgatcccgagattgcaaaattggcgcagaggattcttattagtcctcgtaaaattgactatcacactggtgtttttgcaagcaagattaccccagcaaaggatggtaagcctgttttgattgagctgattgatgctaaaacaaaagaacacaaggagacacttgaggtggatgcagcactcatagctactggaagggcacccttcaccaaaggacttggcttggaaaatatcaatgtcgttacacaacaaggttttgttcctgttgatgagcggatgcaagttatggatgcaactggcaatgtggttcctaatttatattgtatcggagatgccaatggtaagctcatgcttgctcatgcagccagcgcacaaggaatctcagttgtggagcaaatcagtgggagggacaacattttaaatcacctaagcatcccagctgcttgtttcactcaccctgagatcagtatggttggcttgacagagccacaggctagggagaaggctgacaaggaaggatttgaaataagtgttgtaaagaccagttttaaggctaacacaaaggccctggcagagaatgaaggagatggacttgctaagatgatttatcgccctgacaccggagaaattcttggagttcatattttgggcttgcatgctgctgatctcatccatgaggcatcaaatgccattgcccttggaacccatgtgcaggacatcaagtttgctgttcatgcacacccaacgttgtctgaagttctggatgaactcttcaaggctgccaaggttaacacagctggttcgcattctatgaatgagccagttgcggtgtagagaggagccatagttgaaacaatctatctgctgcagccccacaccccagttatattgcctttagtacttaactagcctgctactcagaaaactgattttgtagccatttgcggacattttcgttatgagattcaggattagtgccagcactatctatttcatgagaaaatagaaatccaatgatctgtcccatgtatggaaaaatgtaaattttgtagtccttgtagagtaaatgtagtgcctttacgtggcaaaactcgctcttatgaatctatgattacttcaattcataagatgggcttgtttggtcagcattatgaatttttacagcttaggtcagcagctaccgtatctcattctttatttcattcttatttcaatcttca

SEQ ID NO: 27282 - DNA, 872 bp, Zea Mays
atggcctctggccgcttgccccctgcactcgctgtagctagcccccaccccaccgcgctctcccgcgccggtctggccgcgcgcgtctttgctgctcttgtcaaacacgtcttcaatccgctgccccctgccctggtaaaaaaagaggaagaaggagacgctgatgctaaccgccgcactactctactggtgcgtctgctgcgcatgcgcggagcaacagatgctacccggcgtacaaacacgcaagcagttccagatcgacgaggcatggcactactggcgggtcacagcgactctgaaccgatcactcaccacgactccgaaccggaccaacggcacgcccggccatggcccgtggccgtgctctcagaagaagccgcggcggcgcggcgggggcagcaagagggcgacgagcatcaaggcggcgacggcgacgagggccaacgccacgaggatgctctcgtcgacggtgagcaggcacaccttccccatggacggactcgcagcctggggaatggcggtgcagaggggccttcagctgcaagcgggcaagctcaagagcgatgcctggatgcgcgtccttgtccttgttatagttgttgaagtatctccgtctctctgggtcaactgctcttcgaaagcacttcttttttttttcctttgaagcgttgcgatgacatgcaccaaacaagcgtcagtcagtatattgactagttggtacaacggctgcaagtaatgtaatgtacactgggagtgggacgtgaattgtgagctacgagtctacgaccacgcagcaagtcctcggtcttgttagcataagcttcaaggttctggttcaatacttcacagaatcatgagttcggtgatggctg

SEQ ID NO: 27283 - DNA, 10997 bp, Zea Mays
cgccgttgcctccgccgtccgcctccttctccaagcaaacggaactgaaaagaaaaggtcccgccccggcggcggcacccgactctccatccaccgctcgcctccccttgcccctcctctcgtctactcgtcaccctacgctcggctccatcctccccgcctccccacgtgtcctcccgctacatgggagcgcgggctccctagggtgcctcgaccaccgccgccgccatgttcgagggggtggtaagccaggtgctctatggcctcctccgccgctacgtcaagggcatccagaaggagcagcttaagatcggcatctggaaggaagaaatactgcttgaaaatgtagagctgattctggaagcctttgactacctgcagctgccattcgcgctgaaaaatggacgaattgggaagctaagcatccggattccttggaaaaagctaggatgggaccctatcattattgtcatagaagatgtctatgtttgcgcatgcccaagggaggactctgagtggagctcagattctctggacaagagggaactagctggaaagttggctaaacttaatgccattgagcttgctaaattttctagaagagttacagataatcaaacgggacaatcatttttgtcctacatatcagcaaagatactggatagtatccaagtttctatgcgaaatgttcatattgtatacatggatacccacaacggtcaagggaactttgtatttggtttggaattcacaagtctctcaatacaaacagatacccagaagcaaagttttacaatttcattgatgactaggtcaagacaagatgaagtaaataagataattgagatatcaaatgttggaatttactgtcatcagctggaagaagagcaggatctatgccatgttggtgctcttgaaaatgaccactcaagggattatcttgtaaatccattttgtgtgactgtatctgtgcttgctaacaaagctgccaagcttgacggtacccctcagtataacatgactgcagagctaactgcattggccctatctgttgatgaaatccagctccaacaaatcttaaatctttgtgattacttcactatctgtgctttgcgaacaaaatatggtcgttaccgtccttctcaaagctctttatctaagagatgtaaaggttggtacagaatgtggtggcaatatgctcagaattctgtattagcagatgttcgcagaagactgaagaaaacttcatggcgttatttgaagcagcgactgaatcaccaactaagatatgtgaaattgtacagaatgaaattggagcttttacagaaaggacagattgttagtgaagacattctacaagagttggaaaatatggacagagaatgtgatatagatgacatacttaactacagaacgattgcagagcaacaactgcaggaatcattggtgaaatcttccatagatactcatagtccaggaagtcctcgaagcgatgaacagttggcaggggcaagccagggatggttaaactggctttctcttggaatgcttggtgttggtggaacagctgatagtagctcatttgctggtgttatttctgaagacattattaaggatatatatgagggaacagaatttcgtccagtttcttctgctgaaaattgtttgaagaaagaaaactactattctttgtttgttagactatctatttctcagatagtcacaactgtcacctccaggaggtttggcacgaagcttgtagatacaatgttttctgggcttggtatggaatgtaaaatatgggatgatgcagcaactattcttgcttggcttgattctcttcgggttatcaacccactgaataaaacgaaaatcttatgggctgaaaagtgtagcaccggtgatggtcttggggcacctgttgtcagtatccaagtcgactttcccaagtcaaatgaaagatcagaagcttcaacaagggtcgttgtccaggaattcaacgccatctatgaaccagaattctttgttaatgtcctgtacatctacaatgtgttttccgctttccaatttcagcatgatagggtactttcttctctaaatcggttcaataatttgggaacaagacttgtctccaaactgaagtacatgtctgctaatcgtaaaaaacttatttgggatttgaggatttatcatttcgtcattaggataccatcacagaattgtgaaaggaaagaacttgccatggttattgatgctggggatgtattcattcagtctaaagatacaattgacgatatttctcgaacacaagaaagcaattcctttcttgatcacatatcaaaaagtcttcctagttatttttctgatgatctgttactcggtatccagttggatgagctttataaccagtttgagcttggccttactgggtttcaggtgaaggtattgttgcctgacagacataatgtttcctctacactgattaagcttgatgcttccattgcacttcgattgtgtgtattcctagatgaaccagtgctaaaacaattggaggtcggttttattgtgtcatctattgatgcatacctctctcagacaatgtacagtaccattgttaatttgcctagaatgaaagaaactaaccttttcaagaacagcgtatttgataataccaagacacatgtacccaagaaattggccttgaatgtgtctgtgtctctgaagctcgccaagttaggtttacatgttgaccttgatggtaattttgaggaaagttctggtctcattgttggcattgaagacattgatatcaggtatgctatctgtgaattgtcagatctttctcttgccatgaagacggtcaatgttactttcagatattggaaggataaatcagattcacatgtgctatgcttatctgggaacttaacacgatgtcctgaaaattctgttgaaacttgtttggatctgcattatagaactcacaagcatgacgatcaaatacatcatgtataccggctgattttatgtgatgttgatctgcatgttaacccatctgttattggtcagataaggatgtttttaagaaaacttgattcaggaccttcaattggcagtgatgttgaatccacaatgattggtcagagttccatgaaatccggggcagctaatggcatacttcccatgttctttttgtcaaatttatgtggtgcagatggcactgtattcgcaggagtttctgttgaccacttcccatttttagttgcagatcacagttgtggatataattttgggtgcttaggaactcaaaatgttgaagcacaagaaagtttatactcaaagaatgagcactgtcatgacacttcaggtttgaatggttatcatgcatcagatctcaccagcaatacatacggtaaaacccagcgttcagattgttcatctggctcatcaaatgaccccaagaatgccagcagaactgttctggatctatcacttatttctgttagaatacattttcctgaatcatgtggtactttagtaacaataaccattcctgaatcgatatcaacactcacttattttgatgcaagctcatgggacttactattgtctgctaacaatttgactcttgcttcaccatggactccaccaaatgtcaacgagctggtctggggcacagcttcacatcgcaatgctagtgtactcaacgttcgagttaaaaaggacttacctgcactgtcaaccgaagtatgtgttggaattcaaaacgtttgttgtgtattaccatccaagttactggctatgtttgttggattctttttgttggatgattggaatcgtattgcagaacaggaattccttgtggcagataacaaccttgaaggcttgagagaatcacatgactgtgtaacatataaatttgatatcagtgattgtgttgtattttttcctgtggaagagcaaggtttatcgtgtctaaagctggaggttccacattttttctgtgagttcattgcgaacggaagctctgtagaatttgcaaagcgtatccccaaagaattcttcagttcagagtgcatagtttccagaagagttgatgtcatctgcatatatgcaagaaatgcatccatatcacttctaattgtaagcgaccaaacagattttatgctaaagcttgatgagaacgttcctaagagaatccattctcttattgaaaagcttgatgccgacgtatggattcaggttccttgcaaagatataccatactcgcagcagcctacttcacctacctccgttatgagcaaaatatcacgatgcaacttgattgctgaagatttatattttataaatgggatggagacagttattggtgttgttgaccagttgatttcgatcggcaatgaaagtaaaatgtacaaaggcaatgcctcacagtttttagatcatagaagtttctgtgagggcaaccctgatcctaatgagtgtaccaatctcactatttcgatcaaggatctgatgattctcttgggccagtctaaagctaaaggtctggcactggagaggattgccactgcaaacatggagtttgatgtttctgctgtactagttggtgaaaaaccagagcgcatagactttgacgttgtttctttaacactgcagtcacctggtggttacacactcatctccattgtttcggatgggccactatctcctgtttttttcaagtttacaaagcaccatactggacaagatgagatattactaagtgtacccctttttgagatctggttatatttacaggattggaatacaattatcaatcattcccattcatacataaagacagaagtaaacagtatgcctgtggagcatgcagctgctttgtctcagtttccagaaatggtatcgtcaccacttattgcatcagaatttggttcaccagatgacttcaacttagtggtaacatgtgaaactatttctggtgtactccatatacctatctgggggaaagaagaaaatcacacaagcaatcacatgggtgtgactcctgcttcttttccaatggaagtgggcactcatgagacagatgatattcaatattgtgaaccaaaaggttgcaagtttgtcaccttaacttttgatactaaacattttgtggtgatgtcaggtgatagctgcataaattttagatgtgatttagagagattgaaggtattgctggaaatgattcaagagaataagggtacctctgttccatttgtgcatatatctaaggttaaatcttctggttatgttcgtcaatcagaaaggaatttggaacatctttctgttgatctacaagctgaatacatggatgttagtttttcacaccagatatttaacttctggcataacatggaactcaaatttcctgctgcatcatctgcatcctctttttattctgtggcattcaaggcaggattgaggaaagggtctcttctgctaagcgatggaaggtggagcagtcatggacctgtaatagagacgttattgaagaatctaactgtgcagttcagtcaaatgaaggataggacagaagtgtctgcttttgttgaccttttagtaaattacaataacattgataaggttatgtgggaaccttttgtagaaccctcaagatttcagttaaatatgctaagaaaatgtggtgattgtggattggatatatcacccagtactgatgtgtgtttaagttcaagcaagcagcttaatctgaatatatcagaacccttaattgaggctcttctcagacttaaccagatgattacagattctcttgatccgagtaatggtagtggtatttgggaagatcctggaatcttgagattaaaccatgatgatgttcgtaccagaagatacgcaccatactttctctcgaatgacacatcattgccctttaggttcaaggtgtaccgaggtgctgttaattcagatgatattggcagtttctctgtaatagatgaaaactctgtgccggcggggtatgctgtcccaatttacgtcgaagaaactcctgatgaatttttcttccaacacagagaagcacgatcatcagaccatctcatcgagaaacgaatgagtgctctatcacactacatgatctccattgagtttgatggaacatcaggcccttcaaaaccaatgtcaatggaccttgtgggcatttacttctttgaagtaaatttctcttcaagtaaaaagccaattctcggcgaagaaagtttaggagcattttcgtctaatgcaaaaggcaacgatgggttaattgtgcctgtggtgctcgatgtttccttacagaactacagcaagcgtatacgagtttattcgacggtaatactatacaatgcaacatcaatgcccctcgagttgaggtttgatataccatttggtcttgcatcaaaggtaattgggcccattcctccaaacaaagagattccactgccggttcatttgtctgaagctggccagattaggtggcaccctgtcggcagaacatacttgtggagtgaaacccgctccttgtcaagtttgctttcacgtgaaaacagggttgggttcatgaaatcatctgtttgttatccttctcaccctagtaatgacccatttcgttgttgtgtatctgttgaagaatacaatgtcccttcatctgttagtaccaagaaaaaacagttgtgcagtgaaagattgaacacacaagtttctggaagttctactccaaatacttttaagcaaaatttgacaaggacacattttatacggcatgtcaagcttaataccccgcttctcataaagaactatctgcctgtttacatttccttggcaatagataatggtgggtctgcgcgggtaatttcgctaaaggaggtagggtctgcctctattttgtttgttgatccctccaatgatcttggaattacaattgatattcaagattataggtccttgaacataaagtttccccgggctgaatcattctcaactacagccaagttaaatggcttcaaattctccataactgagtcaattactttctactcaaatttgtctaattttcctcttaatgttatgctggaaaaatcaatggatgctcgttctggcgcaagagagttgtatctttctgttccattcttgttgtacaattgcacagatctattgcttactgtcactgaaagcagctctgagaggagtgggcctactcttgtgattccccctagttttgaattggatggatatgcaagacatatgcttgaaaagggtggtctttctcttgtcaatccttctgtacaatgctttacaggcaaaatgccccagatatatttgatggatggacactgctcttcttcagatataagttgtacacgtaacagtgagtctgtaaagaaagatttggacaacagtgttaaagcttatatgtttgctcctgatgggcacactccagcaactgaactttcagttaagttgaatgcttctccgcctaataatggaactgaaacaactcggcgaaattggtcaaatcccttcctccttgtccctgccagtggttcaacaaatgttactattcctcagtcatctacttctggtgccttcttagttgcagtggcatctatacctgtttcaacagaactttttggcaggacaagggctattgctttcaggccaagatacgtcatatgtaatgcatgcagcaatgatttgttctttcgacaaaaaggaacacggttttctaagcacttaagttctgggcaacactcttttcttcactggtctgatacagccagagatctgctggtatccattcggattgatggcccaggatggcaatggtcaggaagttttttccctgatcacctgggagatgctcaattgaaaatgcggaatagtgcctcaggtttatcatatatggttcgagttgaagtgcaaaatgccgatctagacttaaacagcaatagattttctggaaaaaataatatcaatactggtacagtactgattctgctttctgatgataagactggttttgtaccttacaggatcgacaatttttcaatggagaaactgcggatatatcaacagagatgtgaatctattgaaacaattgtttatccctacacatcctgtcaatatgcttgggatgagccttgctatcctcatcgccttactgttgagattcctggagaacggagtttgggtacattcaatctggacattctcaatgatgatgttcatgtgtcactaccatccacatccgagaaagctgcaagacaattctgcatctcaatacatgcggaaggagcaattaaggtgctaagtgttcttgattcaaattgccacaataaggaaacaaatgaaaaggattttctgggatcaaaggaacctaaagttgttgatcacaaactggagcttgatatgaattttgctgaggttatcaaattacacttaccattcatcgggatatctttaataagttcttgtccacaggaattgttgtttgcttctgccaaggagatgactgttgttgccatgcagagtttagatcagcagagatttacggttcagatacaatctatgcaaatcgataatcagttccctgatagcccacacccggtcatgttgtcatttgagggcagtcataagggaaaatccatgaacttttttaagagtaaagatactaagctgaaatcagcaaatgacattctttccagtaccagtgaacctgtgctgcagtttgctgcagctaaatggagaaccaaagatgtatcatttgtttcctatcaatatataaacataagtctagcacctcttcgccttgaacttgaagaacgacttgtcttgagcatgattgaattttttagatctgtttcctctcgaataaatattggacacttggagaaaagtattgagctaagtataggtggtgctacggacatgttaagagaatatgaaaaaatctcaaagaatatatcagacaagctcctggtgcaagacagtgaattgttgccttctgttgtcccagttggggctccatggcaacagatacaccttttagccagaaaacagaaaaaggtgtacattgaattgtttcagttgactcctgtcaagttgactttcagttttacgagcacaccttggctcaataggaatgaaggtggttcagaccccagcgtaggtttcaacaacgctactgcaatccagagaggtcttatggccctcttggacgttgaaggagtaccagtttaccttggagaaattatagtggaaaatcttatggccagctggcaatctgttcaggacattcttatgaggcattatagtaggcaaatcctccacgaactttataaggttttgggttctgctggcgttataggaaatcctatgggttttgctaggaatgttgggtttggtttaaaggacttcatatctgcttcaagaaaagggaaattgcagagcccagttgaactattaaacggtatagcacaaggttcaaagactcttattggaagtacggtttatgcagtcagcagtgccacttctcacttcagtaaaactgcttataagggccttgttgcctttacatatgatgagcaagctgcttcgaagatggaagaacgggaaagacagctaggtttgcatggggaaggagtactgaatggttttctagagggtctgactgggctccttcaatcaccgattaggggagctgagaaacatggtcttcccggggtcatctcaggtttagcaatgggaacagctgggcttgtggcacggcctatggctagcattcttgaagccacaggcagaactgcccagagcattagaaaccgaagcaaccctcacgaatccaactacttgcgagtacgtttccccaggcctgttgccagagatcgccctttgtttccctactcctgggaagaagccatcggtgaatcgttgcttgcccaagctgacagtggcagactaaaggaggagacatttgtcatgtgcaagacactcaagggggctgggaagttccttgtgctaactgagaagctgcttctgctagtctcaagcccatacttggtggatctaggatcgcctcggttcatcggtgttcctcctgacccgcagtggtcgatcgacacggagatgcacctcaagagcgttgttcatctggacaggtctcaggaggtagtgaacattgttgggagcaacggacagacctcacctagggacaaaagaggtggcacgagaaacagggtcatgagctcggccttcgtccccctgtttcacctcagcatagagctgccaaatgaggaggatgcagaagggacggtgcaggtcctacaggcactcatcgagaagggcaaggcacggaggtgggacaagaacatcctacaccggagcaacatcagttgaggttttcacaacagtagtagaggttggtgttttgattgaagtggaagataaactaaattccaccccgtgactcaggtggattaaatatacaaacaaggcctcaaggcagagcagtcaccagcatacataagcttagtgtgaataagaaaacaaagtgttccataggtggtcaccgttggacacgtgcttcggttttgttttaagcttagtgtgaataagaaaacaaagtgttccataggtgatcaccgttggacacgtgcttcggttttttttttttttttgcggtctaggtgtagcttctagaagttttgtcgacggctcttgtaaatgaagtgtgagagggcttatgttatgtgtagcaacaccactgttttatgccacggctatgtttacaaacttcgccgttcatgggccatggatatttctgatttcaccataatgaacttagcggaggtagggggtacgctgacaaacgtattgtcgagtagtcgaactgtcattaaaggttgtggatccaggatttaaatctaggatagtcaagaataaaaaatatgtaataccatgta

SEQ ID NO: 27284 - DNA, 2119 bp, Zea Mays
cgagacccagacaaaagcagccagcggaaaagaggggaaccctctcatcccatcccaccagttccccaattccatttctccatccatgacagctcgccatttccccacctgttcctacgctaccgccacctaaaaaaaattccaggcacctagtgcttcccattccaatcttgctcaaaggtgactcctttctgttccttttgttgcaattcttgcttcttctcttctccacaaaccaagaatctcttcaccggttattcgcaggtcatttcatttcggccggtgcctattttaggccgattggagggaaggctggtctgtgttttattttcctgctgcgagcgctttcttgggcgagttgaatttgggcgcctcttgctccaggcagtattttatcgagctagagtctggtacccggtgattcttgcttggtccaggcgccaaggcgaggaattgggcctagctccagctcaaatctgtgccttgttgcagacagaaggatttctgcatgggcgagttgaatttgggcgcctcttgctccaggcagtattttatcgagctagagtctggtacccggtgattcttgcttggtccaggcgccaaggcgaggaattgggcctagctccagctcaaatctgtgccttgttgcagacagaaggatttctgcatgggcgaccataactaagatgtgagatttggtggcgtcagctcggctggtgggtgattctcggtgcgtacacagacacatccctggagcctggaggcttgagctgatttggcgaggaggacagtgcaggagagagatgtctttcaggagcctgattcaggacatgaaggacgagttcgggagcatctcgcggcatagcctgcggtcccggtctcaccgctccgccgggaacgcggcgcgggcggcggccgcgggaccgtcggaggcgatggatcagagctgctggtcgcagctgccccccgagctcctgcgggaggtgctggtgaggatcgaggcatcggagagctggtggccagcgcgcaagaacgtggtgtcaggcgccggcgtctgccggacctggaggggcatcatgaaggaggccgtgcgcgtcccggaggtgtcagggaagctcacgttccccatctcacttaagcagcctggcccaagggatggcactcttaaatgtttcatcaggagaaatcgaactactcagacatattatctgtatattggattgacagaagcattggctgatgatgggaagtttctacttgctgcacgcaagtgtcgtaagcccacctgcacagactacctaatttctcttgataaggtcgatatgtcaaagggaagcagcacctatattggcaagctaagatcaaatttccttggaacaaagttcactgtctatgatgctcatccaccatatgatggtgctgcggtctcaaagagtcgctctgcacgtgtggttggtttgaagcaggtctcccctagagttccggctggaaattatcccgtttcacatatttcttacgagctaaatgttctgggctccagaggtccaagaaggatgaactgtgttatggattccatccctgcatcagctgttaaggaaggagggaaaactcctacacagactgaatttccacttagcagccttgactctttcccatcatttccattcttcagatctaaatcagctcggatagacagttcaacgtcgcaatcatccagtcagagggaagataggttggtgcttaagaacaagtctcctaggtggcacgaacagctgcagtgttggtgcctgaatttccgtgggcgggtcactgttgcctcggttaaaaacttccagttggtggcttctgaggacaatggaccagagaaccaagagagtgacaaggtgattctccaattcggaaagatcggaaaagacttgttcaccatggactacggttatccaatatcggcatttcaagcttttgcaatttgtctgagcagttttgatacaaaaattgcctgcgaatgaggcaaggccattgtttttaaaagcgcaaggcgaggcgcgacgttggatcaacgccgctggacgcctagacgatgcctagacagtttttttaaaagcgtaaggtgaggtgt

SEQ ID NO: 27285 - DNA, 870 bp, Zea Mays
agtacgccgtttgcgccatcgttacgtccaccagaaggaaaacccaagccaacgacgacggcacggccaagaaacggggagtgccttccaaggcgaccgccccctctcgcgctccatacgtccatccgtcggcccagagccacaagataacgcagccaagaacaagagacaccgccgagcgagcgaggcggggagaagcaggtccaggaccaggagaaaggaaaaggaagcccagctctctctagcctggagccgagaagccgaggtgaggtcgtggttggcctgggagcgaggaggaatttcgaggcgggaagaagcagagatgatttagcggtttggaagctggttgatgggtgcaattcgttttgtgctgctgtagggggcgaaggagcagcaaggcatggaggagcccgttccggctgatccccccaggattttctggaagtcaaggagttcagccaatggccggagcctgcaacaagagcctgacaaagacgctaccgaggaaactaacgagcaggctcaagaggaacccatgaagaccgacgacgcaacggacacagcagcagcagcagcagctacagctgagccgtacccgaaagctaacctatccgagaagcggaaggctctcttcgagcctctcgagccgatcaacggcaagcgcggcgctgctgagacgctgctcccaccgccggactttgagcccgcgtcgtaccccaaggggtggctggtgggcaagaaacgcaagctcgtcaacgtagacgtcgtggagagcatgcggaggattgcgatccaggaaatgaacagaaaggcagttttgttgctgaacatgcatgcgtgcatcaaatgctgaccaatgttgttgctgtg

SEQ ID NO: 27286 - DNA, 2029 bp, Zea Mays
ttttttgcttcttttttttttttttttttttttgaaaaaaaacagggcaacgaaggggaggtgggaactgggaagacctgtttgataaattacagaggatacttcgccaaccgaacaagcctaagtgggggtgatgatgagccaccggaggcgttctcgcgctgccggctcgccgcctggcgacgccagtacgggtacgccccctactcctgagaagtcgggacgggtccggccgtgggcggcgacagcgtcgaaccggaaggtgctggtgttcgcgctggcgttccgcgcggccaacgcgctgctcgtgcgcacgtacttcaaccctgatgagcactggcagtgtctcgaggtcgcccaccgcgtcgccttcgggtatggtcatctcacgtgggagtggaagcggggcctgcgcagttatctccacccattgctctttgctgctttgtacaagaccctggcgctactccatatggacactccgtgggttatggtgatggctccacgtctcgtgcaatctttgtttgcagcttttggagatctatacctatataaactttccaaacttattttcaatggtcaagttgctaagtggacgttattttctcagttggttaactggttcatgtttttctgtatcacacggactctatcaaacagcttggagactgttttgaccgtggctggactctattattggtttgctgcaatagagtcttccaaggcaacctcaatcgtttcaaagcagcacgcggcctgtgaacaaagtatcccatcaagaaaagtggctcttctgatagcagccttgtcatgtgccattcggccaacaagtgctgtaacatggctatatgttggccttttggattttattcagatgaaatcaaaatgtcgctttatccttcttgatgtcattccagtgggggccattgtccttgcagtaacaacactccttgattggtggatgtatggttcctgggtcatagtgccgcttaattttttgaaattcaacttattgtcttccggaggagactactatggaacacatgtcttccattggtactttacacagggttttccatccatgatttggacattcttaccatttgcattgtgcggtattgtaaagtctcaggaatggaggctttcaggtctaattgcttgggtgttaggggtttacagcattcttggacataaagaattcaggtttgttcttccagtgctacctttagcattgatgttctcaggttactgcttagcttccatgtcacagtccaagggcaaaaatcagcataggaaaggaagtctttcaaggctgcagctttctgttattcttctcgtcataaccaatgttcccatggctttatatatgtccttattccatcaaaggggaacagaagacgttatgtattatttgtcaaaagaagcctatgatggaagagtgaggagtgttctctttctcatgccttgtcattcaacaccttactactcaaccttacattacaatctacctatgcgttttttggactgcactcctagtgatagcaaagggaccttggatgagtcagatcgtttccttacaagtccatctgagtttgtcggcgatgtttttggaaatttatctgcattcagtcacattgtattattcgagtcagaagaaagacatgttctccagttgcttctgcacaattcctttcttgagatgaggaggtttttccactcacatttcaagattgacagagaccttcagtcggctgttgtggtttattcatggagggatgtgctatgatttagtactgatgtggcagaaaatgcctgttagctcgtgtaacaatccccacatgtttaatgttgtttcagcttttcatttgagaaatgagttgtggcattgctggatacttctgatatcttaatcctcttggaatgagatgttatgttacttttacccaagtgctttacgacggcataacaattcacagttcgctttcttgcatcgagtctctatgtccatgatatctgcttctaagataaa

SEQ ID NO: 27287 - DNA, 5174 bp, Zea Mays
gttattgtctagtccggattggttcatagatcacattgtaacaaaaaaggaagtgcggctatggcttagttccgcagagtgtttggttgatgcttatgtcgtgctactgaggaagttagctcatggtcaaatgcctacatatgatgctcaagcaagtagtgcgacattgatggaaacactcctatcacaatattcatttcatcaaaaatttctgggaattgattcaacaatttttgggttatcaaaacatttattcttggtgcaaaaggatcttggattatgctatatacctgagatttctgttgtccttagctctctttcttactctctcactgggctagagtttgaacatgaacagctagctgccttgaaacttctgagctttttgattgattggaaatatgaaaatgtgcttgacagtaaagaacaaacacatcacgtcagtgtggagcttctctgtgttctggcagttatcaaccttaccatttcaccatccaaatctgtgaaagcagtggcatatcatgttctgtcaaggttcagcttgtttgttttagacttgccagcttctcattcatcagaggaacaagatatttcaacgagttaccacataagcaaacctgcacttcttcttcctaaacttttgcatcatctatggtccaagccatcttcatcatgcttcagttttatgaagtacatagctaccaaggcctcacctgattctggccagagtgacttggaagcaaattattggactcatcaaataaatgcctatctgacagcccttcacagagaaaagcatacattagatgtcaggtcttcaaaaacgacttcagtagccatatcatctctgataagctctgtagcatctgttttggtaatgcatccaaaacttggtacttctgcagcagaatctttggccatgcttggcacatcggacccaagattgggtatgccactttttgtagttatcctcttctacagcaagattctatgcagcagcggtaaattttcagcggaaatctcgctcagtttgctagagtcattgccatcacttgctatacatggttttgttcttccactagctctgcaatggatatcgccaatgcttaaaagggactcaaattcggttttgtatgctatggctgttcgattactctgcaagatatgggctgtaaccgactgggcatttccaaacttacaagtggttctggatcctgagaatttttccaatttcatctctgacagagagatctctgcaagtattgccacatcaatacgcgatgtttgcaagcaaaatccagatagaggcgttgatataatattatctgtctctttttgtattgagagtcgtgattctgtggttcaagctcttggcctcgagagcctctcgtacctttgtgaagcagatgtggtcgatttctacacggcgtggaaagttatatcaaagcaggtgcttgattattacgttgagcctgctgttgctcacagtttgtgtattctgttgaggtgcggagcgatggatgctgaggcatattctgtaatatctggtaaccttgtaagaacattgtggagaattggaacatccaagaaaaataatcccgatccactctgggataaagcaagaggaactgcttttcactccttgtccaactacaaggtatcacttattcaagatgctattcctgatttctggaaactaaactatgagttctttacgaacgaacataatctggcagttctcaaggccatggagcaccttcaagatgagatcatcagatatgagcacatatgcttagtgtcactcttaactgatgaaccctgttcacatagaaatcgtcgtcgagtgactactgacaaaagaactgcagtgcataaatttgagaagctactggaggtttttcctcgggcggtatttaaagggatgttatctcatcatcagttgcctggtgctgctcttttaactctcaattttactccaaaggacatacttaatgaagggaaacctaaggatttgcctagagttcattccgcttttgagcaagcttttgtggaaattgctgaatctatgtatgtgtcaagaaacatagtggtagctcttcttgccttgcagtcatggaagtcatttgtttccaactggatgcaagcagttgtggcattgcttgacactaaagactcgtcaaagttgaacaaagcaatgaaagctgctaatgatatatttaagattctgtgcgaccaagttccggtgtctactcctcaagttgttgttaacatagctcttgttattggggcactggccttgattgttccgccaactgctcatttggtagtatcttcggtatcagattttcttttaaaatggttgcttcaatacgagcatgagcacaagcaatggtcagcagctctctctcttggattaatattcaattgttttcatcctacggacaaaaagagcagacttcaggttattaatgggtttcttgaggttatctcaaaaactgaaagctgtcttgtaaaaggagcttgtggactggcattaggctatgtttgccacggtcttttgacaagagcacataatgctgttgattcagaagtagaggctattacacaactcaatgagcgtgcatcagttgaggatattcttcatgctttggttaccttgttaattcaactatgtccatcctcatgctattctctgaagaagcttagtatatacggaatatcctccatgggagggatggaagaaaatattcatagcttcagtgatgatccttgggctgtcgctggacttgtcattggtctgggaaactctgttgttgctctgtatagacttggagcttatgaagcagttactgaagtcaaggatgtattgatatcatggataccaaatgttgattcgaactctgcattatttgatgaaatagattcagtatcactatgtatgggttcatgtcttgctcttccatctgttgtggctttttgccaaagagtggagctgttgaatgacgacttggatgcattgttcaatcgctacacttctttagcttctgagctcctgaacctcaataaatctgggattatctttcagaatttgttaatggcaatctgtattggtgctggatcttttctctcttctatattgaatgatggcgtgcatgctatggaatttaatggtgttaaaggctttctggacactctcagacatatatatacccacccttttcctccccttgttcatttgggaggcatgtttggtgtggtcaacgcttttggtgcaggtgcaggagatcttactggggtgttttcaaagcctatgacttctcaaatcaaacatgaggtttccttcatacatcttaacacttaatgttctgtaaaattgttagaataatctatttagttgtgtgcacaggagtcatcttttgtgagtggttcattactgacaagtcctgttggtgagactctgtcaacatcaatgattcaggaaatatttcttcttgctaaggatgctaaggataagcacatacaagattatgctgcatgggctatttcatttctcagaagcaggtggtcgaagaatcagaatcagattctttatgaggacaatggttctaatagaagtcctgatgatcatgatcaagcttcaagtttttctgaacaaagcttagtttggaacttaagtctctggttgagtgatctaaaatttgaaaagtctggtgatgtggtgccaataagtacagttggaacagttttaaaatgcctttccaaagctccccgattgccaactacagactggggagctattgtacggaggtgcattaaagctgaggcgcagatttctcataagttaaccaatcaggaagatcctaagatactaaaggaggcatgcttatatttgactctagctcatgctgctcacataagtccccttctgcagtttttggatgatctgactgacatactcagattccagagattagatataaatgttcagtctattttgctcaaacatttgttacacctaatgaagctattctctgattcaagattggataaattgcatgaggattttaccgaatacttgtattcccccacttcttcatacttgaattactcatctgaacagaaaagcatgctaagaatgtcgttctgggaaggcatttatacgtgcctggtggatgtttctgaagaatctggtgttttttcattcattgaaaaatgcattcagtgcttgttgcctcttttgacgctccatagtgatggtcaacctgaattcatgaaagagtggtctgttgctatcttatgtcttacaaacgcccagaaaaaatggctggatgatattttgcagattcgcagtactgccttagtcaatgaaggacatgttgatgttgcaaaaaagattatcctcagagcaagattgtgtgcaactggttgtggttcaacacatgagctgggaaatataaagacagcaatattgtgtacaaaagctgatggtgtttggtggagtgtccttgttgagatcacttcagccttaaactcagccgaaaacatcatcaaaagacagtggcttctggatgcattagacattggctgtgttacagctcacccctcaacggtgctgtgttttgttggcttgctttgtggtagctgctgcatctatatgccgcttcttcttgttaattcgataaatgtactgagcgacttgccggtcaccctgcctgcctttctctccaccatcgtttctgatgatttcaggaactctgtggcagacaggctatggctgttgactactgacatctatacttgggctgaacaattagctcacggacacgatcaacctggacatgatcgtattcatagaagtgaaactgagattgcgacttttttggccaatattctgctctctacatgcattacagtcgaggactacctgtctgttgataagcggctaaagcttgcaaatcttgaagcactctaatcaaagggagatgtgtttcttttctattttatgtatgtatttatgtacggtatcagtcatgttttaatagttgatgtccctgctgatgatccagcaatgtttttttcatgtacataattaatttaactaactcatcttatgcactgaaaacaatctattgttcaaagatagatagacctatgaaataatattgttgtgtaca

SEQ ID NO: 27288 - DNA, 267 bp, Zea Mays
gattatatagctttcttccctgtgcatgcatactggttactagatgaaagagctcgtgttacgttatgccacactcctctcttccgagtagaacatgccttcacacccaaattctgcatatccttctagagaccagctgtgagttgggctctgaacgtttcttccatgttcaattcgattgaacatgactgttttgattagctgttctgttctgtttattttttatttctcacaatttactggctgcagcgtgagttcgtctagtat

SEQ ID NO: 27289 - DNA, 1214 bp, Zea Mays
gcgatgcccgatgcggatgcgctcgggcgacgctcctctctctctctctttctctcgctacatattcttcctctctctatctttgttctcctccgcccagctttcagacgcgacactcatcgcacattcccgtcaggccggtatccgcctcgggcttcgccgaaatcctacgctacctctctgatctctcccccggccccgagagcaccagattcacaacgcgcccgccgtgccgtgcggcagctgccttggcctagcctaggtgcgtgtgcctgcggaagctggttgctagctagttgctgctcgagctactatctgtttcgcgcggtgatcgacaatccggcagcgggagcggagctaggagtacgagagacacaaggccacgcgcgcgatgaacatgttcgatgggatggagagggctgggtacggcggcggcgctgggccgatgggcggggtggtgctgtcgcgggaccccaagccgcggctgcggtggacgcccgacctgcacgagcgcttcgtcgaggccgtcaccaagctcggcggggcagacaaggcgacgcccaagtccgtgctgcggctgatgggaatgaaagggctcaccttgtaccacttgaagagtcacctccagaaatacaggcttggaaagcagaccaagaaagacacgggtttggacgccggcagaggggcattcgcggcgcagggcatcaatttctccacaccagtacctcctcctagcattccatctacggccagtgacaatacgggatgcgctgaagtaccagattgaagtccaaaggaaattgcacgagcagctcgaggttcagaagaagctgcagatgcggatcgaggcgcaaggcaaatacttgcagacgatactcgagaaggcccagagcaacctctcgtaccacgcgactggagccgcaaacctagaagcaaccaggtcgcagctgacggacttcaacctcgcgctctcaggcttcatggacaacgtgacccaggcgtgcgagcagaacaacggcgagctggtgaaagccatgtccgaggacggtctcagagcgaacaatctagactttcagccgtaccatggagttcatgacggggacgatgtcaagtgcgctacggacgaagggttgctacttctggacctgaacatcagaggcgggtacggtcatcggatttcgacggatctgaagatgaatcaacacatgcggtga

SEQ ID NO: 27290 - DNA, 2969 bp, Zea Mays
cgccaatcagcagaacagcacaacctcggaaacgtccgtactccgtagtgcgaggaccctccccgtcctcccgtgtctatttccgtccccgtccccaaccacccgcgttccccgctttccgtgcgcatggccgccgcgcgggcgcaaccaccaccgccgtggccggatgtctagaaagcccctcctccccacctgcgggtcctccacccctcccccgctcctcctcctccgccgcttcctccctcgccgccgcgcgacctcctctcccccgccgccctccacccggcggaggaccgccgccatgccaccccgcgccggcgactccgccgcggcggcggctgcggcggcatccttccgtctcgggatggtgcgggtggtctctttccttgtaggcgggctcaacctcgcggtgctgctgctcggactctacattatcgacgccgtgctcccgtcggggtgcggcggggggctcgctttcgcctcggcgcccgctctggctggggtccgcgtgctctccatgatcggcgccgcgcgcgcgcagcacgccacggcggacgccatagctaagcgccacctccacgagagcgacgcatctgtcgcagctgatgccgtagctcgccacgagattagggtgaggtacaaacgctggttgtggtggaccagatttggtatggcagttggtgcattgcagttggttgcagcaatttatctcatgtttgtcattgtaagagatctctcaaatgaaagaagatccacttcctgcttctttggtatgttggtcgccattctgagctatttatttcctaactttgtacataattttttacaagttcttgtttgctggtagtttacaatcacatgaacttcatacatatacaacgacacacataaagtgggaaaaactttcgagcacccttttcttgaagttccatatgaaatttttttagtgaatgtaccacaaacatgctaactactctcactttgagcagattttgcttcaataaatgcactgaaacatagttaattaacacaatctagtaacaactcttaagagtatacacatttcattatactatcctaaggttttattttctgctgtgctaatccactcatctacttgggattgaataagtcgtttggatggtttataatctaggacaggataaagctgatcgggtgtcagtacgagcacttattgctttatttcttatcctttcatgggttgtgatcattgtccaatgcttcacgggttctgatatattgaggtggcgatcattttatgcaacacatgatatggcatggaaagctcattacagggaagtgttcgaccatggaatccgagaagctttgtgctgcctaggacgtgcaaaatatctaactgtattggaagaagatgaggtttattctgttgcaagactccttggtgatttggttgcatatcgtgcttctgggacaggacatttggagctcttagcagggcttgctctattgcagaagcacgggaatttatctgaattgcagactgaccttgtggaggcatcccatgagcttatgcaagaagctgctttcctccatccatttgcggaagcatgttatacgggaccacttcttgattttggacgaaatcctatcctgtttccctgtgcatgggtttatagacaaggtgtgttaactccatgggcacgcagaagacgccctgcacttgatggtgataattggtggcgaggccatgctgcagctttccttagatttgttaatataccacctaaagcacttctgaaaggacgtgtttgccagagcaagcgtgaagctgcttattttgttgtggttctccatgacaaaagaactgttgtcattggggttcgtggaacagagacaccagaggatctcataactgatggattatgcagagaatgtgcttttactatggaagatttggatggactagtaaatagtgaacaattacctgcaactacaagagagagagttatttcaacatttccacactatggtcatggtggaattgtagagtctgccagggagcttttcatgcaactaaatggagaaaacacatcttctggaagacttgggttcctttccacactgctgggggagggcagtgagtgtcatggatataaagttcgtcttgttgggcattctttaggaggcgctgttgctacagtcctaggaatgatgctatatggcaaatacccaagcgtgcatgtatatgcatatggaccacttccttgtgtggactttgtaatagcggaagcatgttcgcattttgtcacaaccattatttgcaatgatgaattttcctctcgcctttcaatcaattcgattcttaggctacgatctgctgcaataagtgctctttcagataactctccagctgatacagcaatgatacaaaagctcgctcgaagaattttgcatgtgaacaggtatcatgataatggtcctgacgatggcataatccagggctatgctgatcatacaagaacagcagatacaacagtaccgaatgaaagacaaatttctcatcagattccattatgcaatactgaactagacctccacaatacgcaaaatggcttttttaggtataatgggtccagtgcatcaatagatgagcatctgagctatgaaggcataagcagtggccatgatatgcaaataattccacttgatggggctgattctggttttgaagggcaccagacatcttacagagaaataccagtggagcctcctgagatgtttcttgcaggcttaattgttcacatagtgcggcaaagaagaagtctctttcctctttggaaatgctggagcatccaggaaactgaaccaccatacaaagctgttttagcgaaaagggagaacttcagggatatagtggttactccttacatgtttacagatcacttaccatggagctcgtcaccttctctgctggccaaattactagt

SEQ ID NO: 27291 - DNA, 1648 bp, Zea Mays
cccaagttttccaaacccttttccacgagcgaacccttcctaaagataagatccagaccgtcccaggaacgataaggcaactatacttggtgacacaatccagatgctgaaagatttgactactcaggtgaacaagctgaaagctgaatacacgtcactttctgaagaagcgtgtgagttaacacaagaaaagaatgagcttagagatgagaaagcttcactgaaatctgaggttgataatttgaataatcagtatcagcaacgaatgcgggtgctatacccatgggttggaatggagccttctgttgtcatggggccacctcctgcatatccctacccagtcccagttccaataccctctggtgctgtacccatgcatccgcagttgcaaacataccacttcttccacagtcaagcttctggaaccatccaaaacacatgcatcccttacatggcatatacacaaccctgccatcctcccactgatcagccgtctaaccaacttaatactccagttgcccattcaagtagtcataggtctaactctccagctcaagactgtagaagcaagtcatctacattgcagcaaccaagctgtggagtgagaagcagtgatgctggtgatattgctactgatctggaattgaagactcctggttcttcatgtcaatcacatgcagagattgcttacaacgattcctcttcggatttgaaaacaaagaagcattgcataaagcagattaatgattgcactctcactgaaagcagtagttcaagcagatgctcttccaatggtcccccagatgtttctaatagtgctattgatgaataagctgcttgacgaccgattaacatacaaaccgttgactggtatagattgagaaaagatctcgtttaaccacccataagtgagctcccaactctatatgcagtgtaatttgctattgttgctagcttatttacatagaagtggtcagattctaatgtgatgactcacaaattgggaggcgtggactttgtagataatctcatgattgttagtggtaaaagtttggtggaagggaaaaaaggagagaacaaaatcatagacagcagcatctatggtggttcggtagggactccaggactaggtatggtgagcattgtcagtgttcggcatggcaggtagatattcataataactggattctagtaccattgcatagttcgtcctagactggcattttacataaatttctgtgtcaaatatgtaaataactcgagggcggataactggatatatagtgtctatgttggcctattcaacttgctgggtaacgccttgtttgggagcaagtgtattggatgggattgaggggtctaacatcccttactattaggggtgtttcggtagtgatcaattgcatctgaaactgctgcagcttcaagcttgttgtgttggtgtctagtgtctgcatgagtttgttccttggctacggtagctacagcatgctttactgaacaagcccttgaagtttgtacattgagctttggtatatatttgcattggactatagttcttggtgtagtcctattattctcacattacgtttaatggtaaattcgctcacttgtttgagttcgaaggtagatattgtgctttgaggca

SEQ ID NO: 27292 - DNA, 542 bp, Zea Mays
acccaatctcgtcggtcggtcctcgcactcgcagcagcaccagtagacaccgtcccatgcgtccagctcgtcaggtctctctcgcttgccatgccattgccatggctgccgcgtccacgaaatcaagggaggaatatttgacttgtgcacctccaactgccaatcaatcaatcatatcggaaggctgcccaccaccgcggcggcggcgctagctcgtgtccccgtcaccgtcaccacagctcccgggctggcttccatgtgtggagggggaagaagacagaagaggcgcgcgcgactcgcggtcattttcaccgcatactttttttcccccatttatggatctggataccatccgtcaagcacccacttttaactcccattcttgttgatcgaggagaccattcctgtgtgcaaaatctcaagtttcctggacagtattgcacagtagagaaatctcccctcatctacttctacctacctggtagtattgcacagcagagaaatctccagaacccctccccgcccaaatgtctctctcaccc

SEQ ID NO: 27293 - DNA, 2448 bp, Zea Mays
cccgtacacattccaccccaaaatggcactcgcgccatcacccccagcgctgccgcccaacccggcgctccctttgccgtggtgggggcgggccggccgcggtgcgctcctcggcgcccgcgcccgcgtccgcgccgtccgcgcggcgctacggcccccgagccagtggtccgtcgggagctggcggggccgcccggcgcagcagcagcccgagtacccggacaaggcggacctggaagacgtgctgcggacggtgggaacgttcccgcccatcgtcttcgccggcgaggcgcgcaccctcgaggagcgcctcgcggaggccgccgtcggccgggccttcctcctccagggcggcgactgcgccgagagcttcaaggagttcaacgccaacaacatcagggacaccttccgcgtcctcctgcaaatgtccgttgtgctcatgttcggaggccagatgcctgtcgtcaaggtgggaagaatggcagggcagtttgcgaagccaaggtcagatggttttgaggagcggaatggattgaagttgccaagctatagaggggacaatatcaatggggatgcattcaatggggagtcaaggttgccagatccacaccgcatgataagggcgtactcacagtctgcagcaacactgaatctgctgcgggcattcgcaactggaggttatgctgcaatgcagagggtagcacaatggaaccttgatttcacagagaacagcgaacaaggtgataggtacatggagttggctcaccgagttgacgaagctttggggttcatgtcagctgctgggctccctttagatcaccctataatgacaacagcagaattctggacgtcacatgagtgccttcttctaccttatgagcaagcgctcactcgtgaggattccaccacgggcctctattatgactgctctgcccacttcctatgggtcggagagcgcactcgccagcttgatggtgctcacgttgagttccttcgaggcattgccaaccctcttggtatcaaggttagtgacaagatggacccagcagaacttgtgcggttgattgatatattgaatcccgaaaacagggctgggagaataaccatcatcacaagaatgggacctgaaaacatgagggtgaaacttccacacctgatacgcgctgtccgtggggccggtcagatagtaacatgggttactgacccaatgcatgggaacactatgaaggccccttgcggactcaaaacccgctcgttcgacaggattttgcatggccgctatgggcatcggcgactgcgccaccaccagccagcgcggcgacctggacatcccgtacccgttgagcatcgggcgcgggtgctaccactacacgggcgatcgagggcggggcgacatcacctgcaggcgcaccgcgcgcggcggctaccagcctaccaggccttcagcggcgagtccgttgaggtcatcgccatctccgtgcgccgcggccaggcgcgcgtctgcattctgcaacgacatccagacctggtgctacaacacctagctcacggtccatgggcaaagtacaacagcctgtgggggatcgacctctccgactcgtagttccggatctccgacgaggccaacctcttcgtcgtcgtgcgctgcaactcgctggcgtacgtgcagtccttcaacgccggcatcgagtacatgaccggctgcatggccacgtgcccggacgcgagtgaacggctcctgcgccgggcgccggcatgggctgctggcctgctgccaggcggccatcccgcccagggcatcaacacgtacggcatgcagttcgacgaccgcgtcaacaccgccgcggccgtcacgggcttcagcccctgcagctacgccggccgtgctcatggaggccgccgcgttcgacttccgcaccacctacgtcaccaccggggacttcatgacatccaccggcgggaaggtgcagctgctgctgctggactgggtggtcagtagagagacgtgccgggaggcggcacggaacgccacggcgtacatgtgcgtcagcggcagctgcgagcgcgtcgactcgtggaacggaccgggctacctgcctacctctgcaactgctccgcggcccctacgtccctgccggatcctaacaacaagtacccttgctctgttcctggaacttgcaccaacactcctggaagcttcatctgctcctgccccgacaatcatccacggcgacgtcaagtcgcccaacttcctcattgaggagggctacgccgccaaggtgtccgacttcgtgccagtggcggacccaggatttagagtgtgggtattcgaaaattttctaggatgatttttaaagactaaagtttttctattggtatagatagataattatttgtatatataacatataattaagtataaacaatataagcataactgatttaata

SEQ ID NO: 27294 - DNA, 1168 bp, Zea Mays
  misc_feature (1)..(2): n is a, c, g, or t
nntttacctcaatttggtgcttgaatatgtgccagaaactgttcaccgtgttattaaacattacaataagatgaaccaacggatgccattgatttatgttaaactttatatgtatcagatttgtagagctttggcttaccttcacaactgcgtaggagtgtgccacagagatataaagccacaaaatattctggtgaacccacatacccatcagctgaagttgtgtgacttcggcagtgccaaagtcttggtacaaggggaaccaaatatttcatatatttgttctagatactacagagccccagagctcatatttggggctactgagtatacaacagctattgacgtgtggtctgctggttgtgtacttgctgagcttcttctaggtcaggtactccaacacgggatgaaattaagcgcatgaatccaaactacaccgaatttaagtttccgcaaatcaaagctcacccatggcacaaaatcttccacaaaagaatgccatctgaagctgtagattttgtgtctcggcttctgcagtactcaccaaacctccggtgcacagcattggaggcgttaatccatccattctttgatgaactgcggtacccaaactcacgtctaccaaatggccgttcccttccccatctcttcaattttaaacctaatgagttgagaggagtaccagaggagtttgttgtgcaattgatccctcagcatgctaagaagcaatgtgctttcttaggagtttgagaaagcagttcaattttattccagaaaagaaaaaagagagaggatgcagcagttgagaggttacctgagtattgattacttacgttctgtttaaccgcacagtagcattagcctacagtattatcgactaggcaacgtgtgctgttatctttcacgacggcttttacatcgcaatgttctaccacggtggtgggatctttttcaccacattctgtaaagcagaagaagacgtaaatcgactggtcacccgttcttgtggtctgtatattggtctcccccaatcttgagaacacgttcttttgtttttggagatggattcatttcgtatctgtatcactatcaccaaatgaaacaagaactcatgtattcttgaactggattcagttacatgagagtcaaaccatgtcctttctctaag

SEQ ID NO: 27295 - DNA, 3058 bp, Zea Mays
ataactcaccccaaatcaacaacatggtatatggagctagggttcgcaggcgccgccactcgagctccgccttgcgcgtgtgaggaagaaggcggtcacccagccgagcccggagccggagcaggaaaccgtggtggagaagcgcgtggaggaggcggatccatggagcgcagctcggcgggcggccccctggcagctggcgtggcgagctcatccgcgcgtcctcgactcgtccgcgccggtgccggccgccgtccccgtcctgtgcgacggcgagctcgtcggcgtgggctcccgcccctatgcgcaccagctgcgcactcccccctgctcgacccctcagttcctggtggtcgccctcgggcccctccgctggtgtggctgctgggattgctgctacggacgctggtgctgtagctgctcccaaggaagaagagaaggccgagtacctcaaggaccgagcaagtttgctgttgctgctcctgcagctgagaaagggggaagaggaggaagcctctactgctgcgatgtgcgagctcatggaggagctgctggagcatagcctggaggcgtctgctaatcccatgaaggtggtggagtacgtgcagaaggagtcgccgctgatcgccgtggtgctgaaggcacacatgcactgcgaggcctgcgccgaggggatcaggaagaggatcctcaatatgaaaggcgtccagtccgtagaaccagacctcaaggcatcggaggtggctgtcatgtccaaaaaggtccggagagtggaggcggtggtggcggaactggagtgtaggaactctgagctgtttggcgagaagggtgaactggaggagaaattggtggctgccaaggaggtgttggcgaggctgacggcgatgacgagggaacaggaggctagggtgtttgctagaaggagagagtctgatttggtgaaggagaaagaggctgttgctaaggctcttgatgctgagaaggctgaagtagcaaggttgaggttgaaaattgaggagctagagaaatgtagcggtgagaaggatggtgacatcaggaagatgaaaccagcctactttgccaactatgcccacatgggtgaaggtactcaggaacaagctcttacatactcatgtaggcatcaaaaggagtgggtcatagattcaggagcatctaagcatgtcatgggcatatccagctctttcaaagcttacatcccacatacacattatgagtttgttcaaattgctgatggctcatcccaacgaatccatggtgtagggtccatagagtgtacaccatctcttagctcatcctcagtcctacatgtcccatcttttccggtcaatctcatttctgtaagttcaatcattgatcagttcaagtgtacagtaacgtttgatgaaaacacttgtgtctttcaagagaaggggactgggagaaggattgggactggagtcagacgtgatggtttgtggttcatcggtcatgaagaatcagcattgagagcagttgctgaaagggatgtgaaggaaattctgctacttcattgtcggttaggacatatatcttttgagaccttaagacggctgcaccctgctatgtttaagggagtggacaaaagtaggcttgtatgtgatgcatgtgagcttggcaagcatactagatccatctatcccagtattggtcttcgcagttgtgaaccatttactatgatacactcagatgtttggggtccttgctctgttacttctgtgaatggtgctaagtcgtttgtcacctttattgattgttgcactcgtatgacttggatctatattcttaagcataaaaatgaggtgttccagtgctttcaagactttcataaattagttgcaaatcagtttaatgcaagagttcgaatcattaggacagataatggaacagagtatgtgaataatgagttcagatcatatatttcagatcaaggaatcattcatcaaacaacttgtcctggaactccacctcagaatggtgtagctcagcgaaaaaatcgccatttgttggaggtagcaaggtctctaatgtttcggatgaatgtacctaagtacttgtggagtgaagcggtgatgacagccacatacctcatcaatcggatgccctcaaggatacttgatatgaaatcacctgctgagctcctgttgggaaaccagaactttagagttccacccaaggtctttggttgtgtttgctttgtgaaagatcatcgacctatggcgagcaagttggatcctcaagctgtcaagtgcatttttgtgggttatgcctctactcagaaaggatacaagtgttgggatcctattgggaggagactctttgtgagtatggatgtaacattccgtgagaaggaaccatactacacaagaaaggttgacctagacaattttctggaggacttctctccagtcaatggaagggactggagagagggagagaatgatagtggacaggatgatgattgtggccaagatagtgatttggttagtaggacttcaggaggggtgattgttggaggtatggttccaccagaaatgagggaagtgataaccacagagatagtgagtaatgatgaaagaagtggtggtggagatcaggatgatccaactgtcaatagtcaggaggagataaaggatgatgaagctgtgattgttgggacaatcccgtgttctattggggcagaggtgaataagaagcagggggagcaacgacctatagtgtactatcgaagacgggctaagaagcagggggagcaacctctacctgaacagacataatctgaacaagttgaagctctagtcccatacctctcttcagactgctctccagttccgaatggtaatgttgctcctccctctgaacatgtagaattacctattgcacaaagaagagatcctagagtcaatgctggaaaacccccttctcgttatggttatgaatatgatattgctaagtatgtctcatactctagtgtctcctgtatatagaacatttgttacatctctacaaacattgtctattc

SEQ ID NO: 27296 - DNA, 3359 bp, Zea Mays
acgctctgtttctcaagctctatctaacaggcgttgggttactgacatccagggcgccctcacagtccaggactctgatgagggagatgaaccaaagagagaatatacagcagctggactggccttgaaggaaaaatatggaaagcttcgagctagacaaaaggaaaggattgctcagcgacacattatcaagaactatgctgatgataatcttgaagagttcatgactccatacgactctattgctaatgaacctgctgaaaatcctttggtaatcgtagaagatctaaattcttcacagctatctggcgcgaaacgtttcagtgactcaactggagaaatgaggcaatcctccaagaaatcaaagagatattctgaaatccctcaagatctttatgccaaaattcctggtaacacagcttcattcaagcaccactcaaaggccactgatgtattcaatccagggaccccaaatcacttgctacctgtacttggcctttgtgctcctaatgctgatcaggtgaactcatacaaaaactcaatttgtgcaccaagcataaaggagcgtaaaagggccagtggtgacattgtcaaacaactgtcaactcctgctgaccattctaatgtgcatagaaacgaagctcaatcagcttctgataaggccatctttcctggtgcatctgaggaggctttgcgaagaataagtaacatgattccagatagttattttcccttcagtcatattcctcctatatcagggaagggggttgatcctgttgaaaatcctggaccctccattgcatcatttcaagggaatctgggtcttccaaacttcagtctggaagacaacgctccacttaagcatattaagcctatacctgatatatttcctagcctgtcactgggtgctcataaggattatattcgtagttctgtcccagagttgccagatggttcattgctgccaaacttcatggcagatattactggtacttcgaagcaaaagtcatttatgtctggtctacttcctgggctgggtcttagcccagggcaaccaatacattcggctatgcctgataatcacaagaaagtcttggacaatataatgatgcgtgctcagtatgcgtcaaacaaattcttgaagaagagatcaaaactagattattggtcagaggatgaacttgatgctctgtggataggagttcgtaggcatggaaggggaaattgggatgctatgcttagagatccaaagctgaagtttttgaacaaccgaactagtgaggagctggccttgaggtggattttggaggagcaaaaaattatagatgaacctatgtctacatccaccaggcgttctaactcagcagcatttcctggaatatctgatgcaatgatgtctcgggcactgaatgaaagtaatttctctaaaatgaggatggagcagcctaaattgcagtcccacttaactgatattcagttaggttcgagtgatatcctatccacatttcctcatgttgacgctgctagttacattaactcaggggagggtggcccatctcaaataccatggcaggattttaagcatagatcaagttatgctggagattttcctgccggtgcatttgacaagttggagaaacctgatgttggaccgatcccgccatttatgccaaatcctttcatgactgacagcattggttcacttcccataaacagaaaaaacaatagttccatcccgcatagtgaaatcaggtcaagttctcgtgagaacattctttctggtgtttcggatggacagatcaacttgcttcatgagatgcagcgtcgtcgtcgtgtgaggtcaggcaaagaacccattgagatgaatctcaaccacatagaccactcaaatctccagcttgataatactagtgaccttggaggtttaaaaccaaacaagttacctcattggcttcaggaggctgtacgtgctccttcatctaagccacctgaacgtgagctaccagcaacagtttcggcaattgctcagtcggtctgccttcttcttggagaacaagaaccatcaatacctccattcttgatcccgggaacacctctttctcgcccaaaagatccaaggattaattcaaagaagaaactccgcaaggctcagcaatctaactctcatgtagagcattcaaaaattggatctggtgagggtgattgtgtcactaccccagcacccccatccattgaagcttcacctgcacttcctgtcgattgcgatgatggtgagccttcactcaacttgaaatctgcatcgttgtcatcttcagctggcagcaaggggctagatgaattacctcccacatttaaagaagcaaaccaaaccgtggatggctcagaagctgttgcggccaagtcagatgctcctgaaattggttgtcaggtacctggttcctctccattacatgacaaaggtagtgaatcctcggggtcgccagtgaaggacactcctgacgctggaatcagattgccaggatcagataactcagttatggcattttctgcactcccacttgttgatgaagcacctgggacaagcagcagagcagctgacacgcctgtgccatgtgatggcaatgagtcgaaagaggatgttccactagacaacgctgaaagcaccaggaaactggagccgaacggatgaactggctcctcttgcgagcatggatgcatcgcatcgagtttctgctaatacagccgacgaagatgggtggatgaaatgatcattagactcgagctagttagctcaacattcctttcttttgcgttcagcataacactgggattttccctctcccaatgtttccagtgttgatctcgtgttgtgtaatgctttagtgcaggtctcgttgcagataggatgaaacgcaaagggctagtggtacttagcagtagttgggcactagtccgtcgggggagcaactcgtggaaacctgtatacaagaaatgtatattttgctaatatggtgctggttgggtgtgtagaaggtagaccgctattcgtttatttatgcgtatatggtttagtaatttgccatctgtctagcggtggctgtaagagtagacgtgatgatgatattgcctagccttgactcgttggcctccatgcctagccgaagagaagctgtgttcatactgacataactgacatactgagcgacttttgactgtttttttttatttcattagcggcaacgaagccaagaaccatgatcttcactcttttgtccccaccccccaaaaaaaaccccggaactctcaactattgttgtgcactgtaatttacctcttcaaattagaaaagtgatgttttg

SEQ ID NO: 27297 - DNA, 1706 bp, Zea Mays
gtctagaggtagaggagtagactcctcacaccgggtaagtctagctgagtattagtatactcagccttgcttgtggcataatttttgcaggttccttaggatgattggttgatggtgtgacttagccttcatccctgccaccgggatagacggtcgagagggttattgcttccgcaggagaggaccaggagtagtagcgtggccaggcttcgccatgttactcggttttctccgtcagttattttcgctgcattaaaatttatgattattatttttgaaactccgataatgtaatcactaatgatacttattaaatttgtggtattatgttttattgtatttctctgtgcctcaccttcgtgtgagctagtggtattcgatcctggattagtggctttatcggactagatccgagggactgacgggttattcctgtttaagtgtgttgctgcccttaagggtgcgacttgggcacttaagctggaataattcgggcggttccgccacagaccggcggcgagggggactgaaccctgggatatttttgctactgtaccattagaggttgcctcagttgttctgacagagcattttgcagcgtgatttgcttcagattttatgtagtgacctgaccaactctctgcatcaaagttgtagtcctataatccagctacaaatcgactatagagacctggctcatttgcccactcctttgagcttgaatcgagtccaaagttgatcaaatcttactgtcagtaaaaatttaggctataggggtgactgacagcagaacttggattccatttaactccattttgtgtacagcacttatgcctgatgacttaaccaaagttatactcctttagtagctctataattttgatgtattgaccctggacaaattccttgtagctttaaaaatatagagctctaaagtcagccctattcaactgaattcagacttagccatatgagaggtatagggtgtctttttgcaaataagcccaaatctcataatttgatttgcaaatactcaaatgtgtgaaacatatgatttgaggtgccctaataccttggtttttgcactttggtccaaaagtgcaccaattttacacttagccccctagggttccaatttagggttttataggggtcttttcagggtttttagcactttagggtttggatgccactcaagtcactccaagaggatatcttaggattatttctcatatcttttgaagttttctcatgcttgggtgttgggggccttcgtcttccgaaggtcctcaaaaacgtgactaacaatgtttcccaaagtataatatatgtgcagaatccttcggacatgggatgaagctgtacacgatatggaaagcagggtcagcatgaaggttgaaccagtgccgaagttgtggacaaggaagcttcggctcaatagcagaaaaaggaaccgacttaaggaggaaaagactatttagtcctcgacggattgttcttaagttaatactaaatatgaaggacatgaatgtaatttcacacaggctgtgttctgtgcctataaatagataaacagtatcctcgtactgttcacactgatttgtacccgctcatgcatcacgcttgtacttacaccttatgtcgagccgaaggtaccaatgtaattcaatattgttcttatttctccatgattatataataaagat

SEQ ID NO: 27298 - DNA, 205 bp, Zea Mays
ggaggtcaacgaagctagcgagggagcccttaccgaacatgtggtggcagcagtggcctcgcccatgagttcttgcaaccagatggcaggttccatgctctggggagcaattgggtcgaaagcggtggtctacccagtctagactcatcaacgagaagagaagcagtttgtttctttcacccaaagcaggaaacgacaacttggt

SEQ ID NO: 27299 - DNA, 1682 bp, Zea Mays
tccagcccaattcggcctgcacggcccgcctcaaactgagccgacactcctcatcttcctcggttcggcacttcggctcgtcctcctcgcggcgaaaccctagcccgccgccatggacgatccctcctccgcctccaacaagcacaagcacaagcgggggcgcaagcccaaggcatcgccgccctcccccgaccactcctccccctctccctcggtcgcccccgctccggctgggcgccgtggccgcaagccgcgacgtcatgaggccctcgccgacgtggacgccacgcgtcctccatctccaccccgccgcggggagccgaagccggtggcaaacggaggcgatgtggtggcagtggcagagtcaggccccgcgagctgggatgaggtggtgagggtagtgccatgcatggacgctgtggtcaaggtgttctgcgtgcacacggagcccaacatctcgctaccgtggcagcggaagcggcagtactgctccagcagcagcggatttatcatcagcggccaccatgtcctcaccaatgctcactccgtggagtaccttgccaccgtcctggccatcggcacagagtgcgacattggtgcgaccgctctccccatccctgccactgtctccattgtttatttcttactcttagttttttttcttcttattgtgatgttgggtttgtccattgtagtcgtgaaaatcggatgcatagtaatttctttattgttttcttagagaaatacaccaagatcattttttatggtatctatgaaacttctgaggctatagcatcatttgagttatggcatggtacttatcatacagttgatttttcatgttgcttatgcaatctaatttgatattattcgtttgttgtatctgtctcaacgctcttaactgtcaatgatgatgaattctgggaaggagtttcacctattgagtttggaacattaccagtccttcaggatgcagttactgttgttggctatccaattggaggagataccatatccgtgacaagtggagtggtctctaggatagaaatgcttttatatgttcatggttctatagaacttctaggattgcagatagatgcagctattaattcaggaaattcaggtggcccagcttttaatgataggggaaaatgtgtcggtatagcttttcagtctcttaaacatgaagatgcggagaacataggttatgtgataccgactccagttattacacatttcattgaggactacaaaaatctagagaatacacaggctgcaattgagtacattcattctttatcaagggcacagcctgctcattctctcaatggtgttggtctttgtcctgctagtagatcacttagcacccatgccgccactatgtcaagcacaccacagttgaaagcacaccacgtcaagcacccaggctgccactacgtcaagcaaaacagaagacgagaagaactgatgtagccatgttcatgcttccactgttgaaatgcatattcagcatagcttgctcagctcctatctgctatttcaacgttgatttaaaagatgagctggtagttgtgggcttttgaacaatagttggagtgatatgaaacattagtgatctagttgtgaatgatattataattgtgatgcttttgtgaatatataattgtggtgcttttgtgttt

SEQ ID NO: 27300 - DNA, 4687 bp, Zea Mays
tgcccgtgtgccaggcgaaaaacgtagcctcgcactctcgcaggcggcggcgcatcgagaaacagggctgcggctgttgcttcttccacctctccggccatccggcggtccatcgttccgtgccggcggcctcccctcctacgcccctgccgattcttcaatcttcaccaacgtctgcgcgtagcaggctagcagtcggcacggcttcctcagatctgccggacgacttgctgttcgtcaccgactcaccagcaaccaacgtcagccatcagccggcagcaggggaagctgggcggagggtcattgcggcacggcgtccaggcgtacagaaggcaccagcaacagcccatggcaaacgatgaccctatggcagatgaagccggagtagaagatgccttcacacaggagatcaatcattcgtacgtccctagataccatgtgttgagttggatggaaactgtggaggggatggtggccggtgtggcgtcgcttccgccggtgtatttgatactgaacagagatcttcttgagacgggatggggatggaagaggctggtgccctacagacctggttatgttgagttgcatgtgttcaagaaataccttggggactatttcgaccataatcgtgaagcttttctttgtgccgagcagaagcctgatccatttggatggattgttgctgaaaagagtgccctgattgctgcagccaaatcgtgcctcaagatggagaaggcacttctcaggtactgtgctagctttctcactcctgacgacaaaaggctgatcctccggatcaaggaccaggcaaagcaaatgatccaatcagagggtgatcaatctttgattgtaactatatgcttggagtgtattgcgaaggaggccgagttaatgtacaattatttgccttgtgattttgacaccaccgaagaagtcgccgtctgcaataaggttcggcggtctgccttgaatcttatgctctacaaaggttctgaatctgctgttgctgctggtgccatgatggtgtgttcctgatactctctccattcattttataggctttattttgactatgcaaaaaccaatattctgctgtaaattctccctatagtattatgttggtagttacaaaatcatagtcagtagcaagtgcttttaattaggaattgttacgtaactcacattttatgggactaatgtctggtcaaagcatgaacttggatagtcaaaccacaccttataaatatgaatatagggagtaattgtgtattttttaatcctctgttatcctgtcaagcttctttaaccaaactgcaaaaacgatgtacttgaagggtatcacaacagaggctaagtccatttttgacttgcttagtcgagaccatgacgtggtcatggaagtttttacttgtgagagtataagggaacatacagcatcagttctgacccagcttgggaaggaatttgcttgcgagactgctactgtgaacagctcatcagcgcggcctatgggggtcagtgatgttagagatctgaactctgaagtatctggttcaatggaagactgtacgagtatggatggagcaaggttttaaagtcggctagtcgactctagtcgcctaagcaccgataaggtgactaatcgcgattagtcgtcgattagctcgattagtcgatcctagtcgactccctagtcgtcctatagtcgtccatctataacaggaccatatatatatatatatatactagattgcaaatctattgacaatattacaatgaaactgtagaatgaatgaatgatcatgttttcactaaaaggtaaagatcacttagacacttaccttggattggagtatacaacagcacactgcaagattagtaggacaacacttctggtatatctccagcagccttactagtgcaaaacgtcatatatctccaacaaagcaagcagaggagggcgtccagcaagcagaggagggcggcggcgcttacagcagcagcaagcagaggagggcggcgctcagagcagcagcaagcagaggagggcggcagcgctcagagcagcagcaagcagaggagggcggcggcgctcacagcagcagcaagcagaggagggcggcgctcagagcagcagcaagcagaggagggcggcagcgctcagagcagcagcaagcagagaagggcggcgacgctcacagcagcagcaagcagaggagggcggcgctcacagcagcagcaagcagaggagggcggcggcgctcagagcagcagcaagcaggggagggcggcggcgctcagagcagttagcagcaagcagatgaagcggtggcgctcaactccagctaggttaaagactgtaacggcattggcacagtttcaggcttttcagcccccctggtgggccggcccaaatagaaaagagcagcctggagcccaaaacaaagcacctagtcgagaacaaccctaatcggacgactaatcgccgactaatcgcgattagtcggacgactaggtttctagtcgccctaatcgcgtcggtggccctaatcggccttgcagcagcgataagtccgactaatcgcgactaatcgcgattagtcggacgactttaaaaccattccgatggagacaatggaaacaatccagttgttggagggggtggctaagaactcgaagaatttaaagttggtggagaaccacgaaaacgagaccagggttgccacgtaagagaagactgcatcagcatcactacttgcctgttttgaaatttaatgtacctttcacggaagccctcactaacattaattgtttgtatgtttcatctcagcttgatgactgaaaataactagggccttgcagggaaaccttcgttgacttctgaggtactgaaggttagtgaagaggcagatgattacgttccaaataggaagtcttgaatactgctgtgacttgtgttttgaaatagatatagtattttctggttctcttgcaaacctcattgttgcagccctaacatttcatggtgtgtttgatttgtggggtgggggtggatgggagacggtcaacccattttttaaagttgttcagttagatgggatgcccaaccagtggggatattcccccgagatcttggatgggatgtccatgcaaatctggtggacagagtagtccatggccttgttgaatacttattgcgcgactggttgtggtcacctaatgtgccttttctttttgctccaattgttcccaatctcatccctcattaacctgtttctgactgggatgcgcacagcaattgggaaccagcaggccctctgtccagacgctggtgctttgtgctccgttgttgtgctgctgctccactggcgtttactagttctagtgccttttcactgatttgtccgcacagggatcctggtgctagtgcttggctgattgctgctgcccctgtgttctccctcaattcgtactgctcatgcaattcctggaggccctaggaattggttctgcagttgtacctgtaggctgtagctgccaatttagttcgattttgaatttggcaggtagttgttgtgcttgtttctagatgcaagagtgcttattgtttgtggtgtttgttattggaaattttggttggtggtagttatttgtccggaaaggttaatgcaatgctgtggcttgtcttgcttttagtcaatggtagtaagttgagtaaaatgttcatgtgtatgtgcagcttgtggtcggcagtgtgaaattttgacctctaattatttgttagtaatgtaattttctcagcaggaatccaattcatgatgatgagctacattattcaagtttagcaactattgattgtgtttcccatcatgccttggatgtgtcaaaacttgaacacaccaatttgaagattatcataccctgcttatctatccacatacaaccaaccaaacaaaaatctgctggatcatcccatttgaaaacttgcaaccaaccaaacaagaatttggctcatgcaatccgtccaacctaatgagctaatacatgtaggagcatcattctatgattctatcctaaatccatggatggccctatcccatccaaccttgcctctccaacccatacggccatacaaacttgtgaccattcattgtaattctcatttcattgtcataagtgcgcctcgtttgacactgttgtttctctcgtcatcattggctttgtgtcggacacgttcatgataatttatctgcagcaacggtcaaatttatgaagctacaaggtgcaagttatgagctgctgtaactaaaaggatctctggtttcttttgagcagctgtctgttgtgtcaagttatgtgctacttgtaacactaaagtaccattttaccttatgacatgcagtgcttggttgttctgtcgtagttaaagaccgtgttgcaataagtgctagttctgtatgtttcctgggtttatgttatcaaatggttgcctggtttgcccactaatgtcatgttgctataagtattcctagctgttgagaaatgcgtgcgcgcgtgccgatcgttgtatcattgggtgcaacatcataggtcattgtagccaagggctatgaagaggggagtttcagatagtccaaaaacaccagggtacatagcaaatacgaaggttcttaggaaggaacagaag

SEQ ID NO: 27301 - DNA, 4864 bp, Zea Mays
atgtcgatacatatttgcaagaacggttatatgccaggctatgaggtgtgggtgcaccatggttgggtcacccgcagatcaaggagtactggtgttggccttctgatggccgtgcgagggtccacatacatgatcaggcaatatataaaggagccaggattcaatgtagcgaatgagatggcatccatcaaccaggagataagacagattggtagaatgatggtcatatcaggcaatatattggagccgccggaatggattctgcaagcccaagacctggcctgtgatgtgcaggatttcacggatatctacacatggctgcaaagcaaatcgcggaggcgtgcccttgcacatataggctacatagcgcagctgaaggatcggatcagcagccttcgagagtggcaacagagaggaggcagcagcagcagcagcagccagcaggagcgtgctgctgccttgtccttctcgcggcgatcatgcgggccttgcgcccctgaggatgtgctagttggcattgatcagcccagaaaagaactttcggacctcattttcgaaagggaggatgttgtgcatatcgtgcaacagaagcccagggtggtctctgtcgttgggtatagtggcattggcaagacagccctggcaagagcagtctactacgaccgtagtgtccgttctgcctttgacgacgttgcttgggttgtggcatctgagtgcagccatgggtgcgaccttgtaagtaagatctgccagcaggtcaaggacgaacaagcagggaacggtgctgtcgtcgtccctgattgttataggttaaaagagattatgcgggataaaaggtttcttatcgttattgacgaccttcacggagctggcatgtggaacgatataaaaggtgtcttcagtgaaactcacagtggcagtcgaataatcgttaccacgagtattcagtcggtcgccgctgcctgcactcctgagccgcgatacatttacaggatgccaagtcttggtaatttggactctgaaaagctactgtggatgagggtcggcaggcatgcaagccgtacgcctgctctggagcatgctttaggcaacgacaccttgaaaaaatgcggcggtctacctctggcactgatcagtgttgccaatcatttgtgtcttgggaaagcattatttgaggagatggacagggttcttgccaaatgctatgacagcttgcctgacaatgctcacaggatgtgcttgctgtccctgagcacattccctcagggtcatgtgatgaagaggaagaggctaattagaagatggatagctgaaggattggctgtcgtcggagactgtgagctcagtgctgaacaagttgccggtaacatatttgatgtgttgattgacaggaacgttactgagcctgtgctgactgctggccacggttctcgtagtaaggtcaaggcatgcttagttcttggtgtgatcaaggacttcatcaacaaaacggcagtctcaaatgagactgtagctataatccagaacgatgagcttctccttcccaacaggatgctggtcgcccatcgccctgttcgtcgactgcttgttcatggaggcacaacaaagaaaagtgaagctgttgcaaaggcgatcggactggatcagggctgctggttgctgcgggtcttggacctggaggcttgccaggggatcgacaagagcatccttggcagcatatgcaagctggtgtttctcaagtacctgagccttaggggcaccgatgtttacggaatacccaagaaagtaaaaaagctccagtgtttggagacgctggacctcagggacacacgggttgaagaactgcccatccaagtcttgatgctcccacggttggcccatctgtttggcaagtttgagctacctccacagctcaagcatggtcatcgaaccgcaaggaggaggaggagtaggctgcaggcatttttctcccagagaagcaggctgcagactctttcaggattcgtcatggtggatgatagcaacagcttcgagcacatgatgataaccataaagtcactgaggaaggttaaggtatggtgcaagaattcaatctcctcccaccaagaacgccatctcgcttcttcccttcagcaacggctagtagcaggaaacagtaatcccctagaatctctgtcaattgattttggcaatgaatccatcaatttcctcaatgatgttggagctatcagtgcacttattggctctatgaagctacagggaaggctaacctcgctccctagcttcatgacttcgtacgatactacactctcccagctgcagctgtcctcaactggtttgggcatagaagccttgtccctgctgcagatcttacgtcggctggtttctctgaagctcgctcaggatggtgatggattttggggtgactgcttcgctgttaagaaggatggatttccaagccttttacgcctgtgcattcaggccagggagcttccccagttgcacatccatgaaggaggcatgagctctctcacctccctcgaactactctgtcccatgttcgctagtcgcggtcaatctgactctgactctgactctgactctgacaatctgtccccagttgcatttcggtacgcgtacgcggaaacctattcagagaagagatccaaacaagttctttcggtagagaagcccaaagcagttgatcccgggatcagcttcaaggaaccaagttctgagacaagatcagaaggaactgaaattcaggagattgattcccctaaaacgtccaaggaggctggtcccagcataggcttcaaggaaccaagttctgagacaagatcagaaggaactgaaattcaggagattgattcccctaaaacgtccaaggaggctggtcccagcataggcttcaaggatattattcttccggagaacacattcagaagaaacttttcgaagcaagtcaaaagtagatttgatctgaaacaacacttcaagggaatggagtacctccaatgtctcaatgagctggtactacatcgttctgttagcgacgaggtattggatgcctggacaaaacgagcaagcagtcacatcaataggccaaaggtgacaaggcaatgcacaagagcagcgctgtcgattggtagaggcccgggaacagcgaagcacgagaaagaagggcagcacagaagccagctcatgaaaaatagaggttcagaaacagcaatccatgaggaggtagcagagcaacacagctcagtagaaacgagccgtgaggaagcaggattattccaagaacagacctcagatacaagtcacaaagaagaagaagaagaagaaggagaaggagaagaagaagaagaagaagaagaagaagaagaagaagaagaatgtactagtgaagtaggagcgggtaaacacagctcagtaggaacgagccgtgaggaagcaggattattccaagaacagacctcaggtcacaaagaagaagaagaagaatatatgagtgaagactgggcattaagtcaaccatgcgacatgctcattggcaacaggatgaccgtacgatgtctaggatggccagattcttggcgactacgaagtggcatgatatcttcccccatgctgatctgcaggccattgggtccgtgacctcagatcattgtcccttacttatgcaaggtttatctacctttagtttctatagggggtttagatttgaagttttttggacaaaaattgatgggttcaatgaggtggttcagcaagcttggacatctagtgttcgttcttccgatgccattcttaggctgcatgtgaagatgatccgcacggctaaagctctattgatctggagacgaaagacagtaggcaattttaaagatcaattagcaatcattcagaccgtccttactcttcttgagaaagcacaggaatccaggcaactttccggggacgagctagagttcagaagaagtctaaaaatgaaaatccttgggctagtgacagtccaaaaggcaagagctagacaacattccagacttgtctggatgcgtctgagagatgcaaacacaaaaaaaattcatctgatggcaaataatagaagaaggaaaattttcatcagatcgctggttcgtgatgacaggttgctcaccagtcaggaagacaaactgcatgaggcccaccatcatttcactgaagctattggtagaaggggtgagagacagagggccgttcggtggggtaacctaggctatagtccatttgacttatcagatctggatttcttgttcaacgaggatgagattaaaaatgtggttatagggatgcactctgaaaaggcgccgggtcgagatggttttatagggatcttctataagagttgttttgagctgattaaggatgatctatcaagtgcaattcatgatttctatcaccatagatgcaaaaacctaaacctcgttaatgaggcaaatatcgcgcttttacaaaaaaagggagggtgctgacaggattgacatgtttaggccgatcagtctcatcaatagcttcataaaaatattgaccaagattttagcaaacagacttgcgccaagaatgaatgagattgtctccactgcccaaaacgcgttcattcaaaaacgttcaattcatgataattttctctatgtccaaaaagttattcagaaacttcataggaacaatcagccaaccctttttgtcaaacttgacatatcaaaagctttcgattccatcaactgggcatatctgttagaggtactgagagctctaggtttttcccagaaatggagaaattggatcgcaacaatattagggtcttcctcttcaaaaatcatca

SEQ ID NO: 27302 - DNA, 2289 bp, Zea Mays
gattaggtatgtctcttgtcttatccgccacacacgacacgacacgcgccggccacagaaacagcgcttcactcccctccgcgccgcggcgaccatggagctcgccaccgtcgccgctgcagtcgcctccgccgctgcgcgcccgcacgggcctttctcctctccccgcgcagtctctgcctccgtctcgtggaccagtctctcgctcgcctacacctcccgctgtctctcctccacgtcctcgcgacggcggctgcgctggctccccgtcacctcggccgccgtggagctccgcgaggccactgccgggggcggagactcgctccgtgtcaccaagacgccgcagcctggatccagtgttaagttcagcgtggaggtgcctacttccatcattcacgagtgctaccaatccacgctacaggagtacgccaaacgtgttaaggttcctggatttcggcctgggaagaccattccagaaaacgttcttataaactatgtaggaccgcaacatgtacaggatgccacgattgaagctatcttaaaacatacgcttcctcaagcactgtcctcggtagaggagagggcattagaagattctgttcgcattctgactcaatttgatgatatgagaaattctttctcactcgacaatgtgtttagatatgatgttgctgtggatgttgcccctgaagtccgatggttatctgaagacaaatataggaacctcaaagttgtcgttgaaatagatgaagctgttgatgcggaaaaggcggcagagaaagagcttcagcgtcgtcataaagctctaggcttacttagaattgtggctgacagaggcctccagattggtgatctggtggtgctggatatatttgcggaaagcattaacaatgatggctctagaggtgaaaaaatttcatcggctgagagtacaggtttccacttggacactgaggaaaatagtaaccttgttcctggatttcttggttcgttgattgggattcgtgctggtgagactagatcatttcctatccagttccccgagtcatttgagcgagaaagtctacgaggtgtccgtgcacagtttactgttgtgtgtaaagagctgttctacagagagttgccagtaatggatgactcacttgctgtaaagcttcttccaggatgcactacaatagacgagcccttctgactatcgcaggttcgagagcgtattttgaaaagatgtaaagaagtggagaagacggccatagaacaagcaacagacaacgcgatccttgaccagctcgggaagttggtcgaggtcgacgtccctcgtgccttgtttcaagagcaagggcagcagctttatggagccaagcttctgcagcttcaggcggaaaggaagctggataaagaccagctagcttcgttatcaaccaagaggtcagtgcaggcgtacctagaagatgagaaggagaacattacaagaatcattaaacagatgctggccgttggcgatattttcaaatccgagaacttacagtactcgactgatcagctcgtcaaggaagttgagaactccatagcggagttcaaacagtacaaccaagactatgatgaggacaacatcaggcagcaggtccaggatgtcctagaggcggcgaaggtgcttgaatggctcaaggagaactgctcggtcgagtatatcaggcgatgagtcccacgatgctgggtcaaggaaagctcctctgaacgtgagaaagatggtggctggtgtggcggtcggcagttttgcgagtggccttggtccttgccaatgccaaccagcctagagcagtgcagtgattaagaggtttacagaagagagaaattctggcagatccaattgctgttgccgtcattctgatacaacctgacttgatgactctcaatgaagctgaatgctgaaaggtgttgctgccttgcagaatgaagctttgagttcaatacatggaattcatatttggtggtggtgttttggaacttgtttatctgctaggtgttgctgccttgcagaatgaagccgtccacattgtccttgtttatctgcaagatgcatgcctgctctatttcttgctcttcagtcttgactgatgcctactgcctgagtgcagattcagtgtgatagttagattctgctgatgtgttaacatgttcattgtaaacaaatttcttgttaaacatgtgtgatctcttcaagaccatgtgtctttgacctaatatattgcgaaacattcttcagttgtgtggtgttatcggtttacatgt

SEQ ID NO: 27303 - DNA, 2514 bp, Zea Mays
cccatatcggcgaatttcttcctcttgtcattcgcagatgacagtctgataccccactgccttcactgagtgctagagcccctccttgtcaattcactgtctggtgctgaatcgagttcattgaagatgccaaggtccgaatcagacagtgatgatgttttcttcgatgcatttgaagatgttctatctgcaggggaaccttcgttttcagaggattgcagcacaagtgatgaagtttcagggccaatgaaattagagtatgagatttgggcaaacgaaccaattagtgttcaagaaaggcgccaaaggttcctgaagggaatgagactcgatgatttcgtgtctacgaggataggttcttttcaatgccatggtgaaatcacagccgtcgagtcttccactgacatggaggagagaactgtcagtggcctttcttccggggattcatctgtttgtgacaatgagtcagattttgacggtgcctgttgcataagggatacggatactggaaagagatatattgtccacaatggtgcacacagcagtataactggcatgcccaaggaggttggatcagataaggtgatgactcttctggagtttgagagtttgcttggcctctctaggtctgttcaaaagttattgcggaggggatgtggtaacagtcctgcaaaagaaacaaaaagtgctaaggaaaaggacggcaaaagctcgtcaaggaaattcgttacaaagagaagctttggtggcatttgcaagtacgatgtccatgtgaaaaattgcacaaacagtataccaaccagaacaagagttcagcaccggaagaaaaaatttcttgaattctctgctgtgtacatggatcaagaaatcagagctcacaagggttcaattagggtcatgaaattcagcccatctggctggtatttagcaagtggcggtgaggattgtgctgtacggatatggcaaatcatagaagtagaagcatctcctaagttatacaggggagaggatccgcatgaaaaggtggaaaaagttcaggtctttaagacaaatataggaaagaagcacaaccctgcacttgcagttatacccaagaaggtttttcgtatatcagagactccattacatgaatttcgtggccatgcaagtgatatccttgatatggcatggtccaaatcagattgtctgttaacttcatctaaagataagacagtgcgcttatggaaaccgggctgcgacggttgtctcgcagttttcaaacacaaagactatgtaacatgtgttcagttcaaccctatcgacgagaaatacttcatgagcggttcattagatggtaaagtgcgcatttgggatgtgttggacaaacgagtaactggctggacttatacgcgaactatcataactgctttgagttaccagtcagatggaaagggttttgttgttggcactattgcaggcgcatgtcgtttctatgatcaatctggtgaaaacatccagctagagaaagaattgtttgtgcaagggaagaagaagtcagccgccagtcggatcaacaatctaaagttatgtacaagtgattccaatagggttgtagttacatcaggagattccaaaatccgagtcgtcaatggtgataccatccaaaagtttgaagggccttggaagtcgaaggctctgtcatcgccgtcattaacatcagacggcagataccttatatctgtgggcaaagattccaacgtctacatttggaacttggcgaactctagagatgcaagatcggttcattcgtgcgagctgttcttctccaaagctgtaactaccgcagtaccatggccgggagtgtaccaagatgggcacacgaagccttcctatctgactgagaaatactgcagcatgcccattttgcgccaccacggggagtgccagtccgctgagccgtggtcgttcgtggacggcagcaagggattggcgacatggcctgaagagaagttgccttctacagcaaagcctggaagcagcccgcagctgggcgactgtctctccatgatatccgccgcgtggagcacggtcatcgtgaccgccagccgcgatggcgtgatccgatcttttcacaactacggcttgcccgttagattgtgagcttcgagaccggtttgaggtagtcagtggagcgccgccatggttggtgactgataatccgctaaggttttgtaagtttttttttctttttcttttctggtcagagttactagaaattatttatgtaacatttttagatcattaatttcttgtgaagagatgatctgtagtcagtccaaggccaaacacttgtgctgttttttgctggatggttgtgacaaaagtaaaaaaaaactcaaccatccagttatagttagcgggaaaatatcctatgcaatcacttatcctggtgcaagcatgcaatcaagcgatctggtgcatccgatctagatctaattataactattattttatatttaacccctctacctaaaa

SEQ ID NO: 27304 - DNA, 3899 bp, Zea Mays
atggaccttgacgcggctgcagaggaggaggagcgccggcttgaggactacaatgaggcgcaggatgctaggtacttcctggggtttggtgacacccatggagatcctattgaggttgatactgttgccggctctcaaattggcactggaaccgaatccactagcccgtcagaagcagtccctaatcctgatcaggctgctaatgctagtggtagcaacatgaagaaaaggtccaagtgctgggatgactttgatgaattgactaagattgtgaatggtaagaaagtcaggagccacgttgtgcctgccgccagccccgacacctccagatgttgcctccatccatcctccgagcttaccgcctcgcccccgcccccaaaccctagaccccctacaatcacgaggaaggggagaacggccgaggaggatgctccgcaaggaaggggaggacggtcgaggatgacgttgttgctcgtcgctgagcatcttcgcgccctcagtgctgccaaggagccctctctatccctgatggcgtcccaaccgttggtaatatctccgcctcggccatgggcattgcaaccctcgattcaatctctcctcttcgatctcaggccgatcgtcggcgatgatgacccagcctccctctccacgtccctgctccccaactcatacaggtgttgtggcgccctcctctccactcccctatctattttgttgtttgatgtctactttcttcgccgctctggttgcggcacgattggtgcaccacctcctcgtgcgaggtgagggcaagcctgcacatgctcaactccatcgacaacctcaccttcatgccactctgggagcatgccgagtggcgatgtgacgacttggtggtctatcgtcgttgcccttcgccaggtgtcgatctcttcgtcagtgaagagcatccaccaggagcaattgaagccattggacattggttgcacaacttgataaagtgaagaatctgcttgcgtctgagtttgggagtctataaacatggggaagagaaaatattggtgcctttgcaattggtgaccctgctgcaactatttttttctaggaattcacaagagcaatatggtacaccaatgccacacattggacaaacaacagttgaagttgatcttttgaattatggtgtgatagaaggtgatgaatcatgtaaacatttctctgaactaaaagtcttacatccatggatgatcaaagatggcatgaatcttacaaaggaacagagattagagaaaattgagtcacaaaaacttgaaaaatatgaagccaaaggtgacaagagacatgacttgaaagatgatcaaagtgtacaggaagaatacataaatgcatattatgaggccttgaggaaaagttggaagaggaagaagcaaaaagcagaatgcagcatgaaggcaagatttttgtccctgatgctcaaagggaacgccaagttgacaataaatacaagcaggatgatgatgaagaaggcattgaataattatacttcacattatcatgtctttacttttggcagtgttgttagtaatgaagttgcttctcatgcaacacttcttattagcaagcagtatgtattggcaatgggttttgcattgctggaacacctgacagaaatttttagtttcccagaagtaaaggcgttctggtttgttagtaatattggccttctaatggtttatgctctatccagagtattccagctttcttatatggacagtaggaacccaaggtttgctgtgtaatccattatcaacagttgcactcacattagccttgtggcgattcttttcaaaacaggatgatttaaacccatatgttgttccaatggctatgggcatttaacgtcaactagagagtcccttggatatgactacaagtactatcatcaggaggattgttgctaaccatgaagcttacctgtgtattgtcagctttcaaactcgatgaaccaactgagaaagtactgcttatgaagctagagaagcatggaaggagtgttgctgaatcaaaggcaaaagaagaagctggaagagttttgatttgcatgaaggatagctgttgaagacgcttctaaagcactagagtattgtagcactgatggaaggccttcgatgaaatgtttccctgaaagttgcatactacatcgctgaagcactacaatattgtaacactgagggaaggcctttgtatcatgacctaaattcatatagggccctctttgatgaggtaattgttgctttggttttcacttttccttacaaccttcgaattatgtggctatgtctgaaaacttaatacttctacagttctcgggtcttcataccattccaatttgtgttagctaataaacaagtcaggctatgtctgaaaccagtatctaatagttctccgcccaacaaggaactgtgcaacataaaaacaaatcttaaacaagttacatgttctgaattttagaaactcaaactccactctaagggctaaccggctaaccgaacatgttatagaacaaactcagtcctaaattgtagacatattggaattctgcgtatgttttttccaacctatcttcaaactatacaagaattattatctaatataaacaatacattgacaataatgtacacaaaaatccatgtatttaatgtgtggacatggtatcatcatgtctgactaacccttttttactttcattgaatgaagttcgtacatgtatttgaggtattttttattttcttcctactataagccttgcttagatactgatctaagatcatctccaagggacagacaaaaaatcctagaggttctcacataagtacggtttagagaagggataaaccgaggaaagcctcccccacaaatacagaaaggctgcctcgaacctatgatttggtgactcagtgaaacaaacaactctcactactgcactaggcctgccattgtttacgagcatccccaagggccttacttaaattcactctctaaattttaatttggtgagccattttaataaaaatatgtttgataggttttttatcttctaacaatttttatgtatcttgtacgcactctagagaaccaacccactcactgctctttatttactgcatgctatttaggtctgctaagcaaaaaatgatattctttctcaatcttttgtcatgtttagataaatttggtggttttaggataaagtttgtgaagggcttcactttttttttctataattagaatttaactcaaaagttttcccttgaaattcaagttgattttgagaagtatgaagggatgattaaggtcatggagaaggtggtaatacagttaattctatggagctcactggaggagcactaccttttgccagttgcttgcaagaatgtaattggaatccgatgtgcttcatggcgcatcgtatcctccattgagtatagggaataaggttgtgtcaacatggaccgtgccactctcatcgagggctaccataacaagattgaagttgaactcaacaagatctgcgttggaatcctcaagctctttgcttcccaccttcccccctcattaatagttccaaagtccaaggtcttctacctcaagatgaagggtgattactacaggatattgctttggaggagttggcccccttatcctattaggctttggctgatgcttaacctctcaactctcctgatcttgctcgtggtctccccaaacagattgacacggtgggaggaaaaagacaatggtcagcaacttactcggagcagaaattttttaattgtggtacccgtggtgctgttgacttggttaccggtctggcttggatatcggcatgttaaacggggcctaataaagaaccgtaacag

SEQ ID NO: 27305 - DNA, 3671 bp, Zea Mays
gaccgaagcgcggcattcacgccggcctacactgcagctgccagccccttcgcttctcttcgactcgacctcagcaatggcgaatcccggcggcaccaaccccttcgcttcccccgccgacgccgcctcatcgccgtgggacgacctccccgacgacttcttcctctccacttccatcacctccccgtccccgtccccaccccctatcccgccccccatcccatccacctcgccccgtcacgccacgccccaccgatccacctccctcccgcccgcctccactccctccgctgctacctccgcctccgtctccgtctccgcttccttctccgacccgcgcccccgcgccgctccggcatcgcatcagcatcagcatcagccccagctcctccatcccagccactcactccccgccttccccgccgcggcctcccgctccccggccgccgcagcacaagtatggccaccgcccccggggccccaccactcgggctcaatcccggagttcgccgccgctccggcctccagcgcacacctcccgcccgcgcgcaccgcggtgcgcgccgaccgcccgcccccgctcgatctgcgcccgcgcccgcccagggagtcccaggccggtgcggcgcttcgcgttctcgcctgctgctgcgatgcttcccggtccgaggccggcgccgccgcccgtctctgggcagcgggcgaggccggcgtcagggcatgggacctcgcagacgccttccggtcgccgtctcagcagcgttggggcgacgagtcgtctgcgccctttagggagtcgcgcaggacgcccccggcgctctgcctcgcggcggaccccgctcgcagcgtggtgtggagcggccatgcggacggccggatcatgggatggaccgcggatcctggaccggaggcgggggagtgcctctcgtgggaggcacaccgtgggccagtgttcgcgttggccgtctcttcctatggtgatttgtggtctgggtctgaggggggagcaatcaaagtatggtatgcagaactgattcagaagtcacttgtttcacaaacagaagaaaaacataagacccttttagttgaaagatcatctattgatcttagggacatggtcagtgatggaggggcctgtcctttgcctgctgtagatgtaaaacttctgttgtctgacaattctagatcaaaagtatggagtgctggttacctctcatttgcactctgggattctcgcactaaaggccttctaaaagtggtaaacattgatggccaagttgatacccgtttcgacatcttatctgctcaggattcatatagctatgagacaaagcaaactctgttctctccgaggaaagagaaagctcgcagtcctgttggtttcttgcagagatcacggaatgctttgttgggagcagctgatgcagtccggagagttgctgttaaagcaggttttggtgatgacactcgtagaattgaagcatttacaatgtcaacggatgggatgatctggacaggatcggcaaatggctctcttgcccaatgggatggcagtggtaatcgtttgcaagagttcctgcatcattcgtcatctgtccaatgcatttacaattttggaacaagaatatgggtgggttacatggatggcaacatccagctgttggaccttgaaggcaacttgttaggaggatggattgcacatagtagtccaattctgagtatggctgttggaggttcatatatctttacactggctggtcatggaggaatccgtggatggaacttggcatcaccagggcctcttgacaacattttgcgctcagagttgatggagaaagattcatcatacaaaagttttgaatacatgaaagtattagtgggttcttggaatgttgggcaagaaaaggcatcctacgagtctttaagagcttggctaaaactcccatcgccagaagttgggttggttgtacttggattgcaggaggtggacatgggtgctggttttcttgcaatgtctgcagccaaagaaacggtaggactagagggaagtacaaatggagagtggtggttggatgtaattggccagattttaaaggttcattcctttgtgcgtgttggttcaagacagatggctggattactcattgctggtgagaataaatcttaagcagttcattggagacattgagaatgcggcagtgccatgtggattagggcgagcaatcggcaataagggtgcagtaggcttgagaatgagaatacatggtagaaacatttgctttgtaaattgtcatttttctgcacatatggaagctgtgagcagacggaatgaagactttgaccatgtctttagatcaatgacattttcttctccttcaaatggattattgacaacatcagtttctggttctgctgctcagcttcttcgaggaacaaatggatcaagactgcctgagttgtcagatactgacttgatcgtgtttcttggtgacttcaattaccggctttataacatttctttcgatgaggcaatgggcttggtttcccggcgatgctttgactggttgagagagaatgatcagctgcgagcagaaatgaaatctgggagagtcttccagggattacgtgaaggagaatttaagttcccccctacttataaatttgagaagcacatagcaggcttatctggttatgataatagtgagaaaaggcgcattccagcctggtgtgacagagttctatatcgagacagccgaactagttcacagattgagtgttctttggaatgtcctgtagtctgttcgatatcactgtacgactcttgtatggaagcaacagacagtgatcataaacctgtcaaatgtgtgttcaatttagatattgctcatgtggacaaacaaacaatgaggcagaagtatggagaaataatgggttcaaataaggaagtgcttgactcacttcagggcttggaggctttgcctgaagtagatatcagcacgaatgacatcattctgcaagatcaaaacccttttgttgtgaaactgcacaacagaagtacaaaagagttggcttgttttgagatcattggtcagacaccaaagtcatctggcacacctttctcaggtttcccttcttggctgaaggtttctccggcagtcggtataatttctcccagacaatctgttgaagtgacgttgcaacatggacaaatacgaagtcaagattatcttactgggacttcaggggacagttctggagctgcgcaagagaaggttgcaacgctattggttacagtaaccagagtggactcgacagctgggagacggcacaaaatacaagtacagcaccggtgccgcagggagacgtattcgtcaagaggttataacttggcggatcgattctttgcttgaaccagagaattcagaagtgctgggccaacgatgttgatgtcccagtgtgcatagagatttgcatgttgtagaacaaaaatcctgtgatgagagtggcataaaaacgcggatttggagagttcaaatttattaatagtgtcggaaagagcactggacgagtacagagtacagacgtaccgcgataaagactgcaaagctgatattttctgaagagctcactcgaataagcattcaatcctgcagcgcaccagcacatactgg

SEQ ID NO: 27306 - DNA, 1059 bp, Zea Mays
atttctgacctattacggtttttttccctgttgcggatactggaaatgttggagcctttgtttttgcattcaagtgccatttttttttcttggttgggtaagtgtgctctatcagctgattctactctttgtgttcaatgtataataccagaccagtgttttagggagttccctttatttgacattgtagattgaataatgcactgactgatcaagagtccattgattgacttcggtgttgtttggttgcaccatcttgtaaaaataattttccgtaaagctaagtggctagctgtatgtatattgcaggcataataaggtgatttatatcaatgcgcatgtcttggtatttgctgatatttttttccttgttgattctcatggtgtagtgggagtgtcatcttcagacttacgttactgttagcctggttctaatcaacgacttatctatttcttattatataaatgaagtgatcttctgagttctgacctttgctgtacacccagagatcatttttctgagttctaacctttgttgtacacccagagattatgcgggtatcaagcattgtgcacaaccatggatttggcgatttcgacaggcatcggtttagaagtcctagtccaatgtcttctccaaaccctagagctaatctccctggcaatgggttcagtccttggagcggactacaagagagattaggttttcctcaaggaaccagcatggactggcaaggagcacccccaagtcctagctcccatgttgtaaagaagattcttcgtctggaggttccagttgattcttatccgaatttcaattttgtggggcgcattttaggacctagaggtaattctctaaagcgagtagaagcatccactgggtgtcgtgttttcattagaggaaagggttccatcaaagattcagggaaggtaagagaagtttctgttccttttttacattcgccaaattaaagtcacgttgctcttatttaactctcaggcaaatatgttgatcgggagcctttgaatcccaatgtgttttcttgaacttgtaatgct

SEQ ID NO: 27307 - DNA, 1610 bp, Zea Mays
gaacactccatgcaccatcatcaccacctcacatgtctcaatgcaaaagaaacgcttggctggatggctttgctctcggctctcaggcagatcgctggcatctctgcgggcccactctccgacgccctaaaggcagagctgtacacccttgtacttggcaccttctccctgccaatcaacgtcccaggaaccaactacagcaaagggctccaggcaaggaagaagctcgtggcaatgctgcggcagatgatcgctgaccggaggtcctctggctgcgcccgagacgacatgctggacgcgctgctcagcggcaacgagggtaccagggcgaagctcagcgacgaccagatcatcgaccttctcatcaccctcatatactctgggtacgagactgtgtcgaccacctcgatgatggcggtgaagtacctgtcggacaaccccaaagctctcggacagatcaggaaagagcaccttgacatcaggaaggctaagtcaccggaggatccccttgactggaacgactacaagtccatgaccttcaccaaagctgtcatttatgagactctaaggctagctacagtagtcaacgggctgctgaggaaaactacccatgacgtagaaatgaatgggtatgttattccaaaaggctggagaatttatgtctacacaagggagataaactacgacccgttcctgtacccggaacccatggttttcaacccatggagatggatggagacgaacctggaatcacatccgcacttcatgctgttcggaggaggtgcccgcatgtgcccagggaaggaggtaggaacagttgaaatcgcaacgttccttcactatttcgtgacgcgttacagatgggaggaggagggaaacaacacaatatcgaagttccccagagtggcggctcccaatgggctacatatccgagttcaagattactgaacttcgtgaggcgttttgtgaagtttaggtagggattcagacagatagaaataacccatgcgatgctgatgctgctggcctcttcgaaaggactagaacagccattagtgcctgtaaaatgtgtccatgccgatagtaatgttattatagggaggatataggtatcataggtttattagaaatttgatgtagaaagccaacagatgctcctgtattcttttgctccatcaaaacagtggtatcatttggcttctatgcttttgaatcgaacatggtacagaacccaactatccatatgcaaacttccagcttcatgagcccattcaataaaaaaatgtcaataaccaactgatctaaaaaaaatatggatggacactggccgcaaaacgttgagcacatactaaagatatgctaaactggtatctgctattgctaatagaggaacagttttaccttattcaggatatataagataaacgcttcagtgttagaggcttccaattgcttataaaaaggcaagaatgagctcatgttcacaatgcaagttccttcaaccggttaggtaacacattgatgaaagcaaactcccttccccacgacggtccaacataattggaagaaaatattcattgctgcttcaaaagatgccaatagttgctgaa

SEQ ID NO: 27308 - DNA, 2489 bp, Zea Mays
ctatcaccaaggatcaccggtcagctcacgtggtggctcatgctccttgtccgaagttgatcatgaacttacacattgaaatactggtgggcctcgagaggccaggaggtggagaggagttcaacaagtactacatcatgtctgctctcctatccgtggattgcaggtgagtgcaaacagcttcctgctaaaagttagcacggaatcggttgatacttattgatggtgcctgaaatatcctatagatgtctttagtagaggatccaaataatggcctgcaagggtttcttgaatcggatcgcacaaaactccatctgcttcagaattgagctaagcgcatcctaacatcttgactcctatatcgatcaattatttctgttactcatttgattctttagtttcgtagagggaggaacatcgtgccatcgtgggatgcaggccccaaggaacaccagatattttgaggaaatatttatgggtcatttgattttacttatgaggtttagatcaaatgatagatgatgtcccgcatgattttggaattgcatttgtattgtataaacctgaatataaatgtcattcttaaatttgtgaagtagtctgaatgtctgatagcatcaaaaattggtgaagtagtctgatagcaacataaactataattaattgagatcttattactcacactagatcttgctattattaatcatggtacaacactgtcctcgatgtggttatgatcttctattgtaatggcactaacttcttatcaggaaaacatcaaaaacaatttggaaacaatttatttggacagggagaacctgggtgggttttcggattgtgcaaactgattatatgttgctaagtgcaggacatttgggaatttttctgagggtgaaatggtgccttttggaccctaaactatggagagattagtaggatgtatggactctttgtttcaattatgtggtaaatcagtttagctgaaaatagagtacttttaaaggcataaatactcctatttctgtacttgagatcacatttatcctgatataggttgccattcatgatatttctaggttgcacatatgttccaagcgctaggactgaaaggatgccacttgctattttgctgaattataacctatgcttaatatagatgattcttcattaagtgaacaggtagctgacccacattcttgctgaattataacctatgcttaatcttggatccaatcaacaaacaaataagtgccacaagcaaacccaccctgagaaaaatacagtgcttttctttggttccacattcttggtttccaatgcatgtttctcttcttttgatatactgttttcttttaccgacacatctctatctttatatgtgtccaaagctccaaaatgaaatgatttagtgcttgcactgaaaaaggaacattctgtatgctaattctctaaaatgtgtatggctgaaatcgatatatttgcaacatacgaatgaccttttttaacaatttgatggagcagaatggaggataatctaccagttaatgtccgggaatatcaagaacttgctaagaaattaattctaaaaaaagtcattacacgctaagaaaaataatgtgcaagctactgaatttacaatcaagcaagggtcgaggagtgggagggagggtactgggccctaaaggagaagtaccgaaccgggctaaacccgcaggagaaggtgaagctagagaaggagcccatggggcagttcgtggatgacgacatcagggacctgccaagatctccatggaggagatcgacgccgccaagcccaccaaggacaacgtcgacgtccgcctcaagtggctcggcctcttccaccgctacaagcaccagtgttgttgttgctgttggtaggagcgaccccgcgagcgtgacacagacaaagcagccttcggtgccagttcagaccacttatctggtctcaaggttcttcatggccttgactctcaaagatcagagtattcttgtcaatggggatatcaatgaaggcttgcttcgcctttgtcacaagcttcatcgtttaaggaaagaatatgcatacacatttgaaagcacaagcttatcttatcagtgttctgaggttagcaggatcttgcaaggctagggacccaggggctacacatcttataactgaaaaacacatgagcagtatgttgttaacacttttttttcttgttcgtgtttcatagatagaggtatataatatggagacgaataatatttaaaccattagagacccatgtaacaataaaacagattgtttagctattatgctcactcaatatggagatcctcaagtatcttagaatcagttgggcaaacacaaatttacagtcatagttttctttgatggtttttacaaatacttggtttgcactattgatgaaaacatggtattgtttcaagccaaccttgagcattcatctgagaagtttgaaaatgtt

SEQ ID NO: 27309 - DNA, 5134 bp, Zea Mays
ccgcacagcactttctgaccgctggcccgcctgtcagaaccgccgggcatcgtcgacgccgccgcttgcccccattaaacccccggtctcgaggcgattctcccgcagcgctacatcgccactagaaccctccccactctacgaagcacgaagttaacgcgcgacggcggtcacaccgccgccgccgcccaccaccgctcacggccggcggcgacgcgctgcatctccgcaccgcctcctgtccgccaaccccgccctcccatccccgtacgcgtccggcctgccgcagcttccccttcacccgccaggctataagctgctagtgcttgtggaatggaagagccacagaaggacagtgggcaaccatcaaaaagttctgattctgagctagaagctatggtattggatgataatggagcgggaaaatcccatagtatggaggaaaacagggattctcctatagatgtcgatggtgggcagtcatctatggatgtggatatcaagggaaaatcatccctcagtgatgatgttaatggaaagtcttcttccgagccatattccaatgctccaattgacatgagtgtcgaaagcctagagaagttttgcaaagaagcgtcaaggtccttctttgatgaagttggtctgattagccatcagataaattcctacaatgagtttgtctcgcatgggctccaggagctttttgattcgcttggggaagtgattgttgaacctggctatgatccttcgaagaaaggatcaggtggctggaagcatgccatcatcaagtttgggagagtgaagcttgaaaagcctgtgttttggactggcaaggatgaaggttctgttgattttaaaccttggcatgctcgtctccagaatatgacatatgcttcaagacttatagtagaagtgactattcaggtttattctttggagaaaagtgacaaatctaaaacagggaatgatggttttgttcaaaaaaggaacttcatgaatgaaactcattggatatttattggcctccttccggttatggtcaaatcaaacttatgtttgctgcatagcctcaacgaaagtgagtgcctgttcgacgcaggtggatactttttggtcaagggaatggagaaggtattcattgctcaagagcaaagatgtctaaggaggctttggattagtgaccgaccttgctggactatctcttttatgtctgaaatcaagcgtagacgtatatatattaaactagttgaatctacaaggagtgaagatttcagtgagagcaaaatcattaccatttcctttttgtatgcgacaatgccagtttggttgttgttctttgcacttggaatatcatcagataaggaagtgtttgatatgatagatatgcaagattgtgatgcttctgttatcaacacgatatctgcaactatcaaagaatctgataaactgtgtgaagacttccgtaaatcagataaagctcgtcaatatgttgatgagttggtaaaaagttcgagatttcctccagcggagtcctttgatgactatattgctaggtttctctttcctgatattagtggaaatagaaacaaagcacttttcttagggtacatggttaaatgtctgctaatggcttttactgggaagcgtaaatgtgataataaggatgatttcaggaacaaaaggctggacctacctggtgaattgcttggaagggaacttagggcacagcttaggctggcagagaaacgcatggttaaggccatccaaagagatttgaatagtgaccagctgaacgatgctcaggaattgttgcgactctaaggagaactaatcctcttcaaatgatgtctgacttgaggaaaacccggcagcgggttgcttacgctgggaaagctggtgatgcaagatatccgaatccatcctattggggaaagctatgctttatgtccactccggatggtgaaaactgtggacttgtaaaaaatctagctgttactgctattgttagctcaagggtgatgcagcccttgattgagagcttcatttcttgtggaatgagtaagctgaatgacattcctactgaacacattcaaagaatggataagatctttttgaatggcaattgggtgggatcttgtgaaaattcagcttcatttgtatttcgattgaggtgcatgagacgcagcagtctgattgatcctcaggttgaaattaaaagggacaagcaccacaatgaggttcgcgtgtttactgatgcagggcgaatcctcagaccccttcttgtggttgagaatctgaataaaatcagaaaacctaaggggcgctcattctctttccatgaattaatgcaacaagaaataattgagttcattggtgttgaagaggaggaagatatacaatgtgcgtggggaatcaggcatttgtttgagagtgaaggtgcgatatctagttatactcactgtgaactggatccttcctttcttctgggattaagctgtggtatcattccttttgcaaaccacaattttgctcggagggtattgtaccaatctgaaaaacactcgcaacaagctattgggtactcaacgacaaatccacacatcagagttgatactctttctcatcaactatattatcctcagaggcctcttttcaaaacagttatagccgactgtcttggcagatcagattatgcttcttttggaagaaaaaatgatttcgcgagaccagaatattttaatggacaaaatgcaattgtagcagtcaatgttcatcaggggtttaaccaagaggattccctggttatgaatagggcttctcttgaacgaggtatgtttaggactgaacacctcaggagctataaggcagatgtagaaaacaaggatggaaccaaacgactgaaattgaaggaaaaaatagactttggaaaaacagaaagcaaaagaggacgtgttgacaatcttgatgatgatggcttaccttacgttggtgcaagtcttcagaccaatgacattgttattggcaaagtctcagaatctggagaagaccacagtattaagctgaagcatacagaaaagggaatggttcagaaagtattgctttcagcaaatgatgaagggaagaattttgctgtggttactctaagacaggttcggacaccttgccttggagataagttttccagcatgcatggccaaaaaggtgttgttggttttctagaatctcaagagaacttcccatttactcacgaaggtatagtcccggatattgtgataaatccacatgccttcccaacacgtcaaactcccggacagctgcttgaagctgctctggggaagggaatagcttgcaaaggtacaatgagatatgcaacaccattcaccacagcatcagttgacgttattgcagaacagttgcacagggctggttattcacgatggggatctgagaacgttctaaatgggcgaacaggtgaaagagtgcaatccttggttttcatgggccctaccttttaccagaggctgattcatatgtccgaagataaggtgaaattccgtaacactgggccggtgcaccccctcacgaggcagcctgttgccgacaggaaaaggtttggtggagttaagtttggagaaatggagcgtgactgcctcctcgcccatgggtcagctgccaacctgcatgaacgcctcttcctgcttagtgacttctcccagatgcacatctgccagacatgcgagcgcgtggctaatgttgtcatgaggtctgtccccggaggcaagaagatccgtggcccctactgcggcttctgcaagtcttcggagaacatagtgagaatcaatgtgccctatggcgcgaagctgctctaccaggaactcttcagcatggggatctgcctcaagtttgagacccaagtctgctagaacttgtagacctgcttgcatccagttattacatatgtacatacagctagcctatgaggatctccaagctggtgtgccggtgtgtgatgctggcatagtaaggatgggcgagctagaaaccctgttgtgtttatgtgctgttttctccctgctcatgtggtaaactatgctaaagtgaatgaacactcgtttcctgttccctctttgaatgcgctgtgttagcatgcccttttgtttgaagattgcgtcttttgtggagcaccttgtattgctccgtagggatcacaccccttaccgccggcgatggccgacgatttgagataagatataatatttctggtcgtccttgttaaagagttcatgcatatacagtacacaagaaatgtcgatcgaatatagctagtaaaacaacttcaagaaacatgtacatgcggttggatggatcctttctcatcgatgatttgtctgcattgattcatccaaatcaagatacaagaggcagcatgagatgatctgtctgtgtctgcattgatccaaatcaagacacaatagagggacagcatgaggacgaacagagacaaatccatcgccccgtgcttgagtttctccacgagctagtaagagatcagcaagatcctctctagctaactacctgagggaaacgaacagcaggggaggaccaagaagtgatgagtgggggaactccatgcgagccctctggcctctcctcccacaggctacatcttgaggacgaagaagaacagtcctcgatgcgtcttcacctagctgctgcttaatttacgagtgatgctcttcgatccaaaggtacttatactacaaatacccctccccctctctctctctgtctccatcgccccaatgcaaagccggtctttctatagctcatagctgctggaatttggacctggctttgaaacatgtcgtgcactcgcgttgggtttgaaagagatgacttgcgttgcagcgagcgagcgacacaggtcaggtcacactgcaggggggaagcgaagcacgagtgtacatgcattgaacctggacgccctctttagcttttgcgtttgggcatacagtatttttattttggccttctgggatttgggaatacgagtcatcgattccctcagtgtcgtcccgtcacagctttttttttccgttgcctttatgctgcatgcccattcagcagtcacgca

SEQ ID NO: 27310 - DNA, 2491 bp, Zea Mays
atgccgactgccttgactgtcttcgaatgtccaaggaaagtggtttggctggggagtgggggcagacaattacacttactccacaacacccgaagttcccgttccgtttccgttacacagactcccgactccaactccttcattcacctttattattacacggaagccgcaagcacggctagccattgccgcactagccgtcccattgcttcctccccgccgcacagagcaatggagaggcagaggagctcctcctcctcctccccgtatcagtttcttagtcccaagagcctcctcctactgtccttcgcctcctcctccctcctcttctccttcctcttcgcgctcttcgccatccgccacggccgccccctcaacctcccattcaccacgcccaacacctcatactcattcgccatgcccaacacctcatcctcgttcgccatgcccaacacctccaccgcggcccttgcaccgttgccgcctcctgggaacggtgggggttccatgggcggcgcggtggcgctggcagcagaggccggttatgcggtccgtgggcacgggagtggagattcagtggcggatggagcccgccgcgcggttaccggagacctgtccgctcggggcgtgggcccgccaatggaggtggaaggagcggttactggaggaggaaatggtggagcaccggcgactggtaaggttttggaggcgcaagaggttgcaggagctgggaataactctactggaacctcggatttggctatgcatgctaaagaaaaagaagtaaccggtgtgggaggagatgccgacaagttggggaaatttcctgttcggaaggaaaacttggccgagggtagcaggcaacacgttggttgggaaacaaagacgcagctaaatgctggcagtgcttcttcgtcacaggaagtagatgcgtcaatggtgagaccggagggagcagagtctttgacagccgtcaatttgtccatggatgatgaagctgcaatgcaggtgagaggtgaatccgtcgtgcaagacgatgttgtggttgtgggggataagcgctattcctctgtacaagcagcagcttatgcttctgagcaagtggagcagctggaaagctcgcatctttcagcggggaacaatagttccttggcagctccagctccagccaatcaaaataagcaagatcctaatctgattgaggaagaagcggtcacgagcaaaatggattctacacgaagcgataccaaacgttgtgatgtttatgatggaagttgggtgtttgatgacgagacctatccactctacacgagtgactcatgcccttttatagacgaaggattcagctgtggagcaaatgggagaacggatcaaagatacatgaagtggaggtggcgacctaaccattgcaatataccaaggtttgatgctaggaaaatgcttgagacgctgcgaggaaagcgactggtgtttgtcggggactccatcaacaggaaccagtgggagtccatgatgtgcttgctgagaacggctgtcccagatcctggaaggattcatgaaacccgtggccgcaggatcactaaagagaagggtgactacaacttcaagttcttggactacaactgtagtgtggagtatcatgtgacgcacttcttggtgcacgaaagcaaggcgagaattgggcagaagcgcatgaagacgctacggatcgataccatccatcggagctcatcgagatggaaaggtgctgacgtgcttgtgttcaacactgcccattggtggtcacatcacaaaacacagtctggagtgaactattatcaagagggagatcatgtccatccccatctcgatgcctctaccgctttccaaagagcactaaccacctgggcatcctgggtcgacagtcacatcaatccacagctaactcgagtgttcttccgaagctcatccccgtcacatttcagtggtggggagtggaattcagggggacactgcagggagagcatgctgcccctcaatgacacccgtgctaggccggtgcctgagagaaacttgatcttggaacaggatagatggtcacccatctgtatatggccggaagacggtaggtttaaccgcgtcgagcgtccagcaggactgcagccactggtgccttcctggagtcccagatacatggaatgaactgttattctaccatctactgtcgccgcaagaaaaggatgtaacaagttagcgactgaattatttgcccgctctttttttttgttgggtcgggatatttattagtcttgccttgtaaatgttaatttagtttgaaaagagggcgcaagtgcacaatcagccaatcacgtttgtctcggaagtctgcagccaataatgtgacatgcaaataccctactatcaggctctctagtaacactactaatgaatcatcaaatactttcaggaataaagtgtacatttgagtgtttgacaaattatttcatctcac

SEQ ID NO: 27311 - DNA, 972 bp, Zea Mays
acttatcttccttatcctatctccatcgccccatttcctatcctcccagccgatcccctctccctcacggcgccctctcccatggccgtcggccctccccgccatggacgccgctcttccttcctatagtacatcagcgacctcgtctccctcccttcccgtggactcctgctgcaggagctgttcctctactgcgctcgcctaagatggccggactcgcccatgatggctttcccctgtcgatgctgttctctagccgccatggcagtgcctccctgtatcagtccggtgaccgggccctccccttcccacgtcatgctggtgccatgtcttctccctcaccggccaacctcgccagccaccaggaaggtgtctccctctcggcagctcccatggccaccatcagccctagctgtgcttgccctggttccagcagctcgacgccagcccctctcaatcttccatcgctgccgctcagcttgtcccagatatattgatgttgacaattggaaatccatgtagcaaataaatgattttggaactgggggcaggtcagagtctagagcatgctcattccacacattggaggtggattttcctcaattggagatattgacaaattggaaaaaaatgtgacttgacctgtgctgcaacaaccttaaactaggaggggcttctaattcttcatctctaccaacagtcctctcctgttactttttaaaccaataactttttcaagtttgtgcagatgcacacatccttgagccaaaatagaaaaaaatcatagaagagttctttggctgtcacgtgattcaagagtattaatgatatacaaaagtttgctttatggcaagtcaggtaaccacaaattttgggcaatgatagggatgtgcagtggtggtctcttaaaagaattttgtgttccagcgtagctatttccactgcaaactatcaaatcattacaaactactg

SEQ ID NO: 27312 - DNA, 4262 bp, Zea Mays
ctccgctaccaccattccacaccaccgcgggtcctcccgccagcctcgagagaaccgcgcgccgcgcccccatcttttcccccaaaccctccgcgcgagcccgaggccccgagcgtcaggcaaggccgcacaccgccgccgcttcccctcatcatccgtctcctccccatccctttcccctcatccgcattcggtaggctgtggcgccagtgtccgcttcaggactggattggtcgtgggaagcaagaaccgcccgcccgcgcattagaaccctagcccccgccaatctaacagcgcaaagaatccggaaaacccccggcttttcggtctcccgagcccgggagatccatccttcgctgcgtcggagatgtcgtccgacatccgtaaatggttcatgaagccgcaggacaagagcgcggcggcatctggagccgccgggaagccctcggggtcggcggctgagaagaagcccgtgctcagcattccggagaagaagtcggcgccccccgcattggcgtcctgtgaccatgatacttccgctagaaggaagacaagcaaatattttgggtcaaaagcagaaaaggactcagatgtccaaatggcagacgcctctggggggaagagtgcggctaaaagaaaacttcagaaatgcaacgatgaagtcaaggaggacagcaagccttttccagcaaagaaaatgtttgatgatgaagaagatgacgattttgtggcacctgcaaagaagaaaactccagtgaagccaccaccttcaaaaaagcttaaagttgaatctaatgttgaagcccctgcaaagactactggtgttgatgatgctgaggatgaggacaggatggatgaagatgccaagaccccctctaaaggagctggaaggggaaggggaagaggaggaagaggaggagcaggagctgcccctgggggcagaggtagaggaggtgggagaggttttatgaattttggtgagaggaaagatcctcctcacaaaggagaaaaggaggtcccagagggtgcccctgactgtttatctggtctgacatttgtcataagtggtaccctcgacagtcttgaacgtgaggaagcaactgatctaattaagcgttatggtggccgtgtgactggctctattagtaaaaagacgagctacttattggccgacgaagacattggtggagtcaaatctaacaaagcaaaagatctgggtgttccattcttgactgaagatggtttatttgatttgatccgaaaatcaaagcctgcaaaggctcctgtagacaaacgtcaaaacaacaacagttctgaaaagcttcagaaatcacagacaaagagctctccagctaaagttgaaaaacgagccgaagcaagtgctgtaggcaaaagtattgcttcaaacagtaatgctgcaagtgcctccgctgacaaacaaaagcccaagattgttgaccgtggttctatgcaatggacagaaaaatatcggccaaaagttccaaatgacatagttggcaatcaatcaatggtcaaacaacttcatgattggttaaaaagttgggatgcactattccttcattctggccaaaagggtaagggaaagaaacaaactgacagtgcagccaaaaaggctgtgttgctgagtggacctcctggtatcggtaagactacaactgctaaagttgttagtcagatgcttggtttgcaggccattgaggtaaatgcgagtgatagccgtggtaaggcagactccaagatcgagaagggtgttggggggagtacatcaaattctatcaaagagcttatcaacaacgcgactctgaattatagtgacaatcggttaaaacatcccaaagctgtactagttatggatgaagttgatggtatgtctgctggagatagaggtggtgttgctgatcttattgctagcatcaagatatccaagatccctattatctgcatttgtaatgaccgttatagtcagaaattgaagaatcttgtgaattactgccttatgctcaacttcagaaagccaacaaaacaacagatgggtaaaagattgatggaaattgccaaaaaggaaggtattcaagctcaagagaatgcaatggaagagcttgctgaaagagtgcacggagatattcgcatggcactcaaccatttgcagtatatgagcctctcccagtctgtggtcaaatatgatgatataaaggagcgacttaatagcagttcaaaggatgaagatatttctccttttactgctgttgacaaactttttggtttcaatggcgggaggttaaggatggatgagagaatggattttggcatgagcgatcctgatttagttcccttgatcatccaggaaaattatatcaattatcggcctaacaccatcggcaaggatgaaagtggagttaaaagaatgaatgctttagcccgggctgctgaatctatagcggacggtgatcttgttaatgtacagataagaagatatcgacagtggcagctgtcacaagctgcttgttttgcttcatctatagtacctgccgctttgatgcatgggaacagagaaatccttgaagcaggtgagcgaaactttaataggtttggtggatggttgggtaagtactcgactactaacaaaaacagaaggctactggaagatgtccacagtcatattcttgcctcccagcaagcaaacttggacagggatgcattgaggttggattatcttactcttatcttgagagagctgactgacccactgaaaaaaatgtcaaaggatgaagctgttcaaaaggtggtagagtttatggatacatactctttaagccaggaagacttcgatacaattgttgaagtatccaaatttaagggtcatccaagtcctatggatgggattcaacctgctgttaaaagtgccttgacaaaggcatacaaacaaggaagtagttcccgtgttgttcgagcagcagatctaataaacattccaggcatgaaaaagcctttaaagaaacgagtggcggcgatcttggagccggtagaagagagcctacctgaagaaaatggactagcatcagctgaagatgatgaagatggttcttctgatgctgaaaataatggtgcatgttctcctttcccacgtaacaaacataaaaaatctggtagatgcctgtttgtttggctaatgtgtcaggcattaggataaaatggatctgttttgaggcaactttgtggtgccacactgactgacttcatttaacgcaattgtgaaagtacccatttttatggagatttgtagcatcattcaggcaaatgcaaatcgagatcatatagacatgaacttgtgaaatagctacacctaactatagacaggtttacataattacatgtacttcaagacacaccatactaatatatggtagagccagttctatcgcaagtttttagtcagttggatgctaatggaagctgcatccattagcacagttggtaaagcgtttttagtcagttgggatgctttgggagttgcatccagaaaggttcatatggcttgctgtctaatcacttttttcccttcagatgagcttgtgcctgctgactctacgccgaagctggacctgcaaagcgacaagaagaaaggaatccaagtgcagcttgacctgaagagcaatggggatggcccgcgcgggaagaaggcgcctgctgccaggtcaagagcaaccgggtcaggtgggaaggccgcggcgggaggaggttcggctgggaagaggaagaggtaaatgagacatttggcgcctgcccacagttggccggtggttagtttggacgcacagatcccttggtaaataaggagcaggggtggtaagcttcagagttttgctcatctaatggcacatgtaggcactaggctactgtgcctgctcccatattttctcccagggcacccatgtcttgctaccagaatttgtttgcacttaggctacttccaggttgtggcaatcgagagtttggtgttgtctgtttcatttagcgaatttgtcagtactctataccacgggtcgttgcctcgttggctttgtcttcgtattctcttgtgcattttcgcgttggtagacagggttttatgtgtaaagaaaatgcagtagcgaggcatttaggcaggtaaggagaaacaaaaagattgcttggttgtggtttactattactattaggccaaccccatcgctccatgctggcttgtaatcccagcttgcata

SEQ ID NO: 27313 - DNA, 1474 bp, Zea Mays
gtcgctgtatcggtgcagaaatcttgctttattatcatcccatcggagcatggctgcaccatgtcattcatgtctccattcccggggatggatctaagtaaaatggatcccgggactctgaccctccttggggcagctggttgtgtaatgctgactatgcatttcactgtgcaattggtgtcacaacatctcttctattggaaaaaccccaaggagcagaaagccatacttattattgtgctgatggctccactatacgctatctcttccttcgtgggtcttcttgatatccagggtagcaagacatttttcacattcttagatgctgttaaagaatgctatgaggcactggtgattgctaagtttatggcattgatgtacagctacttgaatatatctatcagcaagaacatagtccctgatgaaatcaaagggagggtgcttcatcattccttccctgtttctcttttcctgccccgcaatgtccgattggagcacaaaacattgaagcttctgaagtattggacctggcaatttgttattgttaggccagtatgttccattctgattattgcactccagcttcttgggctgtaccccagctgggtcagctggacgtttagtattatactgaacttttcagtctccatggccttatatgcattggttctcttctaccacttgtttgctaaagagctggcacctcacaagcctcttgcaaagttcttgtgcatcaaagggattgtcttcttctctttctggcagggttttgcgctcgatgttttaacccaagcaggcgtgatcaaatcccaccatttctggctggacgtggagcacatccaggaggcgatccagaacgtcctggtgatccttgagatggtggtgttctccgtcatccagcagtacgcataccacgtcgccccctacagcggcgctgacagggccaagtttgagaagaagaacgaatgaaccaggtttccaaaaagaatgaaagaaggaaaaaaactctctgctttctggtcgctcggagatggagcaccagtatttcctcacggatggacgacatacacaagttcatcgagtctcgcgagtagcgtatttggtagcgagttgtcgcgctgtaaaattacactgtccttgcgcgctgaataattttgctggctttgtcgttttggttttttgaacgttgtcgccgaggctatatagccaggactgttcgtcttgtacgagcgcgcgctctctctctctctctctctctgcggacttggcgaatccttttatgaataaaagctactgtcctgttctacagaggccgcactgggctgatgccgatgaaggttgcgggttgcctgcaaccacctgctgttggggggatgatattgcaatctgcacgttcgtcctttctccgtggagtaatttttttttcaggaacgtgatctgatactacactagtactagtatgtgtttttgaggt

SEQ ID NO: 27314 - DNA, 891 bp, Zea Mays
cagagccttctggaccggggatgaatcgaccggagagaatgagagaagtcaggggacgaatcgaccggagagaatgagagaagtcaggggaggaatcgtctccgtcgtgccgccatcttctccactaagttgacgccggtcgctagtcgccgctctcgacgtcccccctcctccgtcgtccactgcccttggcactacaccagtgtcgtccgccgcatcatcgttcctgcttcgccgcatactcgccgcgccgtcgccgacaaggaccatccgggctgaggcctgctaaaatctccaccacttctctgactacttcgtcatctcctccacgttcgacatagatacaaatgtcttttcccccatcggagctgagtacatccgagtgtcctcactgataggattgttaatggcgtccggtcaaaaataagttagctataccatcctcaccctcggagctccgtacatgcgagtgtcctcgctgttagggtccacatgtacggatgtctttttccttatcagagctccatacacctgctcgaaattggcttcatcaacttcaacatatttactcaagggaaaaaaggctgcttgattaagagtaaagaagaagacgaagaaagcgaagaaatgagaaaaggctgaagcttaggtgaaccattaggccgaagggactttcgtattttggaatgaacacttatgcagttaaactactgcttattgtaatatagcattttactctttgtagtgttttcccttttttactctaaatgcttttgttgtgtgtgaaaccaagtatttctagtattttgaggcgaaggcgaaaaacaccttgccttcttttcactcgaaaaaagcccccaaagcttacacttaatggccttctgcattatg

SEQ ID NO: 27315 - DNA, 2831 bp, Zea Mays
acctctaccgacacgtgggtctacccgccaacctgtccgtttccgccgcctctgacacgcgggcacaggcacgggcctcctccaaaaaaccccccccctccccagcttgtctgcccctctctccatttcgcggaggaagaaaaaggggaccaaaaaacggaaaaggggataggaggaacggatcagcggtggaagcttccagccctagcgcagcaatggcgggttggtgcgagcaggcggtggcgctgctacagcgccccgcggtggcggagatggccgtcgacgtgctgctctgcgcggtgccgatctgggccgccgtcatgatcggcctcgtcgtcggctggtcctggcgcccgcgctggacgggactgctcttcctcggcctccggagccgcctccgcatcctctgggtgccgccaggcctcggggcccggcggctctggttcgcctgcaccgcgctctccgcctgctccgtcgcgaccaagctcatctcctccgcattccgccgctgcagaggcaagcaccaggacagggcctcccccgacgatgatgccgctgcgaccagagacggcggatgtcgcgccgacggcagaacaaattttgagggtgagcatgatacagtcactgagaaggacctagaacatctcctgcaacttttagataataaggaaagcggggatacagcttggcagaatttgatggagcgtagaacctccaacatgacatacaatgcctggcggcgtgagcctgaggagggacctataatgtactgcagccgcactatttttgaggatgctactcctgaactggttagagatttcttctgggatggtgattttcgtctaaagtgggatcccatgcttgcatattgcaaatctttggatgagttccctcagaatggagcaacaattgtccactggataaaaaagttcccgttcttttgcagtgaccgtgaatacatctttggaggacgcatatgggaatctgggaagacttactattgtgttactaaggtacatgtacatagtgttttattaaccgatacttctactcatgtaatgttaatgctccctccattatctgaaaaagaattcatataattttataactgacaaaggtgaaatgttttgtcccctttccatttcctgctcaatggctatgctttacttttggctttacacctactgtgtgaaatttatgttccgttttttctccaagaaattgcttactctttatttaacaaaacattcttgttctgcacttctctgctgtttgatggtagtctgcagaaattttctcaggattgcttactctttatttaacaaaacattcttgttctgcacttctctgctgtttgatggtagtctgcagaaattttctcaggagtggccttgtaattgatccggacctaatgtaaatgcttaagagtgataattttcgtgagttttttcccgtcacccataaaagagtaacccaaaactatcaactactcagatagcaaactgcttattatcttcctgcatgatgtgttgaatttacctatcagtgtcttttaaagttgaactgcttgcataatttcatcagcacctttaagttttatgggatatcaggttattagatttcttggtttaggagatgaacatacattaaccgctatgttccttttctgactaatatgtgctagactttttggaaaacaaacaatggacctgtattacatgaagagaacattacactgggtcatttactattgatagtggctggttggagcacatcttagtatttaaagatggatttaactgatgacagtcaagactgaatcaatgcattaaaacatcttatttttaggcattaaattctcacacacatcttgctgagaaaccaaactctgctctccgtagattagagcgacacgcctaccttgtctggcatgtttgtgaaatatggattagattcacaaggatttcaatatattaaaatcgctgcctgtagaaaatgtttgctaacatcctatgtaagtgcatatatgtgagcgctcagcagcctccgttccgcagggtgttccatatccatcattgcccaagaaagaaaaaccgaggcgtgtggagctgtacttctcaagttggcgtattagagctgttcaatcgcctaaacatgtgggtcagcaatctgcgtgtgaagtaactttggttcactatgaggacatgggtataccaaaagatgtagcccgggttgctgttcgtcatggcatgtggggtgctgttaagaaacttcagtctggattcagagcataccagcaaatgagacacacagaaactaccctgtcacacagcgtcatcatggctcgaatgaccaccaagatatccatcacagcttcaaatgatcccttggaccatgacctctcggttgccgataaaatcagtgacgagaatgacagctccaatgcagttcaacatggttttgattggaagtggttggtggttgggggtgcagtggctgcggtttgtgtgctcaacaccggtctggtaggcaaggccgtcttgcttggagcagcgagaaggcaagcaaagaagtgatatgaggagcagccttccagccagacattcatcagattgtagctacgatcgtacaggcaaaaaaatgttgagaaaataggtggggttcaacagagataactgctgtttgaggcgtatgcaatgggtctatcggatctagtttcacagtatagtctattttatttagagataaaaatcgcttgtttaagaataagtaaagctctttatttaagaagaggtgtttgagaattaagacggaatgaccgttttcttcct

SEQ ID NO: 27316 - DNA, 2121 bp, Zea Mays
gggctacattccatctagccagcccaatccacatcaccagcccacctcgtcgaactcgtcgtcttccgtccatccatcgtcgtcggcggcggcggagagagagcagatgacgtcctcggggacggtcgcgcagcagctgccgcggacggaggcgcggtcgctgtcgggtcacgagggagcggtgttggccgtgcggttcaaccgggacggcaattactgcctgagttgcggcaaggaccgcactctccgcctctggaatcctcacacaggcgcccaggtcaagacctacaagtcccacgcccgcgagggataacgccaaactggtgtcctgcggtgccgacagacaaatcttctattgggacgttgcctcgggccgcgtcatccgcaagttccgcggccacaacagcgaggtcaattcagtgaagtttaatgagtacaatgctgttgtagtctcagctggttatgaccgtacggtgcgtgcatttgactgcaggtctcaaaacaacgaccctattcagacaattgatacttttcaagatagtgtaatgtcagttaacctaacaaagacagaaataattgctggcagtgttgatggtactgtccgggcatttgacattcgcatggggagactgttgataatctagggcatcctgtgaactgtgtatcattatcaaatgacaacaattgccttttagctaactgtttagattctactgtgcggcttctagacaaccggctggctgctgatccattgttcctgggctcctggcgacttctcagttctcctcctccctgagaaaacatccagctgctgctgctgctgctcctccttgaccaacaagatgatgcagcttctcgggaagatgaagaacagccactgcaatctgatggaggatcaacggaaatggaagaatctgtcccaggtggtggtggagggcaagctactgctgatgcattccatttggatgaggatttgctactttaggtcttgagtttgattagctaagtacctaccgctgtttgagtttgaatgtttgattacttacttctgttcagactttaccctttagaggtgctactcaaggtgattgttgctgtaatgctgtttgagactttgagtactgctaaatagctactactgtttgagtttgagttaaatactgctgtagttttgattacctactgctgtttgaagtatattatatagtatataactatacactatagtgtatataactatatatatttatatatgtcctgattagtacaggatgtttaggactactaggtggacgacctgtcaccgattaatcggcctggtcgacgtcctaatcatgattactcgcctaatcggttaccatcaacgacatggataccaggcgacttgaaaaccatgtatgaatgtcaagtcatctggagaactgttacaggagtataagggacatacgtgcaagtccttcaagatggattcctgtctgacgaatgatgatgcatttgttgttggcgggtctgaggatggttatattttcttctgggagttggtggatgcacctgttgttgcaagattcagggcacatagttctgtggtaactagcatcagttaccacccaacaaaggcctgcatgttgacgtcttctgtggatggctctattcgtgtttggacctgaagactcttgaatggttgatgtgctattcgtactgttcctccaaatcatccagttatctagcagcaaggattcgacagtatgaaagatgaacgcatgtctaacctaatgggattcatacacgccttgctgcagagagaagaaaatgcgctgctgttgggctgtgtagcacacagctctgaggccaaaaccttttgaagccggtattctgtcatctatgaagtttgtgagccttttagatgattttggattgtacctgaagacaacttgtgagttgcatgaaaagtaacatttgttacgaagtttcttactgcaagtgtcttgtctccatgttactgaagacaacttatgggggttgagaaatgtatcttctagttcctttttttttgttttgatttggaatggaatgactaatgagttcatcgaccatcacatcatcctcacaagctaatactcc

SEQ ID NO: 27317 - DNA, 2549 bp, Zea Mays
ccctttgccttcgtgagccagtggctcagcgcgcaattcacgatttacgagatgaggctgagatagccggtgaacgatcagagccccccatggcggcattcgcagccccctccttgtcctcgctcatcctcctcgcctcgccccactccgcgcccactctcctccgcctgcgccgcgcgggcggccgctctctggagctgtcgtcacggcgcggcgggagcgcgcgccttcgggtcgttcgacgagcggtgacggaggaggagagcgaggccgcgcgcggagacgaggaggtggaggaggccccggaggagccagtggctggccgcgacctcgtcacgctcgccgcctgcctcgtgggcctcctcaccggcgtctccatcgtgctcttcaacctctcggttcatgaaatacgtgacgtattttgggacggtattcctttgcgaggcgcttcatggctgagggaagaaccgattggtgaagtctggcagagagtgatatttgttccggtcagtggaggtgttatagtgggtggattgaacgctctaagaagtcagatagaaactaactcagatgcccctgtgtccaagataaagagtgcatttagaccattcttgaaagctgtggcagcatctttcactcttggaactggcaattcactgggtcctgagggtcccagtgtggaaattggttctgcaatagccaaaggatttggtgatgtatttgagtgggacggtgggaaaaggctgtctcttgtggcagctgggtcagcagctgggctttcatctggttttaatgctgctgttgctgggtgtttttttgctgtggaatctgttttgtggccttctgcggattcctcatcccttgccaactcgacacctatggtgatactcagttcagtgatagcatctgttgtttcagagattggtctaggttctgatcccgctttcactgttccggaatatgattttcgctccccaacagaacttcctctataccttttgctgggtgtcttctgcgggttggtgtcaattgcattatcaagatgtacatcacttgctatgaaggcagttgaaagtttacaaaggacaacagggttaccgaaggctgcatctccggctttaggtggcctcattgttggtctccttgcacttttgtaccctgaagtattgtactggggctttgaaaatgttgatatcttgctggaatcacggccatttacaagcggcctctcaacgaccatattggttcagcttattggagtgaaaatattagcaacatctttgtgcagggcttctggattggttggtggttattatgcaccatctctttttattggtgcagctacagggatggcatatggcaaattcatgaagtttacatttactggccctgaaccattgctgcatgtcccattcttagatgtggcatcacctcaagcatatggcctggtaggtatggcagctaccctcgccggtgtatgcaaggtgcctctgacatctgtcctactactttttgagcttacacaagactatcgtatagttctacctttgctcggggctgttgggttatcatcctggattgcttctcctcaaaggttctctaaaagaattaggagtaagctggattcttgggaggataaatcgagtattcctcagcaagcaaacgacatgctcactgaaaacaaagaggccacttccatggatgcagctgatttgtcgttagaattatataaaattgaaagctccctttgtgtctatgatgccaacgacagcaatatgttcaaaaatcttactgttggtgaggccatgaaaactaactacttctctgtctcaatgacaaccccattaattgaggcactagatcttatgcttgccgagaagcagccctttgttatgataactgagaataacacatctgcaagaggcttgctggcactaaagaatatccaagatttttgcaaagctgcaaaaactaccagatcacaagctgaggtaaaggaactcctgatatctcatgtttgccaagcaggcaagtgtaaatcgtggtctgtgacgcctcagatgccacttactactgcagagaagattatggactctcatgatgtggatcacctacctgtagtttctgaggatgctaatcttcaggacagaggacttttgataggttttgtagaccgagaatgcattgccattgctcgaaggaaggaagagaggtagcacgaaaggaaggaatgacacgacacagaagcactccctacttggcaaatctggcttcttttcctggtcaaggctaatacctctccaggttattagttgctaagtaaaaacgtgcttcaggcatgtggttaaggtgggtctccatatttttctcgaagtatcccgcttaccggttaccaccatgactatctgcaatggtgaggttttgttgctcttgtttgctacaagttctcaatgttagaatatacccgtttagggtttggggtcttccccgtgtaatgaccatctcacccctctgtaatgggcctgacccagtttactcagcctattaat

SEQ ID NO: 27318 - DNA, 2060 bp, Zea Mays
cacaaaataaaacgcttacacaaatcctcaacccctccgcctccgcctcgccacttcaacaccttcgtccagtcctttcctcgcgatcgcccaaatcctttcctccccgcccgcgccggcgccgctccgaatcccgagacgcccccgatgcccgccgccgtcgctgctgctgcggccgctgcgtcggccggtgcggtcctgctctgcctgctcctcaactgccgcccacagccggcgctggacgcccagagggagagtgaaaggggggaggacgaggcgtcgccgctcctgtcgggctcggggccggggagcgaccgcgaggaggaggagccgtggccggacagggcacccgtgacctgctgcgaggcggccgcggtagccgcgcgcacggcgcggcgcacgtgggagctcaccgtcgggcggtggggcctccacgggctcgccttcggtatcaagcgccacatgaagcgccagggtaatttgcagcatgagtacagtggaaatgactgtctccaacttaaaggacatcagacatatactgaagtatcttctctccttgagcacttgaagctttgcatgttcttctcaaagaaatctttttcagcatttctgaagtttggtgggtacaaacaagaagacattcttattcacaaggctagggcgaggctcatgcagccttcttttgcattggtgtgtgacaaaagaaccaagtgcttgctgcttttcattcgaggtgctatcagcactaaagagcgcctgactgcagcaacttctgctgaagttccttttcaccatataattctatctgaaggaaagatcagcaatgtagttttagggtatgcacactgtgggatgcttgctggagctcgttggatcgcaaaacttgttattccccatcttcataacaaaatgcaggaattttctgggtaccacataaaggtcattgggcattcaatgggagctggcattggagcgattctgacttatattctccatgagcattatgagttcttgtcatgcagctgtctggcatttgctcctcctgcatgtatgacatgggagctggcggagtcaggaaaggatttcatcacttctcttgtcaatagaaatgatgtggtaccagcattttcgaaagtttcttcggagagcctgcgatctgaggtgatggtttcatcaaagctggatgatgtgcaggatcactttcaccatggtttattcgccactataagccagcgtgttgccttcatcaggtcccatatgctctccatctctcactcaacagggaagattgcagattacggctctagtatttctgagcctttgcttaaagatacaataccgcccacagcaaatggacacggcgttgactgcagccagcagcaacaggtggttgcctctgaagaaacggtcgttgtactggttaacaataacgaccatttcaccagtttgaaggccgctgattcaggcgtcacatcacaagaaggttcagacagcaacgcggcatcatcggacagtccacaacggccgcccccgccggcagacgaagccccgaaccagaatggcaccggaaaggataagcagaaagaaccggtctcagcgggctgctcgtcgtcgcgccagctcttccctcctgggaggatcatccacatggtcgcgctgccgccgcagcagccggacccaaactccgacgacggcacgagcagcggtgaggtcgttggcatatacgagacgccgaggggtttgtacgggaagatacggctcgcgcccaacatgattaaagaacattacatgcctagctatatacgtacgatggaatcgttgttggaacagctccagaaggacgacgatgatggcagtgtatgtacatgtaccgcaccaagtgacctgtgaattcttgtggagaactcgggcagtgattattccaattctttcttaaccatttcgtattgcattattggaaaggaaaaaaaaagtacaataatgtgggtgtgtgtttggtaaaatatgaacgaaatgaacctcgctcaagtctcgaacgttgggccctagccccaacctgt

SEQ ID NO: 27319 - DNA, 842 bp, Zea Mays
ctgggtccctggccatataaaaccctcgccggtgcggtgacgtctcgtcatctcggcccacaacctcagctagtcagctccgccgcttttgctttctctctccaggctctcggcttcgtccacaagctacagccgcgcgctcctccttgacccggcctgaccccgctagttcgccgcctgccgtctgccgccccagcatggccgccgcgtcgtccgccacctccgtccacgacttcaccgtcaaggattcgagcggcaaggacgttgacctcagcgtctacagggggaaggttcttctcatcgttaacgtcgcatcccaatggctttgaaatcctcgctttcccgtgcaaccagtttggtgggcaggagcctggtaccaacgaggagattgcccagtttgcctgcacacgcttcaaggctgactaccccatctttgacaaggttgatgtcaatggtaacaatgctgcgcccatctacaagtttctgaaatctagcaagggtggccttttcggcgacagcatcaagtggaacttttccaagttcttggttgacaaggaggggcgtgttgtggatcgctatgctccaaccacttcacctctgagcattgagaaggatatcaagaagctgcttgggagctcttaaacgatatctggctgcaaaactgtagaaaaaactgtatgaacattgctctgagagctgaagtatataacaatcttgtcttaataaagtagttttagtatttgagaggttgcagtacctgctttatttcccttgcatgcactctgtacttgtacttgcgacacgatccgatagaaatgatattccttttccttgcatcaaac

SEQ ID NO: 27320 - DNA, 298 bp, Zea Mays
taaagggttgtgggccattggatgcaaagatagaagtcatctgagacgtcgtttctttctcccacaaaaaccctaggtggccacccctttttttcccttcacccccccctcttggccgccaccccctttttctcccccttggctggacgcccccttcccctatggcagccatcctccattgcttcctcccccaagatctccccctacgcaggaaggatcgagaaaaggaggggcatgttgaattgaagaggaagagaggatcaaggagatgttcttccccatctcctcttgaaggttt

SEQ ID NO: 27321 - DNA, 3418 bp, Zea Mays
ctacaattcgcccccttcccgcacaacgcatcccccttcctcctccccgtcgatggtgttgtcttctctctcaccctaggacaagggagacactatcgctcctctgccaacgatgtcgagtgctcccccacacgtacggagttgttccaaagactcctgtacttcccctgcaagcctcggcggtgaccatcatcgatctatggacctcggtgagtggaggtcacggatctactccaccggtgtcgacgaggtttgtttccccgtcctggagaagcgacgacgcaatagatcttcgtgcactgcagagtcgtctcccccaagccgcaaaggaatcactccactccatcctcgttctttgaatcgatctggtaaaccttggcctttcccccaaatcttcccgctgtccttccaccccctcgcctccataaccccacccactgtactgcttttgtttcacttgctttctgttgaatccatgctacatttgactgtgaattcaggaaatcattaagtataatcgaagtcccgttgatttctggttttgtaggacattatgatctgttttcttgatggtacataaactgagtttttatagttgttagatgcttgttgtattcgtttgtttagttcagactgcagaggttcaacaacagcaggcttagggtatgtgttgatcttaactccattttcattagcccattagaagcaatgtgttattttttggttacattattatcttttggccgtgaatggcaccaatacataattagttggtatgcacagacaactttgtaagcctgacttggtgatagctatggtattatgtaatccaccttagtacacaacactagctgttcatgcatttacttatctgtcatgatatactccaattatcctagtacatctaaataatctggtaaggtatattacatcattcatttgagttgtacactaataaacaaatgttatccatgtgtagagccttgtggtgaaatacttgtcacttgtgtccgtcatcttgtttgttggtttgtttatctatctttttgcaagctcgtccaagagccggccaaaagcaagcaagaagagatgttgatttacttataggttgtagttttaggtgtatctggtggttttgccagaggaactcttagtagtttgagctgagtgaaagcttttaagtttacaattactgaccacaccatgaattacaacgacgtgagcatcagttttgaaggtttagcaaactctggcattttctgactttcatgctgtccatcttccaaatgaagcccttttggaggcaaatctagttttatctgctctatgttatgtcaatactgattttgtatatttgtaagtgctgtggcaatactgattagttatgattattgaaaatatataatttaatggatatgatatacatatttatccttctttaagacactctatttttgtgtgagtgcagtggcaaatgttttcggctgttggccatgaatttatttagtattttatttgatctcatgagattagaacatacatctctagaagctttgaaggacattccttagtcgatatgcccaaatgatggttttcttgaccaggtgacatttgctattcaaccattaattactaagtaaccttgaagtataatttatttagtatgctattcagcctttactaagtaatcttgaagtataatttatctgcactgattgatttttgttctgtgctaccagctaaccagggtcattaaaatgtagtgttggccatttttaactatgtcagctcacctagaaaattttccttaaccaagcatcccatatacaacacaatgtcctctagagaaaacatttgaattctttgtcttggaacaatgtctcggtctgcaggtctggttctcaaatacaatcgtcaagtcttgcgagcatttctttgagcctcattctctaccaatgaagcactttcctgtcactagaactgaactatagtcttcatagtttcactacactcaatttgggaattgtatatcataattgtacttttcttttctttttctatatactaaattttcttgtttttattaacacaattgtgaaggcttatcattacacgtccatgtgtcattgtgctcacttggatcttactaaagacaaagtatgggctgagaaagttcattggcatttgagtttgcatggctggccttattttggtcgtattttctgatgtgtgttcttcttatcgagcaagtatgaacaagcttcattttttatacatatggaattgcactattacagttctgatgtcatactgaatgcattttcttgaaaaaatgataatatgaatttacaacaacgaatgttcatctcacagtatttacatagatgagaataatgtccatattacctcactatgacatggttaaataaaatttatcacaggaaatgaaactgtcagctatgaaaacccaaagccaactgctggaatacattgccttgtctttgtagtctcctgctagtttatccagcaaacagtttatgcataagggtcttcttttggttaattagggttcttttggtcagttatcatatgatcacttgttgctttattaggatcctgtctggggaatcttcatccttttcacccttcacctgtttttgtttcgaatacaaatttgtatgttttgaatgggattgctaaagtgatattacagttactttctgtcggtttaaagtctgatgataaatggagtgtggagtatggactactaccatttattcctactgcaaaatcatttaaaatggatatagttttggccatgttactacaattgcaacgatggataagttatccctgcttgttctttatgggtatgtgttctagattctagaagattaatgcttgaacccatctaacaatgttgtggctttaaccgatttcaggtgtggatctgatttgtaatggcttattaggatttaggccaggtgtgatctgattgaagaggactatagtctatagatcatatgctcatttcaacatcaagggcaatttgattcaattaagtctaggatgatgattttcagtacctaggatgaagtttcagagctgccacctaatttcagagctgcaagatttctacagaattggaagactatgctaccaaaaaagctttcctaatttacctaagatgaagttcagtattgtttaggacgagtcatatgtttatgtctttgtgtctccaaaaatatttgtacacgtatcaagtggtgattattttaagtttcgctactctatatattggctattttatttcaatgagaaatggtttgtccattgcaaccgtgtggagtttctcatttttattaatggcaaatgctgatgtatattcatttttgttgaataaatggtttatttcttg

SEQ ID NO: 27322 - DNA, 2566 bp, Zea Mays
ggctccaatgcgagtcgtgaacgcaaacagatagcatcccgcgtcgccgcgatggaactctcgcccttgccgatgctcgctgcctcccgcttcctgtccctgtcgccgctgctggcgccaacatgcccccagcggaccgctccttcagtccgcgtggccacgcagacgctggaagcgccggaggcgcccaaaccgccgcggccgtcccccaggcgcagcgccgtcgctgaggtcaagggggcccttgaccccatcgccgccctcaacaggtttgaggaggtactgcagacacaagactgcaacataattctgcgccactgcggggacattaggcgttgggatgacctctctaaggagcgcgagatgaccaacgctgcatcttatagcagctacttcaagtaccttggactgagccgtgaccctgcgagggtgcttcgagtgtacggtgccatcaaagaccgaacattgagggtccatgtctccgtctgtaattcagttcttgggtgcttggtgaagaatgggaggttggacagcagcttcaagctctatgacgagatgatacgggaaggtctatctcctgatccattcacctacagcaccctgttagcagggtgtatgaagttgaagcaaggttataccaaggcaatgggattgatcaatgagatgaaatctcgtggtcttcagatggatattgtaatatatggcactcttctggcaatatgtgcatctcataactactgtgaggaggctgaagtatactttcagaaaatgaaagatgaaggccatagtcctaatctgttccattacagctccctgttgaatgcatattcagaaaattctgattatggaaaagctgagctattgatgaaagatctgaggtcctctggattaacaccaaataaggttatgttgaccactttgttaaaggtgtattctaaaggtggtctctttgagaaggctaagggactgctaactgaactggaagcctcaggttttgcacaggatgagatgccatactgcatattgattgatggccttgtcaaaggtggaaagatacaggaagcaaatattctatttaacgaaatgaaagaaaaaggagtcaaatctgatggttatgcatttagcatcatgatttcagcattgcacagaggtggtcatcaccaagaatcgaaacagcttgccaaagaattcgagtctgagaatgcatcatatgatctggttatgcttaatacatcactgcgcacttactgcagcacaaatgacatggagagcgtaatgaggatgctaaagaaaatggatgaatcaaacatatcacctgataacattacatttaataccttgataaggtacttctgcaatgcaaaggtttgtcacctagcatacaaaacagttgaagatatgcatgcaaagggtcatcaattaaatgaggagctttgttctcatgtaatggtacagctaggaaaggcaggtttcccttctgaagcattttctgtgtataatatgttgagatatagtaaaagaacagttcacaaatctcttcatgagaaggtcttaggcatcttagttccagcagaacttctcaaagctgcttatatagttgttaaggacaatgctgatctgatatctccttcttctttggagaagtttgctaaatcgttcatggtctcaggcaatataaatctaattaatgatgttatgaaagccctaaaccgctccgggtggcgtatcagccaggacatctttgggagagcaattaagagatacatccaaaagcctgataagaaacagttgctgctgtgcctcttggactggatgattggacaaggctattctgtagactcgtcatcaaggaacttacttttgaagaatgcacaactttttggcgaaaaacaagttatagcagaaatcctttctaagcagcagatagcatcaaggactattggcctaagacacaaaaaatgataaaggaaagattttgtatatgtaaattgttcatatacatccaggatatgcctaggctgattgtttgaggatcaatttattgtgctctgaggggaattttccaatgaggcatgcttgttccagtagcggtacagctgggagtggagtatgaccatgcttgctatgatatgtgtgttagattgtgttgtctgaaggcttacacccagataaaattgtagccatgctgaggcatccaatgtttatctgttatctctattgaaaggcttgaagttatttgtcttcatcgctaaattggtgccaatgttgaggtgaacttggagaaagaatcgtgctttagtctgacaatttatttgctggtggttacataagatgtcctttttagagatgcgtctatggcacgaactggtaaacagtgacatgaacagatagctactgtactatattttagctttgaggcagagcccgattatttttcttatgctaggcgtcaattttgcctttgagatatttcagtttgagcttagctgaacggtggggactctatgattgaacttaaccaccacaagccgcatgatcttttcaataaatattgtcctgagtctac

SEQ ID NO: 27323 - DNA, 1246 bp, Zea Mays
  misc_feature (1245)..(1246): n is a, c, g, or t
gaggagagagagagaacggtgcgcccgcctgctcctcctcctcccccttccgtcatttataagcgacggcaacacaggcgacgaagccggggagaggggggcgcacgaggcaatttatagcgaggagaagaggagcggccgggcccgagcagagcaggccgggccagccatctctcctctgcggcgtcggcgcccgggatgggggactctggcggctccgttgtgtcggtcgacgtcgagcgcatctccttcggcggcaagcccgcagtagcttctggtggccagaagctgcagaaagccgaaacaaacaggggcgatgtcttctgccagcatcaggggtgcctacaactgtaaacaagttgtttcttttttttcctcttgcgtaaattacattgtgggaaatttaaaccttcctgctggatgaaattctatttaggaactctcactagctttttctcctttttttcttttgacatgttttacttgtctattcaggaacaccatatacaaacgaatcatggacctgtatctgttgcagtgtatggtgaccatgacaagcctgcccttgttacttatcccgatattgctttaaaccatatgtcctgcttccaaggactattgttctgtcctgaagccgcttcactgctgcttcataatttttgtatttaccatatcagccccccagggcatgagttaggagctgctccaatttcaccgaatgctcctataccgtctgttgacgatttggcagatcaggttgtggatgtcctcgatttctttggattaggctctgttatgtgctttggtgtcactgcaggtgcctacattctaactctgtttgcgtcaaagtatagggagcgggtactaggtctcatccttgtttcacctctgtgtaaaggccccacttggactgagtggttatacagtaaggtgatatccaatctgctgtattactatggcatgtgtgggttggtgaaggagtgcctacttcagcggtacttcagcaaggaagtgcaaggattctctgaattgcccgagtcagacatagtgcaggcttgtagaagcttgctagatcagcggcagagcatgaatgtgtggcgctttgtacaaacaatgaatcagtacgtaaacatctcacacctgtatactaatgatgattgtgcggtggaaaaactcggaggtgaagttaccgcgtacttaatttgttttgaattaattttcaggagatatgacttgactgaacann

SEQ ID NO: 27324 - DNA, 1220 bp, Zea Mays
tctaaccctcccaactttagcagcgaaattcatccaaaagaaactcctgataaatataaaaaggaggggaaaaagaaaaacacttgcagcggcatccaccaccggagctcccatcatcggtctatccctccgtgtcaaccccctcctcagaagttctaattgcagttcagcccctggccggtccgccgggccaccggaaggagccgctcgccggaggaagccccccatctccttgccctgcggcgggtttatggggttctcgctgtaccccatgaagacgtccacgcggttgctctggagcactagcttcttccgccataagctcagctcctcctcctgcttcctctgagcccgccccacccgcgtcgatcacctcggcggcggcccgctgttgctgcgcggtcctagcacccgttcgagtgtgtgtgtttgtgttctttgagtttcaagattgggttttgttgcgttattggggagacgaagggactaaggcgcagtgagcggacaagaatcagcatggatccgagcgcggtcagtttcgactctggcggcacgcggcggggcggcggcgcgcagatgctgctcttcggcggcggaggcagcgccaacagcaacggcttcttccgaggtgttccgatggcggtcctgggcatggacgacgcgacgcgcgtgggcaagcggcccttcttcacgacacacgaggagctcctagaggaggagtactacgacgagcaggcgccggagaagaagcgccgactgacggcggagcaggtgcagctgctggagcggagcttcgaagaagagaacaagctggagccggagcgcaagaccgagctggctcgccgcctggggatggcgccccgccaggtagctgtttggttccagaaccgccgcgcgcgctggaagaccaagcaactcgagaccgactatgaccgcctcaaggctgcttacgacgcactcgccgccgaccaccagggcctcctggccgacaacgataacctccgggcacaggtcatcgtctgaagttcgatgtcatggtgcgatgaaaagactgcaagtgcaagcatatccgtaggaaactaggaactagagttaaaactggggaataatgtaaatgagttcatgatcatcgttgtttggatgttttgaaatgccatgtatgtcaaattagtgtcatcaatgttatcaacattactgaaacgtgggctttaagatgagca

SEQ ID NO: 27325 - DNA, 4189 bp, Zea Mays
acccggtctaaatttgcccgactactccagccgcttctgcgccttttcttctaccgtacacccccggtggtctctgtgtcaagtctcaactctcaagtggacagggcgaccgccgaccccgacgcctacactacaccctacccttctacaggccggcgaactcaagtctcaagtgcggcagggcgaccgccgacgcgggcactctacgcaagccttcttctctagggcgtcgtttgccggcgacgagcaccacgaggtactttgtgctaggatagcagtgctatgtcaaaagctccagatgatcatttacaagcaactgagcaggaaggaagtgtccatccaagtcaacaagcagggcaacaacatgtgaatgcagcataccagttctcgaaaacagaactaactgaaggttcaaaaaatgaacagcctgtccaagtagagcaactgagttcccacctacaacaagcatatccagaaattcaactacagcaggctgaaacagatagcttccagttagctgaaaaagaaacagggtattttggtcaacagagttttgcaggcgccaaggtggatgtagcccagccttcagtagttcagcagaatgtaaagcaaactgttggtcaacaagcatcatctggtacccaggatacaaggaaaggaccatcgataccatttaatatgttaattccaatcctacaggcacatcttgacagagacaaagatatgcagcttcaaactgtttgggcaaaacttaggcgtaatgaagtcaacaaagatgatttcttaagagttaccgtgaatattgttggggatcaaatgctcaagcaggcagctcataaagtttttgtacagatgcaagcacagatgcaaagaaatagccaggcaaattcaagtcagcagtctttattctctcaactttctgcacagcagatggcttccagtggttcagcacagttacatgatcagaaaattcggccacctggaccacccaaccaaggccagaaaaaccaggtgtcatcttcacctcaggcttttgcaccaccatcaggtacccaaccgcagaatagtgtacactatcttgctcatgataaccctaaccaaaaccctgatgcaaagggaacaaatgttgtaccaaatcaaccatctagaatgaacacatcagttccattgcaaacaaaggacaaacagcatcaaccaacacagttgcagcaggcctcacaacaaatatatggagcaaataatcctggtgcccaggcttaccctcggtcaatcactggttctcttagatcaccgagtcctgttccagaaacacagccatccatgcatgctcctggaatggctcctgcaaaaatggttcctcctcctactcatccaatgatgcagcacaatgcaactgcatggaaaatgcatcaaaacagggaattgaaaactaacgctccccctccaaatgctaatatgaagcaaaattctgaatctgttggcaaagtgcgcatggctggcacaggaaattcttcagctaaaggaaagcagggaactcctaactctacaccgaatgctagtggaggtacaaagagtagcaagaaatcgggcgggcagaagaaatcattggaagcagcaggctctatgcaaccttcaagcaaaaagcagaagaaatctggagccccccaggaacaaagtatcgatgaactaaatgatgtcacagccgctagtggtgttaatattagggataacaaagagatagatatttgccgggaaatgctggataaaatgggttatccgaagcttgaacttggtctatctgcaatgccgaaggaccaacttgcagacaaccttgcttataacagcttgaagggtcttatccttagcaaggctttgatggctcagaaagatgccgaagatgaaagcactcggatagccttcgaaaacctacgctcggaagttatatcacttcggaatgaggcccttgagaaggacaaaatcttgctttctttagttgagaggttaaagtctagcgacgctagattggctagtctttctgaagtggaacaaaaaatggagaaatttgaaaagaagaaagaagcagatgcgaagcgtattgctgatttagaatatgctctatctattcaagcgagattgcaaagattcgaagtagaaggactggagaagaagcttgatgaaatcactgaaaacttcaatgtcgaacagacagaacgtgagatatctgataccaaacgattgagagttcaaaagaatgtttaaaagcttcgtcaggcgaaggaggaatgctacaaggttgccatgcaatgttgcaacaaactgaagagtacttttgctaaggttggcgcattctctactaaacgagactttatccgtggttatcctgacggagttatcagattgattgaaggcgaggccgaagcttttgatgaaatccttagtgataggggggatttttgtgcctgcatcgacgcccgaggagctatctctctgctcgaaaaagctggctatgagcatgtgaaggctgtaattcagccagaattctcagtttcagcgagtgatgtcaaggatccttcagccgaaggcatcgcctttagtggaaaattttattctgaagtatgggtgaatggtggccgaaaaatggcagatgaggctattagacaaaatgaagaagaatctcgtactgctttataagaagtaaggaaagctgaagaagccgcagaacgtgaaagacttatagccgagctttctccttctccggagccgtacgaccctgaggccgatccagccctgaagggcgctcttgatgtgattaggataacaaatgaggctgttgacgaagctgtgaatagactcttgaacgaagctgctgaaaaaattctgaaggaggatgaacatactttatatatgaaaacacttgtagaatttttgtgtactgctctgttatgtacttgtaataaatttctttgtggagcgtgaaatcttcgtacgtaccgtttttgtgccacatgcgaaaaaatactttcccttttttcacgcttcataaagaaaaatatcccttttcagccgaagtgacattagtagactcgaaggccttgccgtagatcttgcataagaaatacctgttcccgaaaccgtagatctttgcctaagaatatcgttgccgaaggcatggatcttgcatttttgaaacatcctttcataattctttgtcaaaaataaacttaacctcaagagttagccaacatgtttgaaggggcaatttccttttttccaatgttgcggatgatgcgagatgatgaatgatgcgatgctatgcaacatgatgcaatgatatgatgcaacaaatgttaacgcataaatgctttcgtaaaagtaagactctgcatccccttaggaacgactttagagtctcttcaccttttatttaggtgatattttagctctgcatccccgtaggaacaattttgaagttaagctctgcatccctttaggaacgtctttgtagcttcttcatcttttacttaggtggcattttagttccgcatcctcgtagaaacgactttggagctaagctctgcatccccttaagaacgactttgaagattattcaccttttactcaggtggttttttagctctgcatccccgtaggaacgactttggagctaagctctgtattcccttagtaacgactttaaaacttcttcacattttacttatgtggcattttagctttgcatccccgtaagaacgactttggagcttcttcactttttttgttacactcgatggtgtaactcaatatttattacaacaggctgaaggttgtaccttctcaaattgtcttttaggtagagaaataaaaccaagagaaataaaaattacattgaatgtgtatgaaagttttttgattgagcccctctgtcgcttcagtaaatatgtcttgattctggtatagtgttgttgactgtccgagcttcagactcttcacgtgcgtcgcattgttgctggatttgacggtgcccttctggttgttgattgcgagacgaagttggagccatgattggtggtggtggtggtggtagggcccatgcagctgggtagtggcttgctgaagctactgatactgtgggttgttgattgcccacatactcagaaatgtacggggaatagcacgaagtagtatgcag

SEQ ID NO: 27326 - DNA, 3788 bp, Zea Mays
gttctgccatcctccccctcgcgcatccaggaatcatcgcgtcgtgctcaagccaccccgccgtcatcgcctcacgcaccttccttcggcaaccttctataggcgcaatcacaggaatccccgcggcctcgccccagatccctaaaccccgcctcgtctctcatggaaagtgcgtcctctgcgctcggctctctccgcgtctgcgacagcccgctatccatggaacgtgggtcctctgccctggatcgtcacgtcggccctcgattcgcgtccgcgacagcctaatcccgcacgtggattgggtacccctctgccccgaatcgtcgctcccgcccggcatcagcgtccgcgtccgcgttgtggtgtccgcagtctccatggaaggcgatcccgcgtgtggattagcattagcagatgaagaggcggaatgttcttcttgggatagcgacgatgagtaccagaaattcatccaaaatatgaaccctccaagggtcaccatcgacaacacctcatgtccaagtgctatagttattcattttttgtttgaacatcaccaacaagtatggcatactgttggaggtagtgcaggtcctcactaacctcaagctcatagtcacgaaggcatacatatcctcagacggaggatggttcatggatggaaagtgtccaccgacgaaggagaagccaaagcacaggagcatggtgctatgttcatggagaccagtgcaaaagctgggttcaacgtcaagcccctattccgcaagatcgctggatcccttctaggactagacgcactttcgtcaggaaagcaggaagacatggtcgacataaacctcagacctgccagcggttcgtcggcttcaggtgcagccgcgcagctggagcagaaatcaggcggttgctcctgttgagacttcgacagttttgtgttcagagaagctacaacagtactgcaacatcgagttaagtactttcagagagattgtgacgaagagtgttttcgcccaaacgtccagtagtgatatactgacatccatagcgagaagccaatttctgtgtacagatttgtttagcaagttatcatatgctaggatataactgtttgatacacaagggacaaaatctgtggaggtaagggcatctcacattttttttgatgaaacattagcaggagctctgccatatcatataagaagagcaagctagagtgtcacagtctttattacatgaatgatcaaatacttagagtccatagggaaaaagtgaaaactgttgactatatggctaagagacaatcatgatccatgaaaaattctaatggactcatatacacagagggggctagcgtgcttgagagaataatattagccgccaccgcatctctctatagaggtgtacgtgctcaagtcgccaccgttgtttctgtcgtggacatggaaattatatggcggattgctggacatgtagtattggcttatctggtggacgatagactgcctagaccacatgaattaccaaatacttttgagtctttgacatgcaaaaaagggtgaaaactccattagaaaactttagaagctgaaacaaatattcccttcagtattgagttatattagggtatttcatatccccttcaatattcagttttattagagtacttcattctaataaatcacatccaatttcattctgccaatcatattttctttttatgcaattttattctattgatcctattttctttgttttgtttttggcaatgaggtgtttcagcatcgacattcaatttcacagcaggaacttctccattccattccaatccaacatcgacaggcattccatttcacacagctaatcggtggagggaaaaatattcatcaggaaaccagctaatcgtggaaggaaaaaatattcatcaaagtggatgtcactggatgttttagtggatgtcaactttgtcatctactcgtgtttgataccaggatgcagtgcaaccatttccacatatgtattggctagcattgaactgaggctttgtacagtagtaataagaaatgagaaatgtcgaattcttttagggccctgatttggcatcaattgaaaagacattgactgtatctatctacagggttccacatgcacattcagcgagtcaatcctgggatcgtgtggcttccatactgggctgttcacctcaccacatttgatggatgttagagagcgatttcagctagatgggtgctatgaaatttatgatcgcactgacctagctcctcctttctgagggcatcggggttaatatttctgaagagaaaattttgaagtactcctggtggtgctagaacaagttgaagcctatttcaggttcctcgcgctgctcgcattcaagatattttctgctgagcaggtagatgttgctattctcgaggttggcctaggagggaagttcgatgcaactaatgtggttaaagcacctgtagtttgtggcatatcttcccttggatatgatcatatggaaattcttggtgaccaaatcctgttcttggtgataaacttggtgtcgataaacgggttaattctgttggcaaaattaggatgacacaggtgacatgaaaatgccaagtcggtgcatcgatactaattgcgacttaggtctgtttggacctctggtaaaccacgtagtaggtttggagacctggaactacaaatcaatagtattgggacttaggtgacaccctgaacaagtttaggaacaactggtgcatgttactcttttatatttattttaaattcatatagctggaaaacctactatcaaaccttgactaagttacatagttgcctgaaagcaaaatttcactttattatctttaaatcatttgatgcttatcactttggcgtgatttcaataactaggaaggcatgcacattttcaacctttaaaagccagaatacacacgtctacttgctggaaaatttttatgctttctaccaatcttacaacgacaatttgaaagttgatatttgtgatacttatttggtccaggaactagattttttgtacattctttcggatctggattgaacaacgctctctttgtatatgaacaatgctctgtaaatatacgtttgataattttatatgatatttaataaatagtagctactgtgactgtttcattttgtttttcttaggttgttagttctcgtgaatgtcctgttgtctcgaaatacaaagcttctgttcgcacctaatcgcctaaaatggaaatgtttgactcattgtttaattcggggggaagctgaaggtggtctgatccgttctaggaagagaaaggctgaccaagtcatcatctccagggacgatgttagcgaaagtcaatttaatcaggtgttgatcattgggttgcaacaaatcatcggtggagactgagtcaccgcggccagaaaaccacggtctcaatttgaggagtttttccatctatgtttgttagaaggcataatgcctatttatctcttgtattcgaacatttggcaattaagaaatagaagattacttccccaatatcccttattcctaatctcacctttcacggcttgtggtgaacaatcacttgctattaccgactgacatgtccactcctcatatgtgcgatattggggttgatatatatgttgttcgtttccatgtaattattgtatactaacatttatcgaataatttttacaccgtcgcaacgcacgggcacacacctagtagtagttgatgatgcctttgcaggtttgca

SEQ ID NO: 27327 - DNA, 6060 bp, Zea Mays
tcttctccccccacccgctggcggcgaagtagcacgaggaaggggtccaataaaaaaaaaaatcgccaccggcggcgacggcgaggcggcatcagcggatacagcagcgggagccgcggcaggggacaggcgttgccgatcgatcggcctggcctggcgcggcagaggtcaaaagcgaaaaggaggagccgcaggaatttcttggcaccgaggcgcacgcaaggaatccagcgagtgagggatgggacggcagttttcggattcttcctgctgagtcctaggaactcacgcgcacgagcgtggtcaggagggagaggcttacgcggacgcggcggcgctggttttgatgaggaaagctggagcaaaaggtatttgcaatcctagatcttagaaatctgagtacattccgcggctgctgctttgccgagtcggcgctgccccgacgtcccgatttggcgggggttgtggttcggccgccacagccgccacggagatcacgctgggttcctctgtttctttatgcggcgttgatgaagaatagtttcttgccggtcggacttcagatctgctttgcctcagggattctggactgctgagcgcggatttctcctcaggtgaactatcgggtttcagctgctcttcgtcgtctctactggtccgctggaaagaggtgttcatcggaaattctacccgattccagatctacctgttttgctggaaccagttgtttccaaaaggagagaaattggtgctctctagtgcggaggccgatggctgacggcaagaggctgttaacttgatttggcaaggagctgttgtggtagttcgtcagtactgggttcaactcagacagagggaccttggttttggtttagcttctggctttcattgcacgctgcaggataagattgcttgtttgtatgcgctgggctggaacctggaattcggaacttctttctgaattgtactgggagggttcaagtattgactgatgatgggtgaccagtggtggtggcatggctgcggaggcgttctgtagtttttttacctcttgcttatgtgcatgctatgtggactgatgctattattcttcaaacagtaccataagctttggtggtgtggtgctgaataccaaccttatgttgtttttgttttccagagggatcaattggatccaagggtgcgattgatgtgaatagtttatctgtttccacagaaatagcaggaaggccatctgatttaatgatcaaatcttgtacttgcactggaaggttatcatcttcttcagctcataatcttacagacacatatatttcaatgacctgcaaaagctgtactggtgaatcaacagaagacagaggtgggccatcgtgtagcggcaagcttaacaatatgggtttggagctcccaaggcctatagatcttgaggttaaatggatgactgtaaaaaaaaggcaaagggacaccaggagagcaagggcttcctttggcgaagacacaagcagggatggaattggatctttctgtttatctggctgtgctacaaatcaagagatggcgcaagacgctccagtctctgaatctgagaagtttggagtatccattcttggtagacgctttagtgatcccatggaaaatgttcctataaaaaagagaagatttcatatggatttttctccatcacctccattcactccattgctagtggatccatatgaaaagataccgggaagctcttctaaagctgtcagatcatatgagaaacattataagcttaagacgcaacaaattgagtataaggtgggaaacaaaggtcgttttggtgacgatgatttttctggtattgatatactagcttctgctgcctgtgaaagtgagatgagtggtggaatattagatggggagtgctcaacgttagctcacctcccagaagaaaggaaactggagaatactactggtagcagcaaattgagtctattacataacatggaggatacgttaaatattcctggtacttcacattgcatatatgatatgcctcttgggtcttctagatctgctccagatatgaagtccttatttgttgccacaccaactatcttagaaaatcttgttgaatcggcatctgctcccaaggttaattgttcattatattctgcactgaacaatgcaaacgaaatagagattgtttctgatgctaagtctacaagtgttgcaattgcaaacagttcagacaatccagaaaaaactataggatgtttaaaggatacagttgtgcaaaccaaccatgccaatgcgactaatgccaagtctacaagtgttgcaattgcaaacagttcagacaatccagaaaaaactataggatgttcacaggatacagttgtgcaaaccaaccatgccaatgcgactcgtgattctaggctgcactgggatcttaatgttgccatggaggcatggggcactgattgcggtgctgttgaggatcctttagttgctactgtaagtgatcatgatgatgccagaaatgacatgaacaaaccagggacatctcatcattttgagtcaagagatggtagtgtagttgatcactctgttgacactcatatggatgatgcactgaaacacgtgtctgctaatacaaaggatacatgtgattctcctgctgacagtccgtctcacccttcgcgcaacttgcagctattggaatctggatatgtagggagtgatgcccttgctgaaacaatggatttgcctgaccagaagaatagcaggttcgcttcagctatggattcacatattagatctgatccagaaccagctcttatcatggagcattttgcttcagcttcacatgtggagaaaatcaatggttcgcatcccgaacctgttcaatgtgatggtttgtctaatatgtcttctgtgaatgtccatattggaagtaattcactccaaacaagtgaattgggcaccacattaaagcctttggctagcatattagtttctgaggaaagcaaaaaccttccaacagtaggcacttcccataaaaaggttactgactttggctggagtgataataagcttgaagaagcttctgaacaaagcatatctgaatctaagaaccaggagcttttggatgttgattcagaaactagtaagaagggtgaacatgacactggtatattttatgccaacgaaaggacaaaatatgcagaaaatctcattcatccagaggacaaccatggatcttctaattgtgatatggctcatgtacatgaagaaaatggtgctgttgcaatgattaattctaaagactctttaattacttgtgccaacagtagcactgtagagacatattacatttcagatgcagctcctcaggttcctgttcccagttcagaatgccacaaactggaatgttttactgatgcgggcagcactgtggattcaaaatctgcagcgcacagctaccagaatggttgcgaaaatgagcttgggaaggtcatatcaaatgttcgttcagatcaatgctatgaaactgacacatcacatattagcaaaaatctagctggggttgaaaaagtttatgtcgaggaggacgattctcaatatgaggatggggaacttagagaatctggtgattgttattgggtggatgatggttatgaagatgttaaacatgccaactggcattatcaggtatcagattacaagaatgaagaagctactcctggcctcacgtctctccatactgattctgttgcaaataatgtggttattcctgttgctaatgacaatggaccacaatctagaaaggaggacattgctgtttcacctgtgtcatctaagtgttcatggttaacaaactgcttagatggtggatctatagctgatggaaagtctcaaagtattcatttgagaggtgatactaacatgtatgggtcaaacccaagccgtgtagcagttagatctgctacaacagtaagccagtctgaaaggtgcaacgatgccctaggtgatatgttaaatatcagaatgaagaacacaggttgggatatgatgcctgaagatcaaaagcactctcaacatgatgcaagggatgtgactgattcgtctaatcggtgtgttttgagctcagatgcggctagagacgatgattcactgcaaaaaaagggactattgaatagagatcttcaaggagtggaacggcaaaaatcatttgacagaccccagaggaatgaattgagcagatctgacgatggttatggctcaggctcaaaatctggaagggcaatggactctcatggatcgcatgacatgtatggcacatcccgtcatgttcagacaagcgctcgggtggagtgggtggaaagttcaaaacgtcctcgttctactcggcacaaatcacctgaatattataattatggcacatcaggtccaaggaatgctgcagaagctgctgtggcaaagatgcagagcagtggctttgttgttgcacgtgatggcactttagtaagagctgttgatgctgcaaatgctggtcagatgcccagaaggatgcgaaatcctttaagtagctcatgccacctgatttctggatggggttccccagttgacagggatgaagcctgtgggatgtccagaggccccgtgcatgctaggaaagcatctccagagcgtcactttggtgcaaatagtaaccggtccagtcgatatggttctgaaatggagaaaaatcatactactgatgcaaatttgagttctgtccattgctcgctgtccagtagacaacgaggcaccccgacatctagagcatcacttaacctttcccgtgctcacagcagatctccttctgggtccaggtctcgatccccacatgattgggcacctaggaacagaggcaagatcatggcaaatggaggttcaactttatggaagcatagtagatctccacctaatcacatgactaaaggtgaaattggtagaatggcttcacctcggagacaacctggatatgatgatcgagctatgtgttacagtccactatcaagaaacaacacatactccaagaatgcttcgacatgggttgatggaaggaatggttcagcagtggatatttctgatgatcataataaaaggtattcaaggagaagctcacctctgagaattacctcacggaatgacagatttgatgtcatggactcccaaggacgaccaaggtctggagaattctaccgtccgacacaaggaagacttctttatggttacaatagggaaaataagcatggcagaaatggtgaagatggaagggaatgcactgatagatatgcgaataattctgtcaagcgatatgaccggagtggtgcagtaaagcaatttagaaatgatactggtgataaatttcggactcgtatttctgctcccagatcgccagatctccaaaggggggtgagtcctcggagatttgacagaagctttgagaggtagctgactagctggctgtgaatttgccttatagaactaaaatggaaaataaagacctgtctggatgattgagccaggaaatgttgcaaaaccttgatggagttcaatcataggggttgatggaggactcttggcagcactgtttttttttctgcttctgctgcatatattcaaggcacagaaatgttggaccatgcacttctgtacggggaattcagattaacttcataattttcctgtttcagtctgtaaatatttatgttggtagcagaattacaatcactcctttcagctttattatagctgttcttttttttaatttctgatactttatcatgtttgtcccttttgttttttcaatgggtattgtccctgtacgaggtccattttaacatgatgaatcaattaaattttgagctcaaacacttgtgtgctttttatacttatgtttttcatctggcattttgtatcatcttgttgccagtgtaaaatgttttatttgttgttgaatatacaataatttacagtggcctgtgaccatgttagacaacttttggatcagctgaggtgaataatttt

SEQ ID NO: 27328 - DNA, 2151 bp, Zea Mays
gtaattttgcatgatctacatctatatgcgatgactatgctcaggaggacgaggaatacgaggagaagctgaagaaggaaactgtggtgctgtttttcctagcaacatatggggatggggagccaactgataatgcagcacgattctacaaatggtttactgagggaaaagagaaggaagtttggttgaaggatcttaaatatggtatttttggccttggaaacaggcaatacgaacattttaataaggttgcaaaggtggtagatgagctagtagaggagcagggtgggaaacgtcttgttcctgttggccttggagacgatgatcagtgcattgaggatgatttcactgcatggaaagaactagtgtggccagaattagatcaattgctccgcgacgaggatgacacaactggtgcatcgactccatatactgctgctattcctgaatacagagttgttttcattgacaaatctgacctgtcattccaagatagatcatggacactagccaacggtactggtgtgattgatattcaacacccttgcaggtatgaaaccggagaccatgttggtgtatatgcagaaaattctgttcagactgtggaggaggttgaaaggctacttgacctttctccagacacattcttctccatccatgcagatgcagaagatggatctcctcgtaaaggaggaggttccttggccccacctttcccatctccatgtaccttgcggactgcgcttctacgatatgctgatctactcaatccaccgaagaaggctgctttgcttgctttagcttctcacgcatctgatccagctgaagctgagcgacttagattcttggcttctccttctggaaaggatgagtattctcaatggataactgctagtcagaggagccttcttgaagttatggccgcattcccttcagctaagccaccactgggagtgttttttgcagcaatagctcctcgtctgcaaccacgatactactcaatttcatcatctccaaacaggatggctccctccagaattcatgtaacatgtgcgttagtttatgggccttcaccaacaggaaggatccaccaaggagtttgttcaacatggatgaagaatacaattcctctggaatatagcgaagaatgcagctgggctcccatctttgtgaggcagtcaaatttcaagttacctgctgatccgtccactcctattatcatgattggtcctgggacagggctggctccttttagaggcttcttgcaggaaaggttagcattgaaacaatctggggcagaattgggcacttcaatccttttctttggatgcaggaaccgtaatatggactacatatatgaagatgagttgcaaactttccttgaggagggggcgctttctgagctaattgttgcattctctcgggaagggccaacgaaagaatatgtgcagcataagatggtggaaaaggccacagatatttggaacatcatctcaaatggtggttacttatatgtttgcggtgatgccaagggaatggctagagatgtacacaaaatgcttcatacaatagtccaagagcagggatctttggataactccaaaaccgagagctatgtaaagagcctgcagatggaaggaaggtacctccgtgatgtatggtgacacatcacctcaaataagccatagctctagcgtgtggaagtaaagctggctttgcgtgtatgacatgtctaatgccaacccaatcgtcagctttggaatgaagcgtgccattgatgatatactgaaatgagttgatcagtgcaattctttgacatctaactatttattattatatgagatgggaggaactgatggagaataaatgctgctgtagatttgtagaagttcaaaaaaattgggtacccctgacaagtttgtagccaagggggtacatcatacagtttgagatgaggacactatgtatactgtttgagacgaggacattatgtatactactctagaaggctaccgaaaccaaattttgcatctgtttattaaaagcttgtacttttatcatggtatccgtcgttggcaatctacaactttgtacagccgcaatgttgcatcgaaggtgcagcttgcttcggcacccgtagggatgcaagtt

SEQ ID NO: 27329 - DNA, 3045 bp, Zea Mays
aatttaacaaattcctctcccgtcccctttcccttcggggatggtattcgtcgtcttggcttcatcctctcgcccgccgtctcgactgtagcaagcggggctgctgtccgccgcattcaggagccatgcgtgaggggatgagggagagggacagaggcgggagcccggatgcgtcaggtcctccgcccttccgcggcccggcgtacaagacgaagctgtgcgcgctttggaggggcaggggcggctgcccccgccccaactgcggtttcgcccacggcgaggctgagctccgaaggccgccccctcgcgcctccttccagcctcgcccacgacctgggctttgcatcaccttatcatcttcttctgggttttaccgtacccaaaatgttgtcgattccatgccaatttgtcggattaggttatttggatggtttcccgagcaagagacaccagtgcgctcttcttcaaagagatgcatattcggcctgtttattcatcgagttattgggatgattggttgatgactggagacacagcccaatgtttgaatgctagtggtgcagcaaacactgacagatagcaatgtgatctgaatcatatgatctcaggaggagagttagcgaacagggaagatagttgcaactgcaagaattatataatgttaacaatttgcaagtgcatcctttgaggatgtacaaatggggttgcagatgttaatggctgacaattctgggaggttttatagtttctacccgttgctgagaagactctacccttcaattgcataacaataatcttggcattgctggttattattttgattttacaatagatatctcatggacagatttgttgagattgactgcttccagaggatggcacatcttatttccatcctggcctttgtttcagttggcaatcggtcatttatgatacttgaatgcttaacctgcctcagaagaactgaacatggaagatattatacattttatcttctcgatgggattcatgctatggtcagtgagctttaacaatgctattagaagcttttgcaactaattgaaacatgccgtttgaatacactgcatcaagctatatctgtggctttattgttacctgcacttcaagtatcatcttggaacaagatttttggcagtcatatggataacatctgatcaaatgaaattaaatttatttggtgctattcgagttttggaagattttacgtcatggtgattggaacatgacatctaattaattttggtgattccatccaaatttacttcaggtgattcgtattagaagtactggatcaattctaagtggttaatcatgataatcatgtattggcatctactctttcattagttgtattggctcgtctgtgtttgtggtctatggtgtattggtgttattgtgggccctctaatttttgagctaattgaataaccatatggctcaaggttgtggtaaggttaatgggtttctgtgttgccttgtatctatgcagccccatctaactcttgttctttgatggcataatgtttttttgggtaaatcttccaccttcctgatttgtagggagaagggattacagagatcatgagtttagactcaggcctgatagaagacactcaccccatgggaggtattcccctgaaagagatatcaggcgtcgttcatttcatgataagagaccaagttctgaagataggggatctagtcattcaagatcacctattaggaagagtgagagaaaacatagtaaaagtcctgatggtggagaaaccgattcatccgtaagtgttcgaagtcctgataacgaagacagaggaaaagatgaaaggtacttaagcagtgatgagaaaaatggtcatgaagatcaactgaaacaaatgcatctggacatggaagcattgcgtgaagacaaatcaaagctggagatgatattagagaagaagactgatgaagagcacaaactttgtagcagagtagaagatcttgaattgcaattgaacaaagagaaagaagattgccaaaggatgtcctccaaaaccaaaaagctaatcaaagcacatgggcgttatataaaagcacaggaggatttaaagaggtctcaggctcgctttgagaggctagcagatttgcttgcttcagatattttgaagccttgtaccaaggagcagggttccatagggattactgccaatgaagatccatataatgctaatgaaatgagcccaagtgaccaaagacaaaaccatgtttcagcatcgagaaaaagacttatttccctcccaacaagtgaagaagcaaaaactggaaagagacagagagagaatggtgatgatatgatcccaacatcagagaactatagacctgaagatgccctagaacatctccaagatagcaagggaactgatctaccagaatcatttacagtgaagaagttaagggagggtgacaacgatgatgtaggaaacattgtctcttcaagcaatatttttgcggataggtacacgggcgatgatgaggaagttgatgttgattagtgagcggatgctgtcggtggttgataatgatttgagctgtaggaagctatctcaacagacgacatggatgccagcttctaaaactacttttatgccttttgcattgggtaataggggctggtatatctggtagagctatttatgtgcttagacttgagttgtgatgctgtcaaacatatctatacttctttttcttttgtgtctcctggggctcgaagaggatactaatctgtgctcgcctcatgtattattcttagccagtatgagtattatttgagacttttggattggttgtgttattccgcctcagcctcaggttacaaaccatgcatccatatccatctacctatcaggaaatgcatgcgtgatccttaaacttaccgaaggtcttctaagtctgtattctgatactagaggttcatagagtttgtggacttatgttcaaagtgcacaaaaaatgtttacaagtttgacttgtcaacatggaatctca

SEQ ID NO: 27330 - DNA, 5771 bp, Zea Mays
gacgacgctcagaccaaagagcgagaagggggcaagcggcacgctgccggaaaagagaggctggcgtggtgaagggcagggcggagccttgcaccgcagaagagaagcgaggggagcgccaagcagtagtagaaagagagatagggaggaagagcgacgagagccgaggagctctcctccgcctaatccttggccgcgctgctagattcgccagaattaccgaggcgctgcaccccggatctacagggcggcggcggcgctcgtcggaatccggcgaggcggcggtgatttgccggggatcggcgccgcatgtctcagatctgagatggacaggatccgggacggcaggaggagcggggtgtccggcggagccgggccgccgcctccgagaaggcgcctcaggagcaacggcggagggggccccagagactcgccgcgctccgagcgccgacgtggcgagcgcctcatgctcaacggcggcggcgccggcgccgggagggacgacgccgacgacacctccgacgacagcctcggcgacgacgacgaagacgccgaggaggagctcgcgccgcggtaccagcagcagcggcggtcgccgagcacggcgccgccaccgccctcgccgccgcagcccggcggtggccaccaccacagcagtagtagcagcggcggcggcggttaccacaaccaccaccacggccagcagcatcagatacagcggaagggcggcgtctcacatccgaaaagccccatggtggtcaaggctgttgacgagatgatcggcgtgcctgtcccgaggaaagcccgctctgcttctacgaaacgctcttcgcacgagtggcctgtccccggcggtggaaccagtggaggcagctccggcgtaggagatggctcgcagatccaacgaccttcgtcacggccgatctctccggcgcctgcctctactgccgctcctcggaagaagcttaaaacattgggtggcggtgtgagcagcggtggtctgggaccagcgccgaagcagcgaccgtcgatgtccccagcgccttcaacaaccccgccacaaccgccgccgtcgaagatttcgaagtctccatcttttatccaagaggagattgaggtcgctgaggtgctgttcgggctcaccaggcagttcccatgcccgcaaaagcaggagagcaaccacaaactcgagcctagggacgcgcccgaggccaagtctgggaactcttcgccggccccctcgtcttctggcgtccgaccgtcggattccacctccctttccaccatagctccaaagaggaagagaccacggctggtaaattacgacgaagatagccgtccggcgagaccagagttggcagagccgtcatcaaacccggagtcacctcctgtggcaagatcagaagcgaagacaacagcaacatcggcagcagcagaaagcggcaccagcaccacccctgcggctgcccaacctgagacttcacgagagtcagagaaggcggaggaccgtggtagaaacagagactcagagctccggcccaacgaatcagatcggcgagatcacaggttggagagccaggctgtgccgccgtcgccgttgccgttgccgttgccagagcctccagtcaagccggatgctgaagcaaagccggtgggctccgaggccaggaacggcgaagctactgccacgacaaagattgagctggcatcggatggcgctcggcatgacaagaggttttccattgatctcatggctccccctcctgggaagctatctgatgatatagatggctcctccgaccctgatgcagataagaagggattggattctgagatggacatgttggggagaggaaattcggaaaagaaggctagtgaaaggactcggagaggactggatattgatttggaggaccagaaggtgcgaagaattccagtcgatgagttcgcgccgaagaagctcacactgcagttggatttggagaagcccagtctcggtgatgaaaagtcgccatcagagagacggcagccgcagccgcagccacaacaattgcagcagcagaagccctcaaaggctgagataaagcacgagaaatctgctatgcctgctgctgttacaccacctatgcctatacctgttggaggctggcttgggaatttcccaccgtttggttatctcagtccagtcccaggcctatcagcagctggtcttcatcatcccatggacgtgaaaccagggtcatctagtggattacatcattctgcattgcttccaccgccaacacgctcaaagagatgtgctacacattgctacattgcacaatttatccagcaccagcagcgagttgcaaagatgaactctttctggccgccaactgctgctgctgcagccgccgccgccgccaatagaccaccggggccattctttggtgcaaggccattcagcatgggtgttgtgccacccacggatgccgcctctatgcttgtgaacccaatgcagggaagctaccctgttagggcgcacactccgatgcaagaagcaaaggctcctatggctacatcaccattccaggggagtctctcgaaggacaaaacactaggcaatgctgctggtgctgaatcaagccagaggaaacaaccaccttctcatgaaacactgcagtccactcccttgccaaacatgctgcaagccccggcattcatctttccattcaatcagcagcatgctatggtggcagctgcaaatgctgccaaccgagcaggggatgcaaaatcatctggtgccggcaatacattgccgccatctgccagtgctcacactttggcaacaaactctggtgccgcggccatgaacttgagctttgccaacatgcaaccggctgatgcccagtttttggcaatcttacagaatggatacccgttccaggttgctgcccatcctggagggcctccatatcgaggcatggcatcgccaggcccagctgttccattcttcaatggtcatgtgtattcctcccccatgctgcacccatcacagcagcaaggtgcgcagtcacaaagtcatcagaagacccaaatgccaaacttgcccagttcatcacagaagcatcagccacaacagtcccaaggcctgttgggatacgcaccaaatactaatgcagcagcagctgctagtaattcacagaattattcaagtggcaatcagcgccctgtcctgctacctggccttgtgcaccgacaggagagtgacaaaactggacaagattgtccatctagtgatgacaagccatctcactcccagaagagtgggtatgaacacaattttgccgttccagtccatctaccgaattttgcaatgatgccagccgctcaacctgctgtcagtcagagtgagaagaagttaagtgaccaccagcaccaccagcaacagcagcagccacaagtcagccgaggccagggtgtgaggattgatcttgcctcttctcagccttttgtgatgccctttggctccattggtcctcctggatctaccccaagtggtcttgacttttcggcattggcgcagaaccatgcagttttccagagccatcaagatgcagcaaggcatggttatccccagcttaattttgctgcagctcaacctgtgcaatccacgcagcagaagccccagcaccaaatgactggagaaacaaaaactgttgcgggggattcatcctcgactcccattgctggagacagtgagagaaagaaatcaacttctcacaagtattctagtgattcacaacagcattcgctgtccttcaccaggacggaaagcaagaattatgtgcctcctttccttactggcaacacaaatgaaacttcgtcccgcaccctgagccttatcggaacagaatcttcaaatgcattcatgggaagcaaacccacaaattccaacacccctgcctctaccgccgctgcagcttcggccagcatttctcagcagcagcagcagcaccttcagatgcaagcgcaacaaaagcaccagcagcatcagcagctaattcagcatcaccatctgaatcggcccagatctgctgcaccaagtacacagaacagtgcaggtgggtaccaagaccgtataaacatggctaattttcagaatatgatgtacccatcaagtgctgcccaagggagagttcaatccccccagttgaaggcatcctcagggagagggacaccttcatctactgctacgactacccctgccgccacaccccctaatttgattatgatgaagaacagtagcctccaccagcaacaagcaaaagtccctatgcaggctctctacactcctggtcaccaatcacagacttccttaagttcatcaaaggtaggaccttctctaacaaacctttctaccggaggaggggatctatctcgatcttcaaacgcccctgttgcttctggttcaccatccaattcggtgtccaaaagtaccggtggcagcccacccgccacaggaaatgcaaagggtgttcagcagcctgtccaactgccatcaccacagcagcagtcagccaagaactccgcgtcgacgtctggctccaggactactcccacgaatcatttcagtatggccatgccatccatccttggccagcagcctaatgcatcgcctggttccaatcctgggagcaagcagcactcacatacgcagccagcatcgatgaaacagcagccattcccgcaaggccatttcttcatatccaacacctacgctcctccggctccgggagccggaggtgctgctgccctaggcctctaccagaagcgaccaggcgacaagacgcagcagcagcagcagcagcaggcatcgcaccagcagagcgccatgtcagctgccggcggcaataacgtgaaagcactccatccttcatccggcgggtttatgcatctcgcagcccagtctgcaggtggcatggcgcacacccacgtgtcggcggggcaactgactttcggaacaatgccgacgcctttaaaaccgtcaagcgaccagaagcctgctgccggtacttgacttgccaccaaatgagtttgaacagagaagcggaagcccaaatggcagaatcgcaacaacagtagcagcggcagctcaaaagaacccgcatggaagctcaaatggcccgcttggttgctggtgatgaggaaggaaggaggggtgccgtgcaccagttcgttccgagcaagaagcagatgtctcgttaacttaaaacagagtattcagattccggaatggttgatgggggagtggtacttcttttgtgtagttggggctggttatcctcccatggtgtaaaggccgcggaggaggaggtgcatagaatttgtctcttagcccgttttttattttatgcatggatggatggcccaaaagctggtttctccccctctctctttcttgtagctttgctgtttccgttttcccccctttctttcttttgggtggttctaagctttaactaactggaggaagaaagattcagttagaacgcagatcaggtgacttcgttatgctgtctgttgatacacactctgcttggattgttttggcagctagatctaggaggagcaaaatatctatcccaagtagaataggtaggatcttccggccatgattggtgggtgacatgcttctgggtttgttgttgtaagtagctttgggaggggggtgggggaaaggaaatgaatgaatgaattgaaagtgactgattatggatggatggtgtacc

SEQ ID NO: 27331 - DNA, 1468 bp, Zea Mays
tcccccatgcgcgaaacaatcctccgcctccgtcgcctattcgcctctcccactctctgcccccgcctcccctccttctctccctcccccgcatgcctcaactgctcctctccggcgtcgtagccgtccctctcgctcccgtgacatccagatctgacttgggggcgcagctcagagtgccaatgcgccgcaacctccgttgcgcccgcacgtgccctagccagtcgccatggagctcatccccatcaagcccgaggtaggatctctcgtcgagattggataggagctccgaacgcgagccatagacggggagttgatgccaccgggcaatggatggtcgcatcctcaggacctccgcgtgcaacagcagcggtaagaactcgtccccttcctctccggtggcagtctcacgatcttcctctgccgccattgaactttaaaaatgagaaccaaaagcacacggtttctggcctccctattaggggattccacggagggactcctctcaggaaaaaaccaagtggtatgtgccttgcttgcatttcattttgtcccattttcaaaattgaaatgaacaaactgagctttttgtcatctaaaatttgtcttgtcttgtttttttcactaaaatttagacgcggtttggtgctcagctctgaagctttttgtcatcaataatatcttcctcgccctcgcaatatgttctggtctagattgtggccattccttgcagcaaactaagactaattactttttccttctttacacgtgacctttcaagaacacttaaatctgttttggacacttaaatcagttgtgtggttacctaactgctactgttcttactttgattttttggttgctcatggagtcatggtgcatatgctcatgttttcaggctatcatttttctcatcgcctacttcaatagcctacagcattagcagtaccgtgctttttacttcacaagaaaaggttggccgaggtccctgctctagcgcaaggatttctactgcaacgattgcaacacacacaggaacttttttgaaaccttcaagcttcaacgcttgaccctttgcattggtggcatagtgaatattgaactactggagagaatacaaaaacaatttacggatgataggtactacatatggcagatgaggcaactggccatggcatatatgttgcttcgacctgtgcagtttatggatgaagacgaagctgacctgcagatgtaaactttgttttctatggaccaggtcttgtatatccaaattgaacggattgttctaataaatatatcacaaaaagataaagtataatatttgttcttgtgcgttgttgcaatgaattttagtgagaatagagacaagtggtgttgtgtaatggcacttgtaaagagagacagtacacctagggttggtccattgatgatgaacctctgtgcaaactttgtcaaggactttgca

SEQ ID NO: 27332 - DNA, 5916 bp, Zea Mays
cactttaaaaaaggacatccatgggctccatctcgtcaaaatctgggcggtgaaaccctcaaaccctaatcctttggcccctcaccatggcggacgctgacgacgcgccgccaacgccgcctcctgaggtagtagcccccgaggagcatcccgcggtcgccgaatccgccgttgccgcgcagcaggagggggcagcgacggcccaagtcgataacaagcggaagctcgaggaggctggcgccgacgcggaggcgaacggcaccggcgaggacgccaagcgcccgcgcgtggatggcattgagcagcagaacgatgggtcctccgtgaatgtctccgtgaatgtggaggaacccgcagctgcagaggaggataaggttgctcccaccgatggggcagcgacggatggtgataatgacacggccgctcctgctacggattcgcaggcgggttctgatgacaaaccgcttgaagcagcagctgaagctccacaaccggaaagtgatgcagcagctgttgcccaggagatctctcgtatgatcgaagtacccaacagcagggtcggtgtccttattggaaaagctggtgagacaatcaggaacttgcaaatgagctcgggtgcaaagatccaaatcaccaaggacgccgatgcggactcaaatgccctgactcgtccggttgaactagttggaacccttggaagcgttgataaagcagagctgcttattaagagtgtcatagctgaggctgaggctggcggttcccctgccttaatagctagaggatttggaagtggacagcctgggtcagagcaatttgagatgacagttcctgataacaaggttggtctcattatcggaaaaggtggtgatgcaattaaaggcatgcaaaccaaatctggtgctcgtattcagttaataccccaacatcctccagagggcgttacattgactgaaagaattgtacgtgttactgggaataagaagcagattgaacttgcgaaggatttgatcaagcaagctatgaatcaggtgatgtgatcttcctttgtgcctttttgtagtctatttgtgttttcagttctaagtgttgctagatgctggcatataactactttatgcttttgattgttcattcattctgtgattttgctctgatggttgctgatgatgtgatcatgcttcacgattgattgttcttggttcatgatatggttacttttgtgattgtagatgccaaaatcatgttgtctttaatatttgtgacccaacacaaattaatgacatgcctattgagaacatggccttatttcaatcctattatggaccaattggtttcttagctttgggtttcataatacaccttctttatcattgcatgcaatttgtaccatctttctgatcaagccaagttcgagaattccctgataagctttgctgcttctgtaggtgtcccaagtgtactggtattttttgctataaacaaacacactttgcttttgtactttgttgttcatactatgaatatattgccatctctcttgtgttacggagtgttgggccctttaagatttgttataaactaatcactcctctacaattggccttgtatgaagtatctatcttgatatatagcaatgcctaattgggctggaaggtaagtttttcttcatgtttgagttttcatcttccgatgaaagacaaacgagatgccattgctgtcaagatcaatgatgtaaaatttgtaaatcagattcattacctcaacaaatatttcacttcctttcccttgccaaaatcccttatcctcggtgctagcactgtgaatatggtgtatttttctttctcgtttttactggatcatgcatgcttccattccattacctgtccattggagcaaaattcttgatttatttatttaattaataatatggattattgaagggtcaaaaggagtacatgattatacaattcagaaatgaacttttgagctgtaatacatagcaaatgatatgtctggagatctgggtactgtttagattcttgatcccattagcttgattattcttcgtaggacatacactatgagtaggactttcctcatctatcaccattaacaatgtccatgactataggtttgcaagtgctgtcttaccataccagcggattatcgagttgctagataagagatattattctgtttcctacataagcagtctgaactgacacatcaagttcactcgcttccagtttccgtcaattatttttgttgaaggtgccaattggagttggttgggcatcctaatggagatacagctagctttcttcatgggcgccatcgttcttcaacatttacttgcaccggagagggatattgaccattatcccttacccttgcatggtttatgtagttggtaactggtaaggctgtctattgtcgaaaggaaacagaaactgtatggcattggaagactgcaacaagtgtttcattgccatgacaaggctactacagcaccatgtataggtttgctaaactgaatcgtttgtgactgtatgttgtttgcagaacaaaacttacatatgctatatataaatgattaaggatttacacatcgttacttacatagtgttgtactcttaactagagtttgggttacttagcattattatttttccccattagtaacggttgctattggataatgtgcgatgcagtgcatttaatctcgatactatcgtgttttctattgaggctgtttatgtttatgagatgcatctatatgttaaattctgaagtaacccttctttttattctaaatttcttgttgcaattctcaatgatggttaaccaacaattgatattcctattgtattaatggtgttgcataatgttgtccacagaaatttgtggagattttaagggtttattttcttgaacattgtttcttgaacgatttagtgatcattactggacagtgtttactaagtattgagatatgagctactatgcaggcggatattctcaatgctgttcttatttaactgcattgtgaacagtctgtttcccattgatggattcctattacagttggctttatgtttttctgcggtgtctgttatttacttctctttttggtttcttacatggtttcttgtacagacattttcaaggcatacaaaccagtctggcggatatggtccacaaggttaccgccctcagggtcaaggtgccgcttctcagtggggaccacgttctcagaatcatggctatggatacccacctagaggtatgcctccacctcaaaactacaacacaccctacggcagctacccgccgcagcagggaccaccaagaggtggcatgggctgggaccagaggcagggccctccaccccatccttcgtaccagggtggtgcttctgattactacaagcagggatctcagccatatgatagccagccaccgagctaccctcctgggccagggaattacaacagttatggtcaatcacagggtcctaactatggccaacctcaatacccgcaacatgcgcctcagcagaactacagccatgggtatggtgatcctagatacaatgctccccctccgaaccagcagtactatggtcagccgccaatgggcccgcagcaaggctatcctcaacagccagatccctatgctaggcctccatacagtggacctggtcaatggcctcccaggggtgctccggctgcagatggctcttaccaggcgccagctgcatcttatgggccgccttctcagcacccttctgcttatgggcaaacgtacagtgcagcaactggatctgatggatatgctcaacagggttacccacagcagggtgggcaggcaccagctccatatggtcagagtgcaccagcagctccaggctatcctcagcagcaaggtggctatgcacagtacccacagacccaaccagcatatggtgagcaagcagctcaaaccaatgcgagctatgggtaccagggagctccagcagatcctaactatggaagtgcctacccacagccaggatatggtcctcctggtcaggctactggtcaggctggttatgcctcctcagcagccagccagcctgcgtatggccaggcaggatacacccagccgcctacaaatcctccaggttatgagcagtctgcggcaccagcaacaacccagagcggctatgctgcgcccccagcaaatccacagcagcctgctgcagcaaaaggggtctcgccacagcctggtggtggtgctgctgcatatggtgctggtgggcagtggacagcatgaccctcctcgaacctcaaacatggctcgctggtagcaatatcgtgctcaatatttgcaccttccggatgcatccttggttatcggaagagattgtgtaactccttgattagtgatacttggcatctctgtagtagcacctactagtagttcgttggttaactgtgactataaacatcctaattcctattcacttcgaatcaaacttcgcagcttgccaagtaatttttttggatttgtgtttattcatgtaaaatagttactggtttggctcacagaatgatgattctgtttctgcagttcattcaaatttggttctgatggatgttaaacctagtgatgacaatttaacccgcaaatctgaaattcgataggtgcgtgtatgtgtgaagattttgacccgtggttgcaacccatacctaacctgaagtttcgtgggtgttagatgcgggtttttatttcaacctgtatttgacccgaaattcaacccgtatttgactccaaatttggtttactccttattttgcgcaataatgactaaagatacaatagtaattattttcaattagtgacttggttaatgattcatgaagtgttttgttggtgcttaacgtaaggtttaaatccataaatataactcaattattgctggtatttaaatacttataactaaattattgcttgaaagtgtataatgagtaaaacccacgggtgatcttaaacccactcgaaacctgatggatttggatgtgggtttaaatttgcacccgcgtgtgcgatcgcgggtgagtttaggtagatttcacgagtttgatcgcgaacatggtttttctccaccgactcaaatctgattcattgtcatccctagtcaagccgaacatactatccctagtcaagccgaacatactgttgctcttgcaatgtgagaagcgttatgtacatatggatcgattagcggttgattgcaactatagtaagatcttgtccagtagtttatccatatggtcacctaaaatactgttttgcacctaaaatattgttttgcacggtagaccgcactgttcgcagagtggagtttaaaataggagatcataaggaaactgtaccattgtcgaatagtattctactccctctattttcgaatatttgttagctgctagtttatttttgaactaaaacacgataaataaaaaaactaaggaacatactactaagattgtctcaacgggtaatctaaaataggggtcacaaaattgtagatgacattgtttgatgctgtttgtagagtaaagtttgaaataggagacacgatagggaatctgctagagatagcctaaggtcttgatcggttatttccatgccatatgaattggagggaattggaaaaaaataggaaggattttgatttgttatggatttaagtccatccgatcttctccaatctatatgaattaagataaaaatgaacatatgttgagtgtgggggtgaagtagatggtgagggttcccatgctccaagtagatggtgagggtgaagtagaatgtgggtggtgaccccactccaaattgatggtgagggtgaagttgaagatgtcgatggtgatt

SEQ ID NO: 27333 - DNA, 2016 bp, Zea Mays
tttggttgttgcaaacgagccccaacccccagcaggtgtcctctgcaatcgcacgccaccacacacatgacacaccgaacagaaccgctagcaaacgccatgaccgttcgccgcccaagaacagctagctcaaccaaccaaagagaagaaacatgacatctccgtggattcatggtctagctctttgcagtgcccaaatcgtattagggacctcgctcaccgtggcatcagaacaccacgcgcatgtggagtatctacaggacacactacttgcgcatgtggcatacgcgcagaattttaggaggataagcattaaggcagggggggtacggagggagtagtagagctatactcgcaataagtgcgggtgtcctgattgaatttagcgagcgatttttctgatcagccttttttttggtgggaaatcgaccgttttggaggtagtacgaatgctagctgccgccgatcgaactctgctggaaaatcgtgtggaatctagtaactgaatctggtggggagaatctcccggtcgttcatgtgaaactccggccggcgtcggccgtatgcccgtatatacacttgcaaaagcaggggaaaaaaatgtttgtgtgggccgtgtatagccatgggtgcacgccacatagtagttgtgtcagtggggtacagtagcagacagtgctacgctgtctactactactacgaacaccgtaccggtcgacgagttcgatcgcacccgatcgagtctagtggatggaaatggaatggaacagcgcgcgccagcccgaccggccgggccccagcggcccaggcccgtgacgtgcacaggcgaggcggcgttgtcttgtcgttgctagtagtagtagtagtgtccctttccttaccgttcctcaagtagaaacttgcaaggtacgccttccctgcagcacgcatggcatgggcaagggctttgttgtccgcagccgccccgcctcgctgcagcttaactgcctaagctaagcatgccttgttcacttggtgcatattgcatttgcatggcatatctatcgtcgtcgagtggcgcgcggtcgatgttgcttcgaggcctggagcagccttccattagtgttgcttgcacacaacacctcccacccatcatgcctatgcatgcgacccgtgccgggcgtcgctgtttgccagcagcgagggttcgcgtcgcgcgcccatgtgccgtcgcaggcgtcgctgctggcgccaccggcctacgcgctgtaccaccactaccaccacggcgccagctacggcggggacgacagcgccagggcggcgtggcagcagctgcagtgcggcagcaagggcaccggcgtgttcatcccgcggtccacgccaggctccgcgcaccccaagaagaagggcaagagccggggcgccgccgccgccgccgccaaggccgcgcgggcggccggcgcgggcgcaccgcccaggaagcgcgtctgatctccgcttctctgcatcgtgatttaatggatcagcaagaaacaaaaacaagaagaagaaaaaggaggggtaaaaaaaagagcagaactacgaactaaccccagatgcagcgctcgtcggaaccagccggattagcttgatatatgtttaattaatcattaattttcagtgttgttgtcattcttatatggtaaataataaaaaaaaccatagctactcccccctgggttaaaatgtataatgtgagccctaggggatcaggctgtgggctggggcaccaccgcaccaataatctctctgtttgtatatatagtaaaagctagcggttcgtagtgccgtagttttcctggctaagtcgatttattaattatttctttgtatttcctttcttcccacatttttgtaagatgaagaaatgaattgtgctattggtgtaccactactatactagagtatagtgcagtgctaaaagaggatgggaatgtcaaatgtgcaatggttagtgtactagtacttttaagctgatgcctcgcgctccgtgct

SEQ ID NO: 27334 - DNA, 896 bp, Zea Mays
cctccacctcggtgatgagcggcgcctccacttccgtcatcgctccaccttgagggctcctttggttgcccgggatcccgggagtatccaggtcgattccctgggtctgaaatccacaggccgaatcgtcccagggaaaaataaaaagttgtttggtgacccacgctccccgatctgatccgcgggggaggacagtgctttggtccccggcctcccagggtcgggaagggcttccccgcgtcccctcccgtgcaagccgtcgcctcctcctctcgctcgtgaagcctcctctccctcgcgcacggtaccgccacccaccgcctccacctctccctcgcactcgcgcacccaccgtcgcccgccacccccgctcttcctcactccctcctctgcctcgcgcaaagcgcaccgctaccacaggcggtaggaccgcacaacttgccccagatccagaacagtctcctatctcctcaactcacgcatgacgacctcctcagctcccccatccgcatctcgcgaagagaacagaagctggtgagcgatccagaattcggtcgtgaactgaagtgtgatgttggccatgagtattcctttttggagacaagggatggaactcttgagcactaaacacaagttggtcgaaggaaaatcatgatgagcaaagtcattgttgtgttaacgttttgggcatgccaagaactatttttttggttatgagtttgtcaaacatatgttgagtttgtcgctcatttcttaagagctatttctgtgatcgaagaaatttgtttattttagtggcatgaataaaaaaaccaagcaaatccatggtagaaacttgtttgtgtgcatattttgagggctttgttttactggaactgtttgattttgctgatttt

SEQ ID NO: 27335 - DNA, 1854 bp, Zea Mays
tcggcctattccaccggtcgtcgcctttttgctgctgcgcgacgccgacgcggccgtgcgagtgcggcgcagcgacggtcgagccaagctcactactccaaattcgtgtcgtagtcgtaggaggaatgtgggagagaatacaggggagaagccgagagccgaacgaagagaccgagcccccgccgcccgcggcgtctgttcctttcgtgccgcttcgtggtggcgccgtggcgcccaccaccacctcacctctcagtctctcaccacctatagcaataccacgagtccacgatccatggaatagactagactacaccgctcggccggtgacgacgacggcgacagccgacagtctatccccaactacgctctgcaccagcgccttatccgccgcctggggtttgttctggcgcggtggcagttgataaaggcgggagggattagagcaaggagagggatcggcgatgagcttcgcggatctggaggcgggggctctcagggcgcccctcgggaggaaagcgagaggggggccaaacgacgcgagagcgctcgtcttccagataaccaccgcggtggcctcgtaccgccgcctcctcaactcgctcggcacgcccaaggacaccatcacgcttcgtgataacctgtctctcctcgagccctcttatgctttacatatctagcgatcagcgtaaacccttgcgtaaatttgctagcttgagtactagtaagccttgcccaattcaagtttggagccttttttactttcaagtctggagcaattagtctgctcttagatcgataggatcgctaaatcatgtcttaaacaacatgttgcttttttttgctcactcatgtcgctttcttagttgccttacgatctagtgctttgtttccctcgcaggcataagactagtcagaacatccttcaattagcaaaggatgcgaaagataagctccaaaaggctgctgaagcagacaagagcactgatacaagtgcagacaagaggatagctgatatgaagcttgccaaagattttgctgccacaatggaggagttcaggaaacttcagagtcttgcgattcagagggagacggcatataagccagttgttccacagaatacgcagtcaaactattctacagatgagcgaagttccgaatctggtaatatgcctgagcagcgtgcattactcgctgaatcaatgaggtcagtattgagctattagctggcgatcaggtggaagctcagctgaagctctgtagtgcattaggcaaatgttggatagatatacatgttaggatatcttattgactattgcattagctcatgtacttgaaaaaacaggacgttcatctagatcttatgtcccatggcatacttgcccctgggtttgtgatgaagctgtagggcttgcgctaatttcttagtcgatacaagtggactgtaatgtgaatttaaaaagatatatgtctgcacacgagagagttttttagactagcaacaaagtaatatttgatggttgtggggcagaaccggtgccgaaggctcccacatgagtgaggtctgagcaagagataaatagaggcaagcctttctctgcaaatgcggaaagacaagaggtgctgcaattggacaatgaaattgtttacaatgaagctataattgaggaaagggagcaagccattcaagatatccaacagcagattggtgaagtacatgaagtgttcaaagatcttgctacccttgtgcattcccaaggaatcataatcgaggaaatcgacatgaacattgaaaaataagcagcagtgaccaaagaggcaaagacacacctagctttaaaaaggcacgactca

SEQ ID NO: 27336 - DNA, 2314 bp, Zea Mays
ttgcctttgtctcccttttcttttctttgggattgagctctgaggtttttatatggggtttcatctctagcctaccccaacgtgcttgggacaaaaaatgctttgttgttgttgttgttgttaatttctttccgcaaacatcacaaaaagttcttatgctctgctggtagtccaaatcgccagttatcattaactgattaactactttcatattttcttaaagttgtgttatggtttcaattttagtccataccaaagttctggatagttataaaacatttttgtctgatttatctgatgactaaaacttctgtttgtgtttctggtatggaaggggcatatcttgtacatgtgtatgaaaactgatatttgacatacgcatgcaggagactggttcatagcctgtagaaatattttttgtaatttttgggtagcatctagcatgagttagcttactcgagttttactgtgaatttattattgagttgtgttctttggtttttattctagctttgcacccgcacgtgtcctctttgtgtgttttttagttagctgagggcttgtttggctacccctgtgtctatctcaatacacgtgcattgagatggatttgggtggaatttaaacttacacttcaatgcacaccaacacatgtggaattgtggattgaaatgaatacaagggtattgaaacaaacgctaagggctagtttgggagccacaaaaccggaggggttgaaggtgctaaaatcctcttttattcaattttgaataaaaaggggattttagctcctccaatctcctccggtattttagctctcaaactagccctaaggtcttgtttgagagtaagggtaatggatggaggggattgagggggccaggccaaaatctttggccccttcaattccccttcccattgttcttgttcctaaacaagtcctaagtgttacttatgcatacatgatgtaaacttacaattgatcaagaaatggtgatttacgcatagatctacaactatatatctaagacattttggtttttcctaatacattgtttttttcttacgtatctagacatactacatatctaagcgtataacaaaagctatgtatctagaaaagtcaaaacgtcttatggaattgaggtattaaaatctgtgcacattattgttttgtgcttttactttatctttgcacttacatgttgtttcttgccataatattgtactatttattctttttcatgagtcattcgatccactttagattcagatatttgtcttttttggcatgtttcatccgaacccatgtttgtccagtatatggtgattgtttcatgcatataattaattcctggatgtttcctgtgctgatttatgttattaggatgaagctatgtgcgtcatcaggtgtttttctccatgtttgcataattaacttgaataacagtttgcccctagttcgtaaagttgagctaactacacaattgtggttgctcttggctgttaactagtcttttaaaactcgtaaaatttatggcatcccttagggcttgtttggataatcttggattgaagtggattgaggtggtataaggtgtattgaagtgtaatatgaactaattttactttcaatccctaaaatacacttcaatccactttaatccctctttatccaaacaaggccttattgtttcagtccaacaatggaggtttccaactagcataataatgtttctctgctgttgacagaaacttgcatgaggatgaccaagctacaactcattgtcatctacacttctacagtacatcagccatccattgtatatgttgcctgataacctaggtgcctcggccaattttctagatgaactcgcttttgagattatctagctggaagcgtgtccacttttgttggaaaatgttgatccatatgttgtaaagttatttgcactccttgtgcaattgaagattcactctctggctgtgggtagaatctggctgtagaaagagtctaagtatcatgtgaattacgtgctgaggaagataaagttcagacggtttaggatttagacagtcatgtatttctactatcgcgatgacttgaccgattctgtgtctatgtttattttggatgatttttactaaagtaattctcatagaaatgggatgagaagttaggcgtttagtagtttgcaccaccttttggtagctagaagatgaaaaaagttaaaacaaacaaggcacaagtctattgcgcaaaattattcccaaaattattctcatcccttgtgcagggctccgcattgcgtcg

SEQ ID NO: 27337 - DNA, 1576 bp, Zea Mays
aattggagctacacacaagagcgtttcaaataacctcgcttgcgcgaaccccttggtggccgcctccagctgcgcgaatgtgaactctccagggggtccttgaacgatgacgatggtcgtatatggttgccatatgatgttgccaattccattcctgaatgcagtagcattccgaattttccagctctatatggtaatcttcgaactgaagtcagaataaatgatctggcagacatgctccaaaggatcggggtgcggaagttgtctgggcatgacattgttaaaaatcacatcatggtgtccttgcgtaacggtttagatgctaatgtggctgatatagtgattagagagtattgtatgactgggagtcaccagaattatctagaattttatcaatattttcttcaaaaagatgcaaggaaaaatgtgtatatcttctggaagttcttgatagattctgggatgatcattatagggcaaaatctaggatcttcacagatgctacacattgtggtgaaaacagagcagttgaatcatcatttatgaagtgcattcaaagcttcaaatggatagcatcaagaatggatgaggatcttcattatgcaacagatttattctatgattgtgaaaatgtccgctctctttttggtagtgtggctccatatgttgtatcgcaggtatctagcagttcacttaagaaggccattggattcaaaacagaggtatcttactgtgatgcattgatggtcctgaagtcttggataacgtcaaaggttccctttagagcaagtatgagccagatgtggaaattctataccttattgtctgaaggcgtggcagacgcaaagattgacattaaacgggagttcatgtcgtctccctctatatttacaccactacagcgtcctcgggcaatttaaagacatcccatctattggacgctccatcactagctgcaatagacaaaacttagaggagccatttccactatttcatctattaaaacaagtaagaaaatagaaaggcttggaagcaatggtgttccacccagaacaagccgactcaagtgaggcaacgagtcaggaagcgcaccatggtcggatgaacgaagaagaaaaatctgttgcatggaatggatgtatgttattagattaaaataacaaaatttatgtatggatagaatcacaaatgaattctgaaacattttctcataacagtataacgcacacatgtacataagttatcgtgttgttatacggttccgttgcaacgtacgggcactcacctagtcatataatagagaataatctccaccttggatttttaacatattttttatgttatttttatattgtcataaaatgcactcataataaaaattccagcatgatgcataatttagtgtcatatatttttattaattgtttttaaaaggtggtgttcacatgtgatgacaaatggatggatacactcatataaatactcatataaataaaggaaaacacttttctgcttttaatatgatctctaacaaattaggtgttccacatactttggtggaaggctctcctttttt

SEQ ID NO: 27338 - DNA, 1388 bp, Zea Mays
ctacaaatatatggctgcagctgaggtccgacaccacacaaacagcacatctgtttagccaagctgtggccaacctctgcgaggaatggagatggagtcgactcctctcttgacaccatacaagatgggcgatttcaacctggcacacagggttgtgctggcgccgctgacgaggtgccgggcgttcgggaacgtgccgcagccggagcacatggctctctactaccgccagcgggcgacgcccggcggcttcctcatcgccgaggcctgcgccgtgtcggagagcgcgcgcgggtacccggacgttccggggctgtggacccaccaacaggtcgaggcctggaagccgatcgtcgacgccgtccacgccagcggtgccgtcttcttcgcccagctctggcacaccggccgggcctccccctcagcgcatcgtccggtcatcttgtggccccagtgccagtggccactgctggctacagcaattccaaccaaatgggcaggcaccgatctctagcacggacaagcaaatcccagcacaggtgaaccattccggtgacgtcaacacgttcgcggtgcctcggagactagagacagaggagataccacacgtcgtcaatgacttccgggttgccgccagaaacgccatcaaagcaggctttgatggagtggagatccacgcggcaaacgggtacctgttcgatcagttcatgaaggacagcaccaatgaccgagacgactcctacgggggcagcttggagaaccggtgccgtttcacagccgaggtgatggcagccgtcgcggacgaggtcggtgccaaccgcctcggtgtgcgcctctctccgttcgcggattatatggactgccacgactccaacccagaggcgctcgcgcttcatgtcatcgacgagacgctgaacccgctcggcgtgctttactgccacatggtagagccaaggatgcgggtgaacccagacgacggtattatgactctcgagcacatgctgctaccgttcaggagggcgtttcgcgggacgttcattgctaatggaggctacgaccgtgaggaaggcaatgacgccattgcccgtggccgtggctatgcagatctcatcgcatacggccggatattccttgccaacccggaccttccgatgcgttttgccaagaatgccccgctgaacaagtatgataggagcaccttctatacctctgatccggtggttgggtacacagattatccatttctcgatcaactctaggatgattggcttataaacaatttccccacctggagtactatcttgaccttaaaataaaatgagtgtcactataatattaatgtcgatcaaagttttctaagtttaactaaatctacaaaaattattatt

SEQ ID NO: 27339 - DNA, 1010 bp, Zea Mays
gcctggttagcagttgtggcctccacattttataacgtccctacatgtattaggtatattgaaacttgtgggacaatattctcatgatttttgaatttgcacatcattttggctgtggtatgaatatttgatctagtggtacaaacatgctgtaacatgatgtttcaaggtgcgttattgaggtggttgagattcctagaggcagcaaggttaagtacgagttggacaaggcatctggtctgatcaaggtggaccgtgttctttattcctctgttgtttacccacataactatggcttcattccacgcacactctgtgaggataacgaccccctggatgtcctcatactgatgcaggaacaagttgtccctgggtgtttcctgcgagctcgtgctattgggctcatgcctatgatcgatcagggcgagaaagatgataagattatagcagtctgtgctgatgaccctgaattccgtcactacacggacatcacggacctcccaccgcatcgccttcaagagatccgccgcttttttgaagattataaaaagaatgaaaacaaagaggtcgcagtgaatgagttcctgccagcgaaagatgccatcaacgcaatcaagtactcgatggacctgtatggctcatacgtcatcgaaagcctgaggaagtgatctccagctgcttgattgtggttgtggatgctacaccattttctcaacagctcatccagagtaccgtagtacagacttaacacgaacgaactgtaatcgtgaccaagggatgctattaccttctgctcatgttgaaacaatcagcagtgcctttctttccattatatgccatgtcgaatcaaggcaacttggccctgaaatctttgtggtcaagttaaaccagcactttgacagaacaaggattgctggatgcctggattactgttacataaatgaccattactgaacttcatttcttgctcttatcttttggtgagatgcccagttctcatccgatgcata

SEQ ID NO: 27340 - DNA, 2865 bp, Zea Mays
cgagacttccatggttggcccgtgcagtgcatgcctctcctcgctccctccgcctcgtctctctctgagtcccttcgtctctctgccagctgcttcaccttctgccgctttgatcgtccacttcacttcagcacagtcacgtcgtttattgtcgccttcatcgtctgctccagtgtttggtgatatccatcgctttcttcgtcagctccacttcctcgtcgagttgctgcttgtttcattggggtttctaagttcctcttgcttccttatatatttacacattttaatcttccctgcacttcaatgtgagatgtggaaaggcttgccacagctagatttgtgcatttttatctagtcagctttatttggaaaatacacgccaaaaatgaccactcttttttgggggtcaattcaacattccgcttccctcccactgtttctctctgctcttgaatctacgatgtgtagactttgttattttagtgttttgcaatttcattttcccttgaaaatatagggaacctcattgcattctttttggatcgatggattccgtggcccataaatccctgctcttcaatttacaccctccgtcttcatctgcaacctgcttcgtctaccgttgtttttgtcaggctatgaaaaagtgtcttcggcgtaaaaggtcaatcgccccgcctccagcaaaatgacttcatttttccccgacttttgttacggttagtgctctttgctgctgactcccttgtgtctgttatccaagctacgatttctcccccaaatttaaggtttagggtttatgttacaaaggaaaaaggaaggataccaatgaaaaaaaccctcactgttacttgttgttcgatttaatccctggttcttgtacttcaagccttgaatttgtttggtttctcccccaaatttgaagttcgggactaatgttatagcaaagggaaaaagtaaggaaagcaagacaaaaaatcctccctgttacttggggctagtttggaaactcaaatcccctccaatcccgaaggggattcgaggttcccaaagtagtgtttgatttaatccctggttcttgtagttcaaaccttgaatatgttcgtcttattttgtgtagtccttttccttttttggtccccggcacatgcttcacatgatctgttacaaatttgtggttggtcaatccgttgttccccacgtatattttttaaaacttctttaccttgaagagttcttttctgtcctattttgtttggttttacccacactggtttcggttccctgcttttcctctgttcctgttttcaatcccactcgattatgcccaacttagtttgaattcacagttattttcaatatggtaaggaaatgtttgctacttatatattagatcgcagccacattttcatccacatgctctcacttcgagattttgaccctttttccacgattttcaatacgaaaaggacataggaaagaaacgagtaaaaaagaaggaaacaaattctttcagctacttgctgttcgatttacttccacatctaggattagttgttctttttttccacagcaccccccccggggcatgtctcactggaacttttacaaatttgggtttagggtacataaaaggtatgttttttacaccatcaagttgttgattctttatcactttaaattgctattgatgtgtaaaaagagttgattatgtgttccacataaattgctagaatcctttgtggctacaaaagaattgaatcaattgattatagttttaagctgcttccattcgcactggttgtctgctacatggcgcgtagtgattttacagttacttttcttgaactaagtttaaatgctccgcgtcttatatgtactgtttgtttctgctcttttatcgaagcacgtggagtgatacctctgcacctcagtggctttatcggcgaggcttggttgctgaggtaattagcattagttttgatctactttccttcgtgctggttgttcactaatagattaatgtttgatgtcctgttcggcctaggatacttaccagtgtgtctatgtgttccaccaatatactgcattatgcacgcttgctagtttaaagtgtgatttcgtgtacagaacacagtacagagcttcttatttaaaaatatttgtaactttaacaaatcaactcttagatatacaacctaatgaaatatattcaataggctcgatgtgttctagcatattccgatgtgccatgcagtgcagaggtaaattcagtgtacttacatgcttaacttctatatatactaatgaagatagatatctgtatactgttaatgtctctacaacaaatgataaaaacatgttttccaagttaaacacctacaaattcttcggcacaaaagtgctctcccactttggactaccatagtaagatagcaatgtttatcttatcgttcacaagtcatctacaaagacatggatcagctgaccaagctcgagctaccatcgcctccaaaaaaatgaagcatacccaacttaacaaagagctaccatattctatgggttcaaaaaatgaagacgactagcccaccacgaagcactcgaaggtattggttttttgcaagcattagaagagctccatcactttttaatataaaagccttttgtgtacatatgaaccaactgttggagcatttctaaaactgtattgacttatgcaacctctagaaacacactgttactgcatattggagtacactgcttaaatgctacttgatatatattgtaatttcatttgatattacaaatgcggttagcaaccaaattcagctataaatttcgtaagcatgtggcgccttatccgac

SEQ ID NO: 27341 - DNA, 2952 bp, Zea Mays
tccttcctgatacattcgtgtctcccatcgccaggtagatccctttcctcacgccacgccgagagagaaaagatagagggagaggcaagagtcgcatcgcagacccagaccacgccgccgccacctccgccgccacttccgccggtgatcgagtcgcgtcggcgctaccttcaagctagaagacaataagcatcggcagacatgttcggctccaccaaccgatctttgttcggacagaagccaagttttgggggttttggatcatcttctagccagtcaagtccttttggtaacacgttccagcaaacacaaccaacatttggcagcagcacttttggttcatcaactccgccggcgtttggtgccacggctcctgcatttggcacaactacaccagcctttggcaccacaactgcaccagccttcggtgccacgactagcccagcatttggttcaacttcaacatctttatttggtgcttctagcgccccaatgtttggttcttcagcctttggcacatctgctactggttttggaacttcagggactacagcatttggtgtgagtagtactactccgggttttggatcatcaagcacaccttcatttggcacatcagctagtgcgttcagttttggttcgtcaccatcttttggacaaacagcagtttcctctggtagcactccctttggaacaactccctcaccttttggtgcaccagctcctgcgtttggctcacagacagcagcaccaacttttggacaaccacaatttgctaatcaagctggaggaaccagaataaaaccttattctcaaacaccagatgttgacagtgctactagtggtactcagcctgctgcaaaacttgattccatatcagcaatgcctgagtacaaagagaagagtcatgaagaattgaggtgggaagactaccagcgtggagacaagggtggaccgaacacttctggaactcaaacattggcacctagctttccatcaccaatacaacataacacttttgcttcgacaagtaatccgttctcaacgaacccattttcaacaaacaacccgtttgctcctaagcccactacaactactagttcaccattcaacacctcatttaacaatgcatcagttgcaagttcgagtctattcacatcatcccctggtaccacaatgtttgggcaaccaggtgtttctacacttccagctccagcaagtaattcaccatcattatttggaaatatcaatcctgctcctgctacatcgtcaatatttgccacgtcagtgacgaataatccaagtccattcggcactggcacatcattggctaacactcaatcagccccactattttcctcagcatttgctcaaccgacatcaagtacaccggctttctcctctgggagcctatttggctcaactaatcctggcagtctgtttaccagcagcggtccttcacttttttcaacaccaacatttcaaccatctgcccctgctcagagttcgaacatgttctccttccaacccccaattcaaccagcttctaccggtggactcccttttttccccaacacaaatcaggccttgacgggacagccaacttctagcctgtccagtatggtcatgcagtctgctcttgtttcaaatccatttgggatgcttccagcaatgcctcagatgtccatcgggaatggtggatcttcaccttcagttcaatatggaatatcaagtttgccggttgcggagaagcctcttccaagtagatcattgtccatggcggttcctaggcatttgtcacagagaaggataaaactgctgccaagaaaatataatccaatatctgatggcaaggttccattctttgctgatgatgaagaatctccagcaacaccaaaggcagatgcttttttcatccctagagagaacccaaggaacctggtaattcgtccaattgagcagtggtcttcacggagagaaactggccggcaatatactgcaaagaatgttactgattcgaacaaatatgaagatgcttccattgaaagtgagcgtggtaagtctgccatgtcaccaagcagcaggccacctgcagtggaaaatgacaaacagcatgaggccagggccatggctcaacatgcgaatggaaatggtacttcagttgagaggctgttgcctaagcttccacgtgcagattacttcacagagcctagtatagaggagcttgcggccaaagaacgtgcggagccaggctactgcggtcgagtgagggacttcgttgtgggtcgacatgactacggcagcatcaaatttttcggggagacggacgtgaggtgcctcgatctggagtcaattgtggagtttaacgaccgggaggttattgtgtacaaggacgatagcaagaagccccctgtgggcgaggggctgaacaaggctgcagaggtgactctactgaacatcaagtgcgtaaacaagaagaccggggagccgtgccagggggcaagagtggagaggtacagggagatgctggtgaagaaggcggaggagcagggcgcagagtttgtgtccttcgacgctgtcaagggagagtggaagttcagggtgaagcacttcagcgcctacgggctttggtgaaatcctggggagttaagtagtttgtttgttctgatggaacaacgctttacgctcttgtcaattaccatgcttggatctgttgtgctgcttctgtacaatgttgctgctgttaaaatgcttgcaaattgcactgctctgctgctgaaaacaggagcagcagtagaaactaccgcaacaggagggcgtgctacctgctactgttatgtattattattattatactatattctaagtataataagacttagttttttaaatacatgaatattactttatgcacttagatatatgctatgtatggagagaaaataattatat

SEQ ID NO: 27342 - DNA, 1188 bp, Zea Mays
aggactggtttacgcctttacggctcgcccccgtcttttcttctcgtgttctcccctccccgcgtgcgctccctttcgtggcacgactgggcgaccgccgctgtacgccagctgctcagatctcgtcgggccccttcgccggcgaccatcacctgttagtgaacgcagggagtccattggatgtctcaaagaggtctaggattgttgaaccaggcccgccctattttggggccatgggcagcaacactggtggtgccagtggtggcttctaccagcccttcaacagcagcaacttagctggtgcaggggctagcactggcatccaaaactttccaggtgtacggctgcgaggtctcccttttgattgcaatgacattgatatctgcaagttctttgtgggactggacatagtggactgcctcctggttaacaagaatggccgcttcactggtgaggcttttgtggtcttcccaacagctatgcaaacagaatttgctctgcatcgtaacaggcagaacatgggccggaggtatgttgaggtgttcagatgtaagaagcaggagtactacagtgcaatagccaacgaggtgagccagggtggttactttgagtcggagtgtcgccgctcctcacctcctccgaggccccctaagaagactgctgaagacaagggcagcatggagtacactgaggtgctgaagctccgtgggcttccctactctgcgacgactgaggacatcatcaagttcttcctggagtatgagctgacagaggagaatgtgcatattgcgatccgctcagatgggaaagctaccggtgaagcctttgttgagttcccaacagctgaagttgccaagacggcgatgtgcaaggataagatgactatcgggacgaggtatgtggagctgttcccgtctaccccagaggaggcgagcagggcgagaacccgaggcaggcattgaagaaacgaatggcttggctgaatgatctctggttgcatgtggctgcaatcgactgtagttttcacttcgcatgcttatctgtatcgcttttagattgtgttagttgtgtgtatttgacttcttatatgcgaactgaactgtaacaactttcctttgttggccggccgcacatgtacggcataatcatttatggattttgctacgtttgagtttctttcaaaaaaaa

SEQ ID NO: 27343 - DNA, 845 bp, Zea Mays
aggcggaaaccaaataccccgaacgtccacagcgagcgagaggccgcaaactcccgagaccgtacgaaccagacgattcaccaatcaccatggcggcgccggcgcggcgcaggtcctgcatctcctccggtggagccggagcgcctccttccgctgctgcttcgcctcttctccgccctccgccgcccgctgcgaggccggtccaaggccatgctcaaggggatggactactgactactccgaacccgagataaggacatgatttaagacatgtgtgtgtttcaagtagttcgttgattgggtgcaggcgcaggggtttcggccaggccaggccttgatgctgtggaaatgcctgtacgggaacaacgtttgggctcatttttacgacgagctggctggtaatttttcattgtgtcaaggagattccatctatttagtattggtatatgctattaactattaacatctacgcctgtgtttcaaatcacacttcggtttagctttgtcctaactcaaacgtctctaactgaaaactattaacatctaccagttacgtacaacaaattcactagcaagacatctaatgaaaaaaataatgaactggtttcatgttgtacatgttgatacatttttttttctctggtaagaattagttgcgtggcctgtttctctcattaagtttacaacattttctattgtccaatggggtctattgcttttcagttggagaacctacaatatacctatgattcttctcaatgtatgtcatttgatgtgttgttaagatgttagttaattagacgtcacctatgtgtatctctaaaatccttcagccccgtttgttt

SEQ ID NO: 27344 - DNA, 1374 bp, Zea Mays
ctttatttacccagaaaccctagtctctcacgctcgcggagtcagtctcaccatctctctcggccgacagccggccaccaccagccgccagtagcaatagcaaattagcaacccgccgagcaccgacctctccatagttcctctacggctctaccgagcaaccgccggcgtcgaccctgccgtccaggcccgtcctgccgcggtgccgcctgcgtccctgccccagccacccggccgccacccgccgccgccagcgaggagcgagtagtagcgaccctggtccctgccgcccttgcgttcgtggctccctgcccagtgcccctgcgtcagcgtcactgcactctccgaggtggaggtggttctcaaatctcaagtccatccacggcgctactaccctcgctgcaatggagttgaggaggcctgcatcctctcctcttgtcgacaactacgtggtacctggtgacgtcgtcctggacctctctgagatgaacaaccagaccattaaactcggcgcgggtctgcgtcaggagtgtgacaccatccaggcgactagtgctgggaagctgcggcagttgaaacccaacaagtattggattgaaaactcacagaaaagatatataccttctgtagaagataccgttcttggtattgtggtcgacaccaaaccagactactttcatttgaaggcggtacaaggagaaacatacccaagttcgagattggtacattaatatatgctcgagtggtgaaagcaaatagtatcatgaatcccgagctctcatgcatggatgctactgggaaagctgccgaatttggacagctcaaagatggttatatgttcgacacatcaactggcatgtcacgaatgttgttaagttccccaacgtgtccagttctggaggtccttgggaaaaaactgtcgtttgagattgctgttggactcaatggtcgagtctgggtgaatgctcctgcagcaagtactgtcattcttgtatcaaatgcaataatgaggtcagaatctttgagcggcataaaacaaagagctatggtagaaaatctattggagagattgtcatgatgataagtcagcaagcattagtctaaagtaaaatggaggagtttccattgtgtcagttcaaagtaaaagtaggaaagtttgagatcaaagtgactatccccatcaaaagattattatgtatcacgtgtcgtagtatacagtacactatactcttttttatattaaattatcaatgtatttatcaaagtcttgcgtcccttgtttaatattcgaagggcgggtctagtgcaatcgtgagacctgtctcactaaatcaccaggtcacggctttgaagcagtcttatcatgtttgtggg

SEQ ID NO: 27345 - DNA, 3403 bp, Zea Mays
ttatttcattggcaccatcaaatttgggccatggagaagaatatggaacagttgggcacctcctcgctgtgattctggtttacgacgaatgcaatttggtgtagcaaaaaaaataaaaaatggagcccgcaaaattgtcctggaggaggcagaagccgccagagtagcagcattctcagctttcaagtcacttggtgtggaagttccccagttcactgcacctccactcgcagctattgaggaatatccaactcacgataccatagaccaagctaagttaaataagctagcttctggtacccattctagagatgataaaaatatgaatacttgctctgattatgctactccaagggcttctacatacagtctaagaaaggacacaagtcctgctccttccattcaaatgaaagagaatgcaggactatctaaaaatgtgcaaatcactagacagggagcatcatcatctttgtcaacagaaattgctgatggatctagtagagatgtggctgaaaaaggtcctgtccatgcatataacttcccagggggatttgattgttttcttgatcaatggtccacagctagtaattttttctttgatgttcattttatcaagagatcgatgaaaccatctttgaacctttttgaagtttttgggttggctgtctgttgggaaaaatctcccatatactactgcaacttcccaaaagatctagtcactactggcaacaataacatcaaggaaatgtggggtaattttcagagaagatgggaaaaaatagcggacattatgaaacaaaagagtgtccaaaaaatgacatggaatttaaagatccagatccaggcacttaaatcaccttatatttcttgccaacggcttgaaaggtttcatcttgaccataaaatgctggacaaagttgaagtgcttaacaactcatatatgttgttatcaccagtctctgtctacaatggattggatatatgtctgctggcgtgggttctatggccagatgaggaaagcagagcggttccaaatcttgagaagtttgtcaagaggcgacttcatagtcaagaagctgctgctgcaaatcgcgatggaagatggagaaatcagatgcacaaagcagcacacaatggctgctgtagacgtgctgcacagacacgggctttgtatactgttctgaagaaattacttactcaaaatctttctgttttggttgaaacaatcgaggccccattggttaatgttcttgctgatatggagctttggggaattggcgctgacatggatgcttgtctccgtgcgaggcatattataacaaaaaagctgaaggaactagagaaagaagcttacagattggcaggcaagaatttctctctaaatgctactgctgatatcgcagacattctatatacacacctaaaattgccagttccaaaaggctgtgagaaagggaagctgcatcctagcactgacaagcagtctttggaccacctaagggatcaacaccccattatcccattaattaaggaacacagaacattagcaaaactgttaaatggcacgttgtggtccatttgttcacgtgctcaattgtgcactcaatcacaaaggtacatcatacatggaaattggcttcagacgtcaactgccactggccgtttgtccatggaggagccaaatctgcagtgtgttgagcatgtggtggaattcgatacagggaaaagcgataaagattactcaagcatttcagttgatgatcatcataaaatcaatgcccgtgattttttcatacctaccaaggagaactggttattcataactgctgattactcacagattgagttgcgtttaatggctcacttttctaaagatcatatgttggttgaacttctaaagaaacctgatggtgatgtttttaccatgattgcttcaagatgggctgagaaagaagaggccttgatttcttccaaagagagagaaaacactaaaagattcatatatggcatcctttatggaatgggtgcaaactcccttgcagaacaacttcagtgcagcactgaggaagctgcacagaaaattcaaagctttaggagattttttcctggtgtttcctcatggttacatgaagttgtgttatcctgtcgccaaaaaggatttgttgagactttattaggccggcgacgtgttcttacaaaaataacggctggcaatagcaaagagaaagctaaagcacagaggcaagcagtaaattctatttgccagggttctgctgctgatattattaaggtggctatgattagagttcattcaataattactaacagaactagtgcagctgattccacagatgaagttacaaggaaattttcagaacttggtggccagtgtcaccttattttgcaggtgcatgatgagttggtattagaagttgatccgtgcatggtagcacaggctggaaggttgttacagatatgtatggaagaagcagcttcactattggtacctttgcgcacaaagataaaggtgggaaaaacttggggttcactagaaccattccatcctgagccttgtttgatgcaaatggtgaatgtcagttggatgccaatgtttcatgacatgcaaggtcctggaagaaggctgaacaatttccaatatgcccccacaggggaccttggtgattctgtctggtgttcttcggtagaaccttcattgctatgtctacagtcttctgtcattgctgaccgtatgtgaaatcaacgcaacagcgaccagctccattactgaggatttgctatggactggtgattatcattatgattccatgtggcatgcaagaagcatatatatatcaccaatagatgctgttaaagggtttaaggtgtatttgaaaggtcttcctagttatactgcgaatcttttagataaacccttaagaaattggagggcctagtatatggtgatttttcttttgctaggcccagcgctaaaaaaccgattatggggtttattcaaagatgaaatttcatcctgtaactacaggttcaaggtgtatttggtttgatggatatcactatggacaagcgatggttggtttttgtacaagttggatgttgataaaaatgttggtatccatgccacacaaaaaaagcctaaccagcacccatattttgtaatccttgtcaagtatgttatatggtttacttgatagctctagcgaggctatccagtacctcaccttcaccctcatatttgtaatccttgtccacataattattagtatgttatatggttatttagtaattacgatggaaatattatttttggtaagcgcaaatatgcatgtttcgtatatcatttagggaaatacatttgttgtaattagtgttatgataacaaaat

SEQ ID NO: 27346 - DNA, 1889 bp, Zea Mays
aaagcgaacaatccacaattcccagtaccctcacgccggcatccgtcgaagctgctcgacctcgactcaagccttccttgctccttgccgccgtcgagtcgtcgcaggaacgatgacccggcggaacggctgtacgatctacgtgggcaacctccccggcgacatccgcgagagggaagtggatgatctcttctacaagggaaggcaatgtggattgcgaatgtatggacgtatagtggaaattgacttgaaaattccaccaaggcctcctggttttgcttttgttgagtttgaggacgcacgtgatgctgaagatgcaatatatggccgtgatggatacaactttgatggccataggttgcgggtggaattagcccatggtggacgaggcacatcttcttttgatcgatctagcagctatagcagtgctggacaacgcggtgcctcaaaacgttctgattaccgtgttatggttactggattaccttcttcagcatcatggcaagatctcaaggaccatatgcggcgagctggtgatgtctgtttcactgatgtgtatcgtgaggctggagcaactattggaatagctgattatactaactatgaagatatgaaacacgcgataaggaagctagatgattctgagttccgtaatgctttttcaaggacatatgtccgggtgagggagtatgatgctaggcgcagccgttctcgctccagaggcagaaaccgctctaagtcaagaagcagaagccacagccactcgtactcaagaagcagaagctgcagttatagcaagagtaggagcccaagatctagatctgcttcagagtcaaaatcacctgttaaggcaaggtatgaatagttgaatttggtactgaatggtttgaaatttagagaagttctgttttcaagtaatagtagctcaaaatattggtgcctacaattgcagggggaaaatatcagcagcctagtttttttctagatctgttttgaattttccctttttgttattgtactttatggtttatattatgcttcttgatgctgcatttttcattatatgagtttggattttcactgcatctgattaacatgtaacattgtgtgtgactggatagctattcttcattgttgaagatttgttcttttcttcactagattggggcaatgtgaggatctgggaattgcattggtaggataatggaatattgagaacgtgatgatggtttggaacgttggatagtcacagctggattgtgatgcattgtatgacaagtggactgccaccagcaataggagcaagatagggctggcaccacacatacggacaggattttttgatcaccatccagatcccctcctgtttctccccggcgtgacaagtctgcaagcaggagtcctgccaggagcaagagtctgccccgatcttgttctccggcaaaatcagagtgaatcggattctgcacttgaaacgttcagaaaggcagagctcgagctaaaagattgctgtacggattatgagcactgtgctagtagcattgctgtcccttccatatttttacaaatactctgttctttgaggagatcactgtatgctactactctgtacctgacatgatgcaaacgttgttggtttttgaacttagcagaacgatgactttgatcagctccatccattccttccattttttttttctgaatatttcaaaagattgtagtatgcagctattgttattctctgatgcactcctgtgtcctgtcattgtggaaaaaaaatggaattctaccattcatgtgatgtgtctaaaaaatgcaactctagcttgcgattagatgcagttgtttgcttttgttcaatcaacagatatgaagaataaaaagagtag

SEQ ID NO: 27347 - DNA, 3141 bp, Zea Mays
cgcggcctcgcgtaatcccaaaccccggcgtcgctgtcgcctcgcgtaatcccaactgagtagggacagagagggcgggcaccatcacgcggccccagatcctagccacgctcccgcacccactcttccatcgcacgcacgggcgagtgcggcagatcgctggcggatccaatgctgctgccctggtagctgctgcaccgcgcggctgctggtttggtgccctccggctgcggcgccgggtcactttcgatgtgaccatctgaggaggaaaggatggcggcttcggcggcggcagcgcctgggtcggctgagaggcaggcgcgcggcggcgcggcgtcggcgatcggcaacgcggtatttaagagtggccctctcttcatatcatcgaaaggaattggatggaaatcatggaaaaaacgttggttcatcctcacacgaacgtcactggttttcttcaagaatgatcctagtacattaccacagagaagtggtgaagtgaaccttacattgggggggattgaccttaataattctgggagtgtagtggtcagggaagacaaaaggctgctgaccgtcctttttccagatggccgtgatggtcgcgcctttaccttgaaggcagaaagttctaaagatttgttcgagtggaaaacatcactggaagaagctcttgcacaagctccaaatgcagctcttctgatggggcataatggaatatttcgcaatgacacaacagatgtgtatgaagaggctattccaaattggagagagaagagacctaccaaatcactagttgttggcaggccaatactacttgcactggaagatatagatggcagtccttcttttctggaaaaagctttgtgtttccttgagaaacatggaataaaggtggaaggaattttgcgtcaagctgcagatgtggaggaggttgacaggagattgcaagaatatgagcaaggaaggacagagtttgcaccagaagaggatgctcatgttattggtgactgtgtaaaacatgttctccgggagcttccatcttctcctgttccagcttcctgctgtacagcattattggaagctttccgtctggacatcaaggaatctcggatcaaatctatgcgtgcagcaatatctgaaacatttcctgagcctactaggcggctgctacagagaattttgaaaatgatgcataccgttgcttctcatactgccgagaatagaatgactccatcagcagttgctgcatgtatggccccactcttgttgcgtccccttctttctggtgaatgcgagctggaagatgattttgacatgagtgatgacagtgctgctcagcttattgctgctgcaaatgctgctaacagcgctcaaggcattgtaactactctattagaggaatacgagagtatattcaatgatgagcactttaggtgctccttatcacctgattctcaaacaggagatagtggaagtgaagaatcaactgatgatgaaactgtggatatcaaggataatgggtttcatgatgcagaaaatgatgtagatcaagaattagatgatgccgagcgaatactgaatggaaaattgagtgaaaccagtgcatgtgtccatgctgacctccatgactacaaggaagttaatggcaacgattcagacgctgagctctttgttgaggataacacatttgaaccaaatgtaaatttaaatgatactcccctaagtcgtttaatagaaaatggaaagaaaccatcaaatctggcgtccagtcatgaaactccattatcagtgggagaaattctttcgtctttggatgctggagttccattacctggtcgtgcagctgaatattccaaggacagactctctagcaaacccaatggaattcagcagcatgtgaagcgtactaacttatggggacggagcaatgcaagaaagggccaacgttcagagttagttgatccttcaagtgaagaagagcttgctattcaacgacttgaggtaatgaagaatgacctacaggtcaggattgcaaaggaggctagaagtaatgcaatcctacaggcaagtttagaaagaagaaaacaagcactacatgagcgccgtgtggctctggaacaaaatgtgtcaaggttgcaagagcagctacaggctgaaagggatcttagagctgcactggagattggattaagcatgtattcttcacaattttctagctcgcactccatggactcaaagacaaaggcagagcttgaggaaattgctctcgcagaagctgatgttgcaagattaaaacagaaggttgcagagctgcatctccaactcaatcaacagcgccagcaccagtatggctcttcggtagatgcaaatgattgtcctccgcaccttccaaatcatctctcacagaacactgtccaaactggatttgataggaccgttgctttttgtaatcaagagaagcaaagaaatgaggagagcttgccgtgcacatcccactggagaagcatcaaacagcatgtgctctctcaggattcttcaaggcctttctcccgaaagcattcctcagacacctccttgagtgattcaatggaggcatcaacaagtgtgcttgcagagggcgggccactgttggtgaacatcgccagaacaacagaaggtgttgaatacgggagacctccgactgtgccgtcatctactctagttgaactaacaaccaggctagatttcttcaaagaacggcggtcacaattgatggaacagctccacagcctcgatttagggcatggatccgcgtcccatggtttcccatacaaatcttcatctccctggaacaacccaaggtagggggcttgttcagttgctgcattaccgcgcatctgtatattcttggtataggatcccttttgtttcactttatctctgtagaagctggtctcgtttttgtttcacttgttatctctgtagaagctggtagtgagaatgtatataccccttgcctgccttcacttgttttgctagtgcttccagcggacatttttcgagcgtgatttttgttttgcttttgtatttattgtgtatgtaatgactcaaggggaaatatatagatgcgtctttttttcttggggatatattccactgcag

SEQ ID NO: 27348 - DNA, 1337 bp, Zea Mays
caccgccccaccccaaaccacacacaagccgctcgcccgcaccgccgcacccgcacgccagaaacagctctcgcgttgcttccgcacgccgcccatggcgagcctgtcgtcgccgagtctcctctcttccttcctcggcgaccgcctcgcactctccactaggcctctccttctccgctccgctgtcccaggcagcaggcggctggcgtatcaagcaacgagaacgctatgcaacttggtggatatcctatttaacaggagaaatcaggatgatgcaccagaaaacaaccctagacgcctgcgtcctgggaaagtatctccacgccttagtgttcccaatcatatacaacggcctccatatgtcaattctcgtcaacaacgacctggtatgaataatggacctgaaatacatgatgagaacgggatcgagtgcatgagagcttctggaaagcttgctgcacaggttttgaaatttgctgggactcttgtaaaggcataacgactgatgaaattgataaagcagtgcaccaaatgataattgataatggagcatatccttcacctcttggttattgtggatacccaaagagtgtctgcacttcagtgaatgaatgcatctgtcatgggattccggattctcgtccccttgaggatggagatatcatcaatattgatgttactgtctacctcaatggctaccatggtgatacatctgctacatttctttgcggtgatgttgatgacgaagctaagaaattagttaaggtgacaagagaatgtctcgacaaggctatatcgatttgttcacctggggtggagatcaaacaaattggtagaactatacaggatcatgcagacaagttcaagtttggtgtagttagacagtttgttggccatggggttggcaaagtttttcatgctgagcctgttgtgcttcatttcagaaacaatgaatggggacgtatgatgttgaatcaaacatttactatagagcccatgctaaccatagggagcatcaaccctgtcatgtggtccgatgactggaccgcagtgacagaagacggcagcttgtcagcacagtttgagcacacgatacttattaccgaagatggccctgaaatactgacacagtgttaatggaaggccaaataacaaagaacaatcgttagtcagctggcaagatcctgcatttctttttggggactaattggtccaacctaaactctgatgcaaaatggcaaactcacattgtaatctcggttcatcggtacaacgatatatgtatagaaattgtactattttcgaagttatatttgagagtgtgttttgttggtgct

SEQ ID NO: 27349 - DNA, 184 bp, Zea Mays
attctacttagccacccacactagctctctacgtttccaataccagagaacctctttgtaacccaccacataaagtgctcacactaggacgtaaggtgttacgcatctcaaagcggcccgaacctgtacacaattgtccactgtttctcgtgcaactagcacaaaccatcgagctacagtcgat

SEQ ID NO: 27350 - DNA, 1002 bp, Zea Mays
attccaagcgtccaaaccccccatacaaccaactcgcaactcctcgcgcggttcctcgatcgaagtctccagacgcccagcgtcgatcgcgacgacgtacgccaagccgcagcaaagctccggcggtgtgcggtgagatggcggtggtgtcagcgctggccaagtacaagctcgtgttcctgggcaaccaggcggtgggcaagacggccatcatcacccgcttcatgtacgacaagttcgacgacacctaccaggcgacgatcgggatcgacttcctgtccaagacgatgtacctcgaggaccgcaccgttcgccttcagctctgggacacagctgggcaggagaggttccgcagcctgatcccgagctacatcagagactcctccgtagccgtcatcgtttacgatgtgaccgacaggcagtcattcttgaacacgtcaaagtggatcgaggaagtaaacacgcaaagaggtggagacgtgctcatcttcctcgttggaaataaaactgaccttgtcgacaagaggaaagtgtccaccgacgaaggagaagccaaagcacaggagcatggtgctatgttcatggagaccagtgcaaaagctgggttcaacgtcaagcccctgttccgcaagatcgctggatcccttccaggactggacgcactttcgtcaggaaagcaggaagacatggtcgacataaacctcagacctgccagcggttcgtcggcttcaggtgcagccgcgcagctggagcagaaatcaggcggttgctcctgttgagacttcgacagttttgtgttcagagaagctacagcagtactgcaacatcgagttaagtactttcagagagattatgacgaagagtgtgttttcgcccagacgtccagtagtgatatactgacatccatagcgagaagccaatttctgtgtacagatttgtttagcaagttatcatatactaggatataactttttgagacacaagggacaaaatctgtggagg

SEQ ID NO: 27351 - DNA, 1779 bp, Zea Mays
gcattatcgccaatcagtaagtaggctccaagagcaccgtccgtcaccacacaacaaagttagcaagtagcagtgaccacctgatccaaaagcaacaagtaggatcatggacgtggggaggcgcctttcgctggcccgcgtgccagcagtggccgcgctgatggttatgctgtcgctgagttcgtccttctgcgtgtcgtcgtcggcggcgagggcggtcgccaggcctggcgccgcggagcagctgcagcggcaccccgtggtgctgatcccgggagcgggcggcaaccagctggaggcgcggctgacggagggctacgagccgtccagcctggtgtgccgggtgtggccactcgtgcgcggccgcggtggctggttccgcctctggttcgacccctccgtgcttgtcgcgccgctcaccaggtgcttcgccgagcggatgacgctctcctatgacgccgacgccgacgactaccgcaacgcgcccggcgtcgagaccagggtctccgacttcggctccacctccaccctccgcggaggacctcgaccccaatctcaagtacccaaagcaaccatttccattcgctcagcttattatatatgctacggtgagttccaagtgctcctcacggggtacatgaacactctggcgagcacgctggaggaggccggctacgaggaaggccgcgacctgttcggcgcgccgtacgacttccggtacgggctggccgggccggggcacccgtcgcaggtgggcagcgcgtacctgcagcgcctcaggctgctggtggagtcggcgtgcgcggccagcggcgggaggcccgcgatcctggtggcgcacagcctgggcggcctcttcgcgctgcagctgctggcgcgcagcccgccgcagtggcgcgcggcgcacgtgcggcgcctcgtcacgctctccacgccgtggggcggctccgtgcaggagatgctcaccttcgcctccggcaacacgctcggggtgcccttcgtcgacccgtccctcatccgcgacgagcagcggaccgccgagagcaacctctggctgctgccgacgcccagcgtgttcggcaacaccacgctggtgctgtcgcgggcccacaaccgctcctactccgccaagaacatgacgcagttcctccgggacatcggcttcgaggaaggcgtggagccgtaccgcgcgcggatacggccgctcgtcgaggccctgccggagcccggcgtgcccctgacgtgcctcgtgggcaccggcgtcgacacggtggagagcctcgtgtacggcgaccgcggcttcgacgaggcccccgagaaggtggtctatggcgacggcgacgggacggtgaacctggccagcctcataggcccgatcaaggcgtggtcggactcgccggcgcaggtcgtcgaggtggtggagctgcccaaggtgtcgcattccggcatgctcagcgacaagagcgcgctggagcagatcataaggatcatcgattctatcaacctgaacgccacgagctatcatcattcctcttagaatgttttgctttagtagacaactaacgatgatttcttttcacttaaatcggcgacagcagctagttttttttatttggaaaaaagtttattgttttttctgtaaggattatcgggatttgctttagctggtgcctattagagttctctatgtatttcttaatcgttatgaataaatttttttgggaaaaagtacatttaaccagggttttaaagtagttatccaaatatactattctagat

SEQ ID NO: 27352 - DNA, 1191 bp, Zea Mays
gcgcgacccttactcccaccgtcccacggccacgggcttgcggccagctcccctcgccgatcgtttccaccaaatccaccggtcttgcggccccatcttccgctccgacgatcccggggactttccaaggttgtggatggtggaagagctatctgtgtacaatggaaccaacgaggagttgcccatattactcgcgattttgggctcagtgtttgatgtcacgaaagggaggtcacattatggtcctggaggaggttatcatcactttgctgggagggatgcatcacgagcatttgtttctggaaattttacaggtgatggtctgactgattctttacagggtttatcaagtagtgaggtaaacagcgtagttgattggaggaaattttacttcgaaagatacatatttgctggtaaacttattggacgttactacgacagtgaaggaaatcctacgaaatatctgaagggtgtagaagtgaaggcaaagagaggtacacagcttcttgaaaaacagaagagtgatgaagctaaaatacctggctgcaattcaaaatggagccagcaagaaggtggtgaagtttggtgcgacgcgggctacccaagactggtgaggaggccaggcgacatagctctgaccggacaagttagccaaaggtgcgcttgtttccaggaaaacgagctcgacaaagccgggctagtggtgtacgaagggtgtgattacttgagccagtcttgcaaagtaaactaggctgtacatatctatccccttcccttcgtccacgaacctgtactcagcgcaaccagccacgcatcatgatgggctgggccttctgttccgtcccgcactcccgcatccatcctctcgaaacacctggtgctgcaacgtcgtgtttcagaagccaagatacgcgattgatttgattggaagatacgtgcaaccgaatcaaatgatggtaacactggcgctgccgccgtgcattattcgtgtagcgcaagatcgatcttaaaggctgtccgtgttattgtgttaatagccatggggccttggctgtcgatggatcgagtcgatgctgccttgcaagttgcaccgtcggcatcatctttcaagtctctttatcacactacatatttcaaactctgtattctacatgtatgccaatgaattgaagatggtggttctgaatgtct

SEQ ID NO: 27353 - DNA, 1847 bp, Zea Mays
ctgaaatcgtatatgaataatccttcaaaaggtggtttagaagcttcatagctgattacggcgtcccacttatggtgattgtgtggacaggattgtcgtatttacatccaggcaaggtgccttcaggagtccccaggaggctttcttctccacttccctgggagtcaagttcactgggacactggaccacagcaagggatttgttttctgtccctccagcatatatatttggagccattctgcctgcttttatggttgcaggactttacttctttgatcacagcgtagcttcacagttggcacagcaaaaagagtataatttgaagaagccttctgcctaccactatgacattttggtccttggattcgtggtcctgctctgcggtttgcttggtatccctccatctaatggagtgcttcctcagtctcccatgcacacaaaaagtcttgctgtccttaagaggcagttgctaagcaaaaagatggttgatactgccaaggagagcataggaggaagtgctaccagtttggaaatatatggcaagatggaagaagttttcatcaaaatggatagcgaacagaatactgattctgttgacagggagttgaagaacttcaaggatgctgttctgcaagaaggcgacgaagaagggagattggctagagaatttgaccctcgcaaacatatagaagcccacttgcctgtccgagtgaacgaacagagactgagcaatctgctgcagtccatactggttggtgggtgtgttggagctatgccagtcatcaggatgatacccacatcggtcctctggggttactttgcctacatggccatcgacagtctaccagggaatcagttctgggagaggatacagcttctgttcattacagaaagccgacgctacaaggttcttgaaggtccccatgcatcgtttgtggagtcagtggttcccaaaacagtaaccatcttcacgatcttccagttggtttacctcctaatatgcttcggcataacgtggataccgatagccgggatcctgttcccagtgcctttcttcctcatgatcgtcatcaggcagtatctcctcccaaaattttttgatcccgtcgtcttgagggagctcgatgcagctgagtacgaagaacttgacggggtcccccttgaacacaaactggaagatgaagcatctgaagtaggaagttgtcctagccgtcctgatgcggagatattggatgaactcacgaccaaccgcggagagctgaagcacagaagttctagcctgcgtgaagaaagaccaattcaagtgacagtgagcacgcatatggttgcttcaagtgcggttcagccaagcctgtgaagacggcgaagtgttctttttatccgtagaattatgatcctcaagctgcactccgttgatgtgaatactgttgctatgtaatgtactgctactactagtgttgtacttgggtttttgacccaaacgcgtctgttggtaaggggtgatttgtaagaacagggacttacgtaaactacgtaggatcgattggtaagaagagagggagagaggagatgcaatacaagtcttcttggatatgaaagggggaatgccgaaggggcatggagtagaataatatcatatattgtcattagttcaaatagactgtagtaaccaagtttgcactctttgactgcaatcgcgtcagtgaagctgacggtgaacggttgattttttgtgaacaaaaagtacgaaagcagagcaggccgcagcaacggcacggcgtaggcgtcactgcacgcagcagcggtaacgctgcccatgtcgcgtgagtgagtgacacgttgtacg

SEQ ID NO: 27354 - DNA, 1190 bp, Zea Mays
ctataaatgggctcactctatggaaaaatgattttgagagatcttattagtgaacatggtcgatcgctaagtcagtggatccatctaggtggtgttaaagctttccttgatgggtctctgggttcttcaagcgcgttgttccatgagccttatgagggtgatccggataattatggtctccaaatgacagatttagacagcctacttaatagaacactagaatctgacaaatctggactccaggttgccatacatgcaattggggataaagctaatgacatactactggatatggttgacaagattgttgatttaaatggagcgaaggaccgtagattccggatcgaacatgcccaacatctggctccaggtgcagcaaaccgctttggcaagcatggtaccattgcatccgtgcagccagatcatctactagatgatgccgaccatgcttggagcaagattggggtggaaaggtctgagcgaagctcctacacatttcgatcactgttagatggcggtgcgcagctagcttttggttctgactggcctatttcagacatcaaccccttgcaagctatccgatccgcagtgttccgcaagcctcctggatgggaggtcccctggatccctgcggagcgcttgaccctggatgaatcactgaaagcgcacacgatgtctgctgcctacgcctgcttcctggaccacgccgtgggcagcctttctgaagggaaatacgccgattttgtggtggtaccttctacatcgtgggacgaattctccagcgatttgccggggcatgtcctggcgacgtacgtgagcggcaggcaagcttatccatgacagatagcagttgtgtaagtgttggagaccaaaaagagcagcgcggacagtccggccctgaggccggaaggccggacgatccgcggtccggacagtccgcggtgatggcgcggacggtctgcgcgtgcgcagagtcagttaggatttctagtttctcgcgggatttgttacctaaaaccgcgggattaactcggaaatctgttggaagcggatccagacctcccctttatatcgatgaagggctacggccgattgaactccccaacaatcgaacaaatcaagtctatttctcgtttttaccttacgcattaggaatagttctagtctagttctagtttagcctctcaatc

SEQ ID NO: 27355 - DNA, 3345 bp, Zea Mays
tccaacgactacacaatctcgttccgtcaatcctactaacctcgtgaaaccttctccttcctcctccccgctcgtcgtcttctcccccccgtcagagcgagactgcgagagacagcgcgaaggtagagagagtgtgtggaacagtggaagcagcagcaaacgcgaccatggcgggtggcgccggcgggcgggacccgctcgtcgcctccgagatccacggcttcctcacctgcgcagacttgaactttgacaagctgatgatggaggctgggacacgctggttccggccgaatgagatctatgcggtgctggcgaactatgcaaggttcaaggtccatgctcagcccatcgacaaaccaattagtggtactgttgttctatatgatcgtaaagttgtccggaacttccgtaaagatggccataactggaagaaaaagaaagatggcaagactgtccaagaagcccatgaaaaactaaagattggtaatgaagaaaaggttcatgtgtattatgctcgaggagaggatgatccaaatttctttcgcagatgctactggctacttgacaaagagttggagcgcattgtcctcgtgcattatcgtcaaacatctgaggaaagtgccttaccaccttcgcatgtagaagctgaagttgcagaagtgcctcggatcaatatgattcattacacctcctcaacagattcagcctctgctcatactgagctatcttcttctgctgctgctgcaccagaagatatcaactcaaatggtggtggggcggtttctagtgaaaccgacaatcaaggttctagcctggaatcattttgggtagatctattggagtcatctatgaaaaatgatactcctgttgatgcttctgcttgcggtggatctttggtatcaaatcagcagactaataatgggatgggagattctggaaataatatcttgtatattaatgccacaagtaatgctatcttttctccaccaactaatgtggtttcagaagcttatgctaatcctggccttagtcaagtatcagagagttactttggatctctgaaagatcaagcaaaccatgctccatctcttttaacatcagatctggattcacaatcaaagcaacatacaaattctttgatgaaaactccggtgtctgataacatgccaaatgatgtacctgctaggcagaacagtcttgggttatggaaatacttggatgatgatattagtttagatgataatccaagctcgggcatactccccactgaacaggtgactggcgaaataccctttcagatcactgagatatcctcagaatgggcttattgtactgaggacacaaaggtccttgtggttggatgtttccatgagaactacagacatctggctgggaccaatctcttctgtgtcattggtgaccagtgtgttgatgcaaatattgttcaaactggcgtttaccgtttcattgctagaccacatgctcctggacgagtcaatctttatttgactttggatgggaaaacaccaatcagtgaggttttgagttttcactatcgtatggtgcctgacagtcaaaacttggctgaggatgagccccaaaagtcaaagcttcagatgcagatgagactagctcgattgttgttcaccacaaacaagaaaaagatagcacccaagttacttgtagaaggaagcaaggtttccaatctcttatcagcatcgacagagaaggaatggatggatctgtcaaaatttgttactgattctaaaggcacttatgttccggccactgagggattgcttgaactagtactgcgtaatagattgcaagagtggcttgttgaaaaattaattgaaggccacaagtcgactggccgcgatgatctaggacaagggcctatccatctgtgttcttgcttgggctatacttgggccattcacttattttctttgtcaggattctccttggatttccgtgattcttctggttggacagctttgcattgggccgcatactgtggaagggaaaaaatggttgctgctcttttgtctgctggagcaaatccaagcttggttacagatcctactcatgatgtccctggtggacaaactgctggtgatctggctgctggacaaggttatcatggcttagctgcatatctttctgagaaagggctgactgctcattttgaggctatgtcactgtccaagggtaagcgatcaacatcaaggacagagtcactaaaacggaataccaaggaatttgaaaaccttagtgaacaagaattgtgcttacgagaatctttagcagcctaccgcaatgctgctgatgctgctagcaacatacaagccgcactcagggagcgaactcttaagcttcaaacaaaagcaattcagttggccaatcccgagaatgatgcatctgcaatagttgctgctatgaggattcagcacgcataccggaactacaacagaaagaaaatgatgagagctgctgcaagaatacagagtcatttccgaacatggcagattaggaggaacttcatgaacatgcgaagacaagctatcaaaatacaagctgcatacagaggtcaccaagtgagaaggcagtaccgcaaggtattatggtccgttggagtagtggaaaaagctatcttgcggtggaggaagaagagaaaaggcctgcgtggcattgcaactggaatgccagtagcaatggccacagacgcagaagcagcaagcactgcagaggaggactactaccaggttggtcggcaacaagccgaggacaggttcaatagatcagtggtacgtgtccaagctttgttccgttctcatcgggcgcagcaggagtaccggaggatgaaggttgctcatgaggaggccaaggtggagttcggtcgaaagtagttaagacgggcatagattcaagatctgaagtgacttgttgttccttgtagggggttggctagttcttctagttctttgtatatccgaaggaacaggcgtagcttgcggatgacgtacattctaggaacatctgacgctcgtagtcagtctgccaactgccgttaggcttcttctgtggtgtgtatttggctgggttttagttgggcgaaaacggcattgtgctttattaggtttgatttgtatggacggacgcgagtacgaataaggttgtaaatgctgataataatttcacctgactataaatccaggtggattgcaggcaccatttgttttttttctttatttgatgttttttccttggcagtaccgctacgtacaaccattatacgtcttgcttttgtgataattcactccagcacatttgctagagttcttg

SEQ ID NO: 27356 - DNA, 663 bp, Zea Mays
acccatctgcccggtcgccgaaacctagctcctctcaaagtctcgattctcctcgctcctcggccctcgcccacctctcgctagtcgctccccacttcccagtctctgtggccggacgccgcggcgagatggcctcgacctgcttccgcgccgccgcccgcgtggcctccgccgccagtcgctcggcggcggcctaccgctccgctccctccgcggcacgcgccgtggcaactgccgcccaccgcatatcgtgcttctccagggtgccggtggagctcgggtgctgcgcgggattgtcactgctgccgctgcacagtgcggtggcgtcagccaggctgacgtcgcggctgagcacggcgtcgagctgccgtgctctctctcagcgcgctgctgcaggcacatgactttgatagttcttgaaagatattactgggagcttgctgttttgcctcatacaatcatgaagaatgagtactttaacactgaaattgtactggaagactagagttatgttatttacctagaatggctagctacctctgttgaggaataccttgatgcaataatgtggcatcctttttcaacgttttccacattaattgattgtttacttgactcaatatgtctgtttacagtgcttaaattattatttatgcaagtctg

SEQ ID NO: 27357 - DNA, 1627 bp, Zea Mays
tctcaatccgcctcgcccgcagcgcccccccccccacttcctttccctctctcacggcggcggcgagatgaaggtaacggtaatgaccggcgacgagcagatcgtcaccctcgacgtcgaccgcgacgaatccgtggaaaatctcaaggcgctactcgaagtggagactcgggtgccgctgcggcagcagcagattcacttcaatgggaaggagatgcagaacacggagaagctcagcgccgctggggtccaggacggcgaccttgtcatgatgttttccaccagcgaaaggccatctcaggatggcttaagggtaaatcctgatggaactgctgtgaatcctcaagcttttcaacaacatgctcgaggtgattcacaacttatggcacagctccttcagaatgatcctcaactagcacaagctatccttggggatgacaccactgagctacagaatatcctgcggtcccgccaccaacaaagaacagaactaaaacgtaaacaagaagaagagcttgctttattgtatgctgatccttttgatgtggaagcccagaagaaaattgaagctgcaatccggcagaaaggcatagatgaaaattgggaggctgcattagagcacaatcctgaagcatttgcccgagtggtaatgctatatgtggatatggaggtcaatggtgtacctttgaaggcttttgttgacagcggagcgcaatcgactatcatatcaaaaagttgcgctgaacgttgcgggttgctgaggcttcttgatcagcggttccgagggattgctgttggagtcggtcaatcagagatactaggaagaatacatgtagccccaataaagattgggaatatattctatccttgttctttcaccgtattggatgctcctaatatggaattcctattcggacttgacatgctgcgaaagcatcagtgcatgattgacctaaaggacaatgttctcagagtgggaggtggcgaagtttcagtgcccttcttacaagagaaagacatccctgcacacatacgcaatgaagagaaactgtctaagttagggtctctcagccaagcaactggagagtcatcaaggacacgtgagggtactcccaatgcgctacaacaaacccctccagtaaccgtgaactaacttcaaatccactaccattcatttactcgcaggagctccagctgcaaaccctccacagggaggagattttgaagcgaaagtcacgaagcttgtggagctcggttttgacagggcgtcggtgacacaagcgctcaagttgttcaacgggaatgaggagcaagctgctgcgttcttgtttggtggttagactggtgggagcagccgttcctggctttgtgttcgctcaaccctttccagggttgagtacttgaatatttgatacgaaagtgattaaagtatttggatactgtttgtccagtgaaaggacttacttttagaggttttatgttttctcttgtttctgagaacaaacatttgttttctgtacctgatacatagactgatagacaccagaatggagacagaactgtgaagatttttttttattaagagtgtttatttgagccagcgaaagtgcgactagccgagtttgtt

SEQ ID NO: 27358 - DNA, 1718 bp, Zea Mays
cactcttcacttcgcccaatttctctcccaccctcctgctcctcctcccgcggtcccgccatttcgtcccccgctcaccaactcaaaccccctccgctctcaaaccctaaccctagccctagcccgctcccggcggaccgacgatgccgaaggcaggcggcggggcggcggacgaagaggagttccgcgccgaggtggaggagcgcctcatcaacgaggagtacaagatctggaagaagaacacacccttcctctacgacctcgtcatcacccacgcgctcgaatggccctcccttaccgtgcagtggctccccgaccgcaccgagccgccggggaaggaccactccgtccagaagatgatccttggcacgcacacctctgacaacgagcccaactacctcatgctcgcgcaggtccagctgcccctcgacgacgccgaggccgacgcccgccactacgacgatgaccacgccgacatcggtgggtttggcgccgcctccggcaaggtgcaaattgttcagcagataaatcatgatggagaggtcaatcgagctcgctatatgccccaaaattcatttataattgctattaagacagttagcgcagaagtatatgtttttgactatagcaagcacccatctaagcctccactagatggtgcatgcaaccggtggtttacggctgaagggacataattctgaaggatatggcttatcatggagtatttttaaagagggacatttgttaagtgggtctgacgatgctcaaatttgcttgtgggacattaaagcaaatagtagaaacaaaagtcttgacgccttgcagatttttaagcatcatgatggtgtcgttgaagatgttgcttggcacttgaggcatgagtacttatttgggtcagttggtgacgattatcatcttttgatttgggacctgcggtctcccgcccctactaaacctgttcagtcagtggtggcgcaccagggtgaactgcctggcttttaacccgttcaatgaatgggttgttgcaactggttctactgacaagactgtcaaattatttgatcttaggaagattgatacttctctgcacacctttgactgtcacaaagaggaagtttttcaagttggatggagtccaaagaatgaaactgtacttgcatcctgttgtctgggcagaaggctcatggtctgggatctaagcaggatcgaccaagaacaaacaccagaggatgctgaagatggtcctccagagctcatgttcatccatggaggccataccagcaagatctctgatttctcctggaacccctgcgaggactgggtggttgctagcgtcgctgaggacaacatcctccagatatggcagatggctgagaacatctaccatgacgaagatgatctgccaattagcgatgagccggcaaaaacttcttgaagcaacacatcacaaaaggaatcttaactcctatcgactgttggtgctcctagatcggaaccctgctcgccggagaatcttaaccgagtgagagttggctgtaggttgcttccgtggtcgtaactttatgcttgacgggttggtcgtttcttcgaccgtctgtatgtgtattcgtcgaacctttagcattatacatatgctgattgactagatctgttcgtcgcagttgtgttttgtagtattgctttatatctagcaggatcatgctcgtgatgtgatttgt

SEQ ID NO: 27359 - DNA, 4515 bp, Zea Mays
tccactccactccactcccgttcccctcccaattcccaaaggccaaagccctcctctgctccgctctgttccgctctgctccgaccaaatgcgcgattagagccgcccgcgagatcgatccccgcgcggccaaggatcatcggccgccatggcgtcctcgcaaggggagtcggtacccccgtggctcaagtctctccctctggcgcccgagttccgccccaccgtggccgagttcgccgaccccatcgcctacctcctcaagatcgagcctgccgcggcgccattcggcatctgcaagatcgtgccaccgctcccgccgccgcccaagcggaccacgctcggtaacctctcccgctccttcgccgcgctccacccggacgatcccaccccgacattccccacccggcaccagcagctgggcatctgcccgcgccgcccccgccccgcgctcaagcccgtgtggctctctccccaccgctacacgctccccaagttcgaggccaaggccggcgcctcccggaaggcgctgctcgcgcgcctcaatgtccccgcctccaagcagctctcgccgctcgacgtcgaggcgctcttctggcgctcatcggccgaccgccccgtcgtcgtggagtacgccagcgacatgcctggctccgggttcgcgccctgcgccgcacgcctgacgcagctgcccccggcgaacgtgggcgagacggcgtggaacatgcgccgtgtggccaggagccccgcgtctctgctgcgcttcgtgcgggaggaggtgcccggggtcacgtcgccgatgctctacgtcggcatgatgttcagttggttcgcctggcacgtcgaggaccatgacctgcacagcctcaactacatgcattacggggctcccaagacgtggtacggggtgccgcgcgacgctgcactcgccttcgtggaggtggttcgcgtccatgggtatggcggggaggtgaactccttagaaaccttcgcgatgctgggtgataagacgacagtgatgtcccctgaagtgctcgtggattcagggattccctgctgcagattagttcagagtgcaggggagttcgtggttactttccccggagcatatcacagcgggttcagtcatgggttcaattgtggggaagcgtcaaatatagccactcctgaatggttgatagttgcgaaagaggcagcagtccggagagcttccatcaatcgtcctcccatggtttcacactgtcagttgctctatgaacttgcgttgtcattgtgcttgagggatccatcaaatgacgttatggaaccacgaagctgtagattgaaggagaagaagaaaagtgaaggggaccaattgatcaaaaagatttttgtgcaaaatgttattgaagacaataaactgcttggtcattttctgagtgatgggtctccttgcattattcttccagtcaattacaatgatggctctccactatcaactttgctctcaaaatttcagtcaacaactgattcaaggatatcgcatggccagtgcagtaaggcagaagctccaaaagactccagacgcttaccaatggatggggctgacaagaaccgggaattgtcatcatccaacaaaaattcattgtcagccttctcaggaaagacagtcccactcccacctagaatctgcatacatgaatgtgcaaatgtgactggggcatcacacgcacataatgcagaaaatgacaaggtggatatgaacagtgctgctgggcttttagaccagggtttattatcctgtgtcacctgtgggattttgagtttttcatgtgtggcagtgatcaaaccaagggagtgtgcagcaaaatggttgatggctgctgattctagtttgatcaacgatcggcttgctagttctggagaacatgatatagatgcattacaaggtgggaggacaactggtggaattttacgatcagattctgaaatgaatggcaatagtatagtttctgatgctgatgctgcacctctcaatgggcattctgctcttgatcttttggcattagcttatggagatccatcagattctgatgaagatgttatgaacataaaaaatcaggtccctaatgtctccaatgaattaataaatcacacgattgaatcacaaccatatacttcatgtaatggtgattatgatggaacaaaagtgtcctcaagtagtaaagaacgcgaacaaggaccaacttcccatagctcaaagtgtattggtaactcaaacaccttgaatggaccaaaaggtgttcgcactagaaataaggatctacttaagatggtgctttccgaaggttttcaaccaaaaggtatatgttcagaaacgcataagaaggttcagtgtgagccatcaagctcaaaaaagacttcaatggagatcccttgtggcacagattatcatgttagccataacagtggtacaatctgtatggacagcagcagaggctctacaactacaactatggtgaacaacttagttacatcagttgtgaaacctgataaggattcatcaagaatgcatgtattttgtcttgaacatgctattgaggttgagaagcaacttcaagctattggtggtgctgatatttttcttttatgccgtccggaatatcccagaatagaagtagaagcaaaattgctggctggagaaatggatttcgagtatgattggaaggatattctttttaaagaggtcactatcaaggatagggagaagatacaggaagttgtgcgggatgaggaagcaataccaacaaatagtgattgggctgtaaaactgggcattaatctgtactatagtgctaatcttgctaagtctcctttatacagtaagcaagttccatacaatagagttatctatgaggcatttggctgcggttctcccaatgactcaccagtgaagctgaagacttattccagaaggcaatgcagggcgaagaaaatagtcttggctggcaggtggtgtggaaaagtatggatgtcaaaccaggttcatccatacctggctgacagaatcaaaaatcatgagccgaaagaaatcgatgaaacatttccttctgatcagaaatcccatgctgaacctgttgaaaattcaagtagagaggcagcctccacaagaaagagtagcagcagaacaattgaaggaaaaacaagcaagagggagaaagaacagttggagaaagctaatgccaagaagccaaaatttactgaagaggacaactccaaatcattggagggtactgctgaagcctccacacagaagataaagggcagatcagttctagaaaaaacaagcaagaaggagaaagcgtataccaagaagctaaagcatactgaaaaggtctcggaagcactaaaaggtccttcagaagcctccttccctgcaccagctgggatggtagtccgcagcagctctaggatcgccaataggaaaatcatgttgaaatcaaagatggaagaagaggataatggctcagctgaccgtccaaagtcaaaggtcgaagacgacaaagataatcctgctggccgttcaagagcaaaaccactaaggcaaaagactaaagtagacgcgaagaagaaaacgaaggaaactagagtagaaaagcgaaaggctcccagtccagcttctcagaaggacgaagaggagcaatcagatgatgtcgagggacgttctaccactaaacaacggctgtctttacgtaagaagggggctaaaacagaaggaaaacagcgaatggagaaacccagattcgggggaagtgctcctcccccaagctctccgaagcgcaaggaagagtacgtgtgcgacatcgaaggctgctccatgagtttcggcacagagcaggcgctgtccctgcacaagaacgacatctgcccggagaagggctgctgcaggaagttcttctcgcacaagtacctgcagcagcaccgcaaggtccacgccgacgaccggccgctgaagtgcccgtgggagggctgcggcatggcgttcaagtggccgtgggccaggacggagcacgtgagggtccacacgggggacaggccctacgtctgcctcgagcccgggtgcggccagacgttcaggttcgtctccgatttcagccgccacaagcgcaggacgggccatggcgcgtccaagaaggcgaaagcgaagaagcaaggcaaagcagcagtaacttagtactagtagtttagcacccaaaaccaatggcgcccttctgaaatgagtagccttggaagggacaggaggaaaacttgtagattccattagcagtttagcacccaaaaccaatggtggtctctgctcacagttccattaattgctagttgaacgggttcgttggagcccacaattaggttggttccctgtgagtaatttgggtaatcattaagacattctcgtacagtttgccttttgcctatcgttcgtttatcttttgctggatgatgtcttgcttatggtaagcacctgtctagctccttttg

SEQ ID NO: 27360 - DNA, 1557 bp, Zea Mays
aggctgtagtgctggtggtctgttggtgggtgccgtcattaatatgcttccagacttattttctgctgcagttctcaaggtcccctttcttgatatctgcaacacaatgttggatcctactttacctctcactgtcttggactatgaagaatttggtgaccctaatagcccagatgagtttgaggcgatcagcagttattctccttatgataacttagcacctgatgtgtgctatcctccagtcctggtgactgcctcgtttaatgatacaagggtaggagtttgggaagctgctaagtgggttgcaaaagtaagagatgtcgcgtgcccatcctgttcccagtcagttattctcaaaactaatatgcaaagtggccattttggtgagggtgggcgtttcacgcactgtgatgaaacagcctttgagtatgcatttctcatgaaggccttgggtttggatgacgtagctatgatgtagcgtactcatgcctgaggattttcacggaacagatttttttgtggctctggaagcaaaaactgagataattaccttttgtgatatgctcagggataagattgtatcctcataattattgattaaaagagctcgcaatggaaggtgatgcacccttgaggtgtgttctgtttggcattggcttttaatagtcaagctgtggatttctacatgcatattatcaacttatgctttcaaaaatagcacacttggatgctgctcatcaacagtgcaaaggtgaagcgtttagcacttaagttcagtaaccaggagtacttgatgtaattgcattattaatacaaataagtcttttacaacagtagtaaatgaggtatctaacataccgatcatctaggaattgttcagtgacaatatgaattgattttgtacgtctcttgcatgaaagtggtctctttttttcttttttttttttgctgtggaaacaaaccatcttgaatcatgatcaaatatgtcggaaaaaaaagaatcataatcaaataagtctgactttatcatggctttcaatgttttttcccctgagtacgcaggtggcagatgagatccttattatggtgttcgatatggggcttttgaccaaaggataaatggttgatcatggatgttgattttgacttctacttcatacggcaggttggtgcatgttgctttcttctctttgggtcatctggcagatgatgtactctttttacgccatccttaaattaagctcaggttccatgtcacatccttgtgctcatttttttagcgtaatcgtaatcgtcctcggccggtcggccccttgctatgcccacacatactcctatgttcagtgcaacactacaaattaaatgatggcttgctagaacttattgagcacatttctccgagcttatcctaggcaccctttccttccttttttttcgaggatcctagtcaccgtctgtatgtatacttgtgcccactttgcttagtgcagcaatgcaaagtaaatgatgactgtttgaaacgtaccgagcacatttctctctgggctatcctatttt

SEQ ID NO: 27361 - DNA, 1694 bp, Zea Mays
atggccgaactcgcccatgatggctttcccctgtcgatgctgttctctagccgccatggcagtgcctccctgcagcagtccggtgaccgggccctccccttcccacgtcatgttggtgccatgtcttctccctcaccggccaacctcgccagccaccaggaaggtgtctccctctcggcagctcccatggccaccatcagccctagctgcggttgccctggttccagcagctcgacgccagcccctctcaatcttccatcgttgccgctcagcttgtcccagatatattatcatttagctcaaatccgaatggctgacattctgtctccatcgatatttaatagtaaagcaaggttgtcacgtgattcaagagtattaatgatatacaaaagtttgctttatggcaagtcaggtaaccacaaattttgggcaatgacagggatgtgcagtggtggtctcttaaaagaattttgtgttccagcgtagctatttccactgcaaactatcaaatcattacaaactgctgggaacatgctccatcttattatcgaagcctgtatctcgagaaagttgatcgatacatctgcttatttatggcctggttatgttgtaccatctgggactttaaaagatacagctttgccccaagaatccccttggttaaactttatgaaagggtctcgacattcaggaccccttattgatgctctggtcgcatctcctgcttcaagttcaagctctgcaagatgaggtctgttcagtttggccaaaaaggcatcccctacctgaacacctacgacggctgcaccatcctctaccccgacccgctcatcaaggccaacgacaccatcaagatcgatctagagaccaacaagatcatggacttcttcaagtttgacgtcagcaacgtggtcatggtgaccggcgggaggaacaccgggcgtgtaggagtgatcaagaactgggagaagcacaagggcagcttcgagcagctggctggccccgacgcagcgcagcacgcaagagctagcggcgccggcgcggccggtgaaactgaaatccagacgcaccgctcacgcagctttgccaggcaaggcccagcagcgcagccagcagaaccaccagaggaccttcagggcgaagaagagcctgtcgtcgcccgggaacaaggcaggaacggtacgcaactgaggaggcacattgacgccactctcggcagcggcaacctgcgagaggctgtccgtctacccgtcggggaggacctcaacgagtggctggctgtcaacactgttgacttcttcaaccacataaacgttctgtacagcacgctggcggagttctgcactccacatacctgcccggtacgagtacaggtgggccgacggagagccaaggtcaaggtgcccatcaaggtgtccgcgcccaagtacgtggactacctcatggactggatagagatccagctggacgacgaggccattttccctcaacagcttggggctcctttccctaccaacttccgcgacgtcgtcgtcaagacgatcttcaggcgcctcttcagggtgtacgcgcacatataccactcccacttccagatgatcgtcaagctcaaggaggaggcgcatctcaacacttgcttcaagcactttgcgctcttcacgctgtttttcaagcctgacaagcgccccggatga

SEQ ID NO: 27362 - DNA, 1496 bp, Zea Mays
tcttccttcccaatggtatctttggactgatggaatattaccggttctattcgtacttggaaaactacatcatctcggttgaacgaatcaagcagtatatgcacctcccagtggagccacctgccattataccagatagtagacctccaacttcgtggccgcaggagggaaggatagacctgcaagatttgaaggtaagatgtttgttttccacagtatcctagaagctttctaagaaattgactcgctgtcatgtactccatgagcagataagataccgtccaaatgcgccgcttgtcctcaaaggaatcacttgcacttttgctgctgggaacaagattggggttgtagggaggacaggaagtggaaaatcaacacttatcagctcattgttccgtctcgttgatccggcgggtgggaggatacttattgacaagttggatatttgctccattggccttaaggatctaagaactaaactaagtattatccctcaagaacctacacttttcaggggaaccgtgcgcaacaatttggatccccttggccagcattctgatgaagagatatgggaggccttggagaagtgtcaactgaagacagcaatcagcaccacctctgctcttctggatacagttgtgagtgatgatggcgataactggagtgctggacagcgtcagctcttctgtcttggcagagttctcctacgcaggaacaaaattctagttctagacgaggcaacagcatccatcgactctgcaacagatgcaatcctgcagaaagtaatcaggcagcagttctcaagttgcacggttataaccatagctcacagggtaccaactgtgacagacagtgacaaggtcatggtcctgtcctacgcttctagaatatgaaacaccagccaagctgttggaagacaaacaatcagcatttgctaaacttgtggctgagtattgggctaataccaagagaaattcaacatgatctaccattattgcaggacatgataaaagatatgatcattttaatcaagatatcgaaagattcaagggttctcaaattgaatctttaacaagacaaggaatgccatcatgattatttgattgatgtggttactgggagtgaataagatatcaacagaaattcaattttggtaatggaagcaatttttggagtgagggctgatgttcgagagaactccagctggttgattgaacatgtggtattcaatgcaaaatgaaatggaggatccacttctagcatgatcaatggcatttttcatacataagcctttttgaataagagaagcgaagtaccaagtcgtgaattgcaatgaagaatgagtaaagtgcagtgctgagaagaataattttcatgtatcttgtgtactcaataatgataaactttatatgactgagaaggaaactgtcgcaaattgtcaaagtgattattcaatagattagggctaacccaacaggttagctatatagtgtttt

SEQ ID NO: 27363 - DNA, 2623 bp, Zea Mays
ctgcattcatcactccagcttgcttcttcccagctgcagaccaaaccaaaagaccgttccttgaacgccgtgtccaactccacctccctcttttaaaatcccacacccaaccggcaaccgcacaccaaaaagcctaccctaccactccgaccgacagacgacgagcgagcgcagcccaagcccaagcaagcagggcacggccatgcccgtggcccaatcctaggcgtccatttcgtattccacggccggcgaagcagcagcagcagcagcagccatggtggccggcagggtcaaggcggccatgggcttccagcggagcccggccacgcccaagcccggggcctcctcctcctcctcctcctcgcgcaaggcgccgccgccgctgcagctgcccgggtcggccgcgctgccggagacgccgcgccggaggtcctcgggctctccggcgccgccaggctccgggtccaagggcggcggcggcccattctcgcgctacttcccgcggtcgtccgcgcaggtgcagccggcgcgcgcgtcgggccagcccgagccgccgccgccgccgccgccgccgccgtcgtgcccgggccccgccgccgccgctgacctcgcccgcctcgtcgaggagctccgggagcgcgagtcccgcctccgcaccgagctgctggagcacaagatcctcaaggagaccgtcgccatcgtgccgttcctcgagaccgagctcgccgccaagagcagcgacctcggccgctgccgcgacgcgctgtcgcgcctcgaggccgagaacgcaagcctccgcgccgagctccacgccgccaggggcagccagcagagggtggttcagctggagaaggagctggcggaggtgaagaggcaccgtcgccgggactccggccccgatgccgaccgtcacgatgatgactgctcgtcgtcggtgtcgtcgcacaactccgactccgatcgctccaatgcgccgaccaacgcggtcgtgcccgggctgttgatcgtccctcctcctgctcctcctcctcctcccccgccgccgccgccgccttcttacaagtccaggtcctacttctctgcctcgtcgcgcgcatcgccggccaactcctcctcgtccagctccacctcgtccgcgccatcgacgccaacctactcttcagacaccgcggcgtcgcgaaaccgcgtgccggagctctcccagctcccgccgatacccgccccacccccgccgccgcccccacccccgccaccggcaatgccggcgcgcggacgccgcagcgcgtgctcgtcaccttcgacctcgagcggcagcagcggcggcggctgcggcagaggctcggggcctcctgcgccgccgccgccgcctccgcctgcggcgaggaggagctccagagcttcgtcccctgcggcttcgggaacggccccggcgcccgccccctgcgtcaggcgagtccccgaggtggtggaattctaccactcgctaatgcggagggactccaggtctagggacgccgccgctgccgccgaagctggcgccagtgggggtgccgccgccgcgagggatatgatcggcgagatcgagaaccgctcttctcatcttctcgcgatcaaatcagacgtggagaggcagggcgacttcatccggttcctgatcaaggaggtgcagggcgcggcgttcgtcgacatcgaggacgtggtcacctttgtcaagtggctggacgtcgagctctcacgtctggtggacgagagggcggtgctgaagcacttcgactggccggaggggaaggcggacgcgctgcgtgaggccgcgttcgggtaccgcgacctgaagaaggtcgagtcggaggcgtcgtccttctgcgatgacccccggcagccctgctcttctgctctcaagaagatgcaggccgtcttcgagaagttagagcatggagtgtacagccttgtgcgtgtgcgagacggcgcaatgagccggtaccgtgggtatcagatcccatgggagtggatgcaggacactggaattgttagtcagatcaaactgcaatcagtgaagctggcaatgaagtacctgaggagggtttcctcagagattcaggccatacaggtcggccctgacgaagaggagctggtgcttcaaggagtccgatttgccttcagagtgcaccaggcggtttcgacgtcgatacgatgcgcgcctttcaggagttgaaggagacggcgtcagcctttcagcagtggggaggccaaaaccaacacctgcatcagcaaaggctcgctggcagaagttgagacgcatgtatttatagcaatccgttactacaggatagtggaagcatctatttacctggccaaatgctccactccttttctttttttttaaccttcccgtcaagaagctatatttcgacagattctttattatttttaatatgcataagagcatgcagaaagacgcttagcgtgtcaataccttgcgtgtgggctatcatttacacgctcctatgagtgattaactcgcatccatcgatggacatttctctcttcttacgttctcgcctcaagacaaggattttacaggtgcgaaaacacccgtgtctgcttgtcgtgattgatttttttt

SEQ ID NO: 27364 - DNA, 1284 bp, Zea Mays
gccactgttccagagtgcccagtggtgccgcctgccgcggtagtacaaactacaaaggcaaaggggactcccccgcgtccgcttccctcgcccccccagtccccagacatggcgccctgcgcgtccccgtccgccctcgcgctctccgccagcacgcgggtcagcatcctccggctcccgctggcgctgcggcagcgggcggaggcgcgcgtgcccggcgcccagttccgcccgtcgaccgcgtgctcctgggcgcgccccttgctgcccgagctcgcgggggcggtccctcgtgccggcgcccgcggcactggcaggaggacgcagccgctgttccggcctcgcgcattgacgacgacgtctcagattgccagctgcgccttcaccctgggcacggtcgccgtcctccccttctacaccctcatggtcgtcgcccccaacgccgacatcaccaaacgcaccgtggagagcggcgctccctacgtcgccctgggcctcctctacgcctacctgctctacctgtcctggacccccgacaccctgcgcgccatgttcgctagcaagtactggctccctgagttggcgggcatcgtgaggatgttcgcgagcgagatgaccgtcgcctccgcgtggatccacctcctagcagtcgacctcttcgcggcaaggtcaggcaggtgtaccacgacggcctcaggaacaacgtcgagaccaggcactctgtctcgctgtgcctgctcttctgcccggttgggatcctggctcatgtgctgaccaaggtactggcaggggcagttgcccgctcacactgatgattgcaattgggtggttgtattgtatctaggattcttccattgttaccatgtggagatgtggattgagcggaattgatagggtttaccgtttgattcaccaaatgtaacgtaaatgataagagtaacgattcacactcgaataccggtggtaataaatttaaataaggcggtatccatttataatacggttggacttaaacaaacgttaaatcgttatactttggtaacgtaatggtaaccgataacgttaaatcatgtttgtttaagtccaaccggtatcgatatcatactacaaatgtataccgtcttatttaaatttattactaccagtattcgaaggtgaatcgttaccattactatttacgttacatttgatgaacaaaataaatcccaaacaagttaaattttttaactttttctaattctattcaatctatatgtaataggaataaccgaacgagccggtttt

SEQ ID NO: 27365 - DNA, 1527 bp, Zea Mays
ccaggcctcaactgcacgtctcccgctttgtgctattcccgcagccagaaaaccctaacttcccggccgccgctttcctttccctcgatccacagctcgcgccgttcctgcaagtgcgcacccatcgtcccacctacgcactgccgcccaacgatctacgagctgccatggctaactcggcaccgggaggaatgaggtcgttcctgcaggccgtgtctacggtcaccgaggaggcgccgacgccactccgcgtcgtccagatggagggcctggctgtactgaagatcatcaagcactgtgaggagtttgcgccagctttagttacaggtcaattgcttggtttggatgttggtagtgttctggaagtgaccaactgttttccgttccctatcagggaagaggatgatgaagcagatgcagatggtgccaattatcagcttgagatgatgaggtgtttgagggaagttaatgttgacaacaatactattggatggtatcagtcttgcttgcttggatcttttcaaactgtggaactgattgaaacatttatgaactatcaggagagcatcaggagatgtgtgtgcattgtctatgacccatctagatctagtcaaggcgtgctagctctcaaagccttaaagcttacagactcgtttatggatctttaccgtaacaatggtttaactggggagaagttaagggagaagaaattgtcctgggttgatatttttgaggagataccaataaaagtttccaactcagcgcttgtcagtgcctttatgaaggagctggaacctgagtcacctgttacccagtgtgacctggaccgacttaaattgtcaaccgccccctttatggaaaggaacttggaatttctgattgggtgcatggatgatctttcatcagagcagaacaagttccaatattataaccgcaatctctcaagacaacagtcacagcagcaggcatggcttcaaaagagaaggcaggagaacatggcgaggaaagcagctggtgaggagccactaccagaagaagatccatccaatcctatatttaagcctattcctgagccctcacgattggagggctatctagtaactaatcagatctccagttactgcaaccatatcaacggggttgctggtcagaatttcgacaggctatacctgatgaaggccttgcatgaggattagaagactgggctgtgatgaatgctgttagaattagcttgtgatactgctcaaaatcgtaattttgtgatgtacctttacatggggcgtgcctgtcctctacttaatgtttccatggaccagatggttagctcgtgatacttaatgtacttgcatatgtatgcgttgccgtataaaccaattttctccattagtatttttgtgacgctcagtttgaagtccatagtgtagcttgttttcgttctcgatttgggctgttgtcaaatggtaggtactgttggagttatctatctcgtcttatcagtttaaaggttttaggtttaacaggtagtgc

SEQ ID NO: 27366 - DNA, 556 bp, Zea Mays
ccggttggcacgtcattcgctcaccactcccaccgccaccggcctcaagccaacaccaccagtccacacatgcgcaggcgcacacgcacggccgttgagacttgagacagagacgcaggagcgcggaggaaaaggaggcccagaccaccgacggggaaaaaacatcacgaacaccgttctccatagcgggagtagtgaggaacgaaagagagggggcggcctagggcttcgattccgcagccatggacgccgctgacgtgtggggccgctcatcgtcctcgtcttcttcgtccgccgccgccgcgaggcgcctgcaggcgcgctacgatctgtacatggggatcgacgacgcggacgccggcttggacgaggtgacggagccgcgcggcggggcggagtcctacaactgccccttctgcggcgaggacttcgactttgtcggcctctgctgtcacatcgacgacgagcatgccgttgaggctaagagcgggggcatgatgaaatcagtgtttgctatttaacctccttcacaactaagatcatcctacataataga

SEQ ID NO: 27367 - DNA, 1152 bp, Zea Mays
ctggccttctctcctccccaaaatcaatccctcgcccacaaaggagagccagccaaaccttccacctcctccatttccagccccgtccccacaccagctcgcgtaacctcctccccatggctggaggcggcggcgcaggcgcgggctcgtcgtccggcggcggcggagggggcggcagggagggcgactgggactgcggcagctgcggcaaccgcaactacgccttccgctcgctttgcaaccgctgcaagcatccgcgcctcctcgtcgaccccaacaccccgcgcgactccaagtggctaccccgcgccggggactggatctgcaccggttgcagtaacaataattatgcatccagaaagaactgcaaaaagtgtggcttgcccaaggaggaagcagcaatgccagcattgcaaatggcagggatggctatgccagcttatgcaacttatattgcaagactacaaagccttgctgcttctgcttctgcctataacatgaactttgggatggctgccaattcacctttgcagcagcaactacttgcaaatgcaaactggccctatgggatggctggtagatatgggatgcaatcttctggttggccatttggcaacggcaacccaaatcagtttttaggtgttccaaaggattggcgtaatggagattggttctgcagctgtggatctcataactattcatctcgtactcagtgcaaagagtgtggtgcacctgtaccatcgagcattccctccacaacaatgaaagctacatctgatgcctcttccagtatttatgcaatgctgtacactgtgttaaacatctggcaagtggttcactggtggacgcatctccaggtccgagcgtaaaaatcttaagttttgagcataaaacccctcggttataagcgtaaataccgagccaatatgaggttcatatctatggtgggttgtattcacgatcctatttttatgttaattccgaaaaatatgggagtcacatccatggggtttatatttttatgcagatccaaaaattatggcagatttgtggtggtgtagtattgtatggttaagacttataagacttatgtatcgtgtggttgagagttgaaacttatttgtggatttgtgtcaattggcgcttaatctt

SEQ ID NO: 27368 - DNA, 1061 bp, Zea Mays
cgcggccgccgccgttcccgctcggtcccggggttccgtaggggcaggcgtcctatcttgccctagtggttaccttccaggggcaccgcgtgctggtggaggtctccaacggtagtgtccgtggaagacagttactcggcgccgtcatggcggcggccggtggcggaagggaagccaccacatccggctgtggtctcaagcgccgctacgcaccacacgaccaggaggaggagacgatgaatcaagatcagccttctaaggaagatcggtgtgggcgaatttggagtgggatcgacttgctcaaggacgtcactgaaaacaagcatgtcctacctactggacttgaaggcattgacagacttcttgggggcgggctgcgccaaggtcagctcacagaggttactggaccatcatcttctggtaaaacacaggtttgtctacattctgcttcacatgctccagtgaagcatacgggtgtggttatgtacttggatactagtaattctttctctcctagtcgtattgccaccataattgatggaactaacgacctatctgatcaaaaaggttttgacttgctgtctaaggagaggctcaagactgtgatgcaaagcatcatctgcgagtctgtgtttgatatatttggtatgtttgaagtactacatcaacttgaagtttctctactgaatgaaaaggtaataggtgatggcaggagaatttgcttacttataattgactcaatatcatccttacttgctcccattattggaggcaagtatccacaagggcgatcgatgatgatatcactggcgatgatcctaaagaagttagcctatgagcataatctagctgttctggtgaccaatcatatggtttcagctggcaatggtgctgtcaagcctgctcttggtgagagctggaaatctgttccacatgtccgcctgatgatatctcgtgaacatagtagtaatatctgcacgggaactgtgctgaagcacacactactgataaattgtcagggtgctaaaacacacaccatgagtattttcctggctatttgg

SEQ ID NO: 27369 - DNA, 2313 bp, Zea Mays
ttttttattgttctacgttataaactgtaatgttagtagagttagagtttaaataagacgagctggagatagttttacacattggaacgcgaacgctctcggatccatccacctccaaagtccaaaagcgaagcctacgcccgccccaacggtgaaaacgtcggaaccctagatccctctcacggtcgcgcctgtgctccaaaaccttagatccgacatgcatcagcccagagcccgctacccacccgggtatggctccagcgggggaggcggtggcgggggaggcggtagtggaggaggaagaggaggcagcggcggcggaggaaaccacaactactacggccggaacacacatccacagcatcaacaccactaccagcagcagcagcagcactcgcataggaactcctcgcaccagcagcagtggctgcggcgagaccagggccccgccgttgcggggccagtgtctggaaacgctgtgcctaagacggcgcctcagcttgacgctgttgactcgagttctcaagattggaaggctcaactaaatataccagctccagacacacgctacaggacagaggatgtcactgcaacaaaaggcaatgagtttgaggattatttcttgaaacgtgagttgcttatgggaatatatgagaagggatttgaaaggccatctcctattcaagaagaaagcattcctattgcgttgactggaagtgatattcttgcaagggcgaaaaatggcactggaaagactgctgccttttgcattccggcacttgaaaaaattgatcctgaaaataatgcaattcaagttgttatactagtaccaacaagggaactggctctgcaaacttcacaagtgtgtaaagagcttgggaaatacctaaacattgaagttatggttagcactggaggaaccagcttgaaggatgacatcatgcgtttataccaacctgttcatctactcgttgggactcctggccgaatacttgatcttaccaggaagggcatttgtgtgctgaaagattgttcaatgcttgtcatggatgaggcagacaagctattagctccagagtttcagccttctgtggaggcacttattcatttccttccacctagtcgacaactgttgatgttttcagcaacctttcctgtaactgtcaaggaattcaaagagaaatatctgcctagaccttatgtgattaatctaatggacgaactgaccctgaaaggaatcacacaatattatgcttttgttgaagaaaggcagaaagttcattgcctgaatacacttttctcaaagcttcaaattaatcaatccattatattctgcaactctgttaatagagttgagctgctggctaaaaaaataactgaactcggttattcatgcttctacattcatgctaagatgttgcaagaccacagaaatcgagtatttcatgattttcgtaatggtgcttgcagaaaccttgtgtgcacagatctgtttaccagaggaattgatattcaggctgttaatgtggttattaattttgacttccctaagacatctgagacatatttacacagggtgccttttttatcttttcttctctagttgtttgctttatgaccttcctgaatttcaaatttgtgtgctgtcatgttcctaggttggccgttctgggagatatggacaccttggtttagcagtgaacttgatcacttatgaggaccgtttcaacttgtataggattgagcaagagcttggaacagaaattaagacaatacccccgcagatcgacctggccgtatactgccaatgatgaatgcgacattcaggagcatcaaacacttctctttctatttgagaaacttatcaggcaaatacgtttgtacatagcaacccatcagatatcaaattctctcccattcttgtagggctttgttttggcaccttgatgacgtttgtaagcttacctggattagtagaggaagtgcttcctgtaggcactgatactaacccgtttagctgaggacatgcacgctgggctgcttggaggcccagaactatgatgagatgagacaatatcttacctcacttgacattttcactcgacttgtttgccagtctcagttctacttgacttgcctgttctcatttgattcatcttccgttttcttctttcctaatgttatgatgcatatggatgtctttctgtagctgtatgatgtgttgagtttattttttcttggtgtatgtatacagcttaacttgaaattatttccatatcaacttctttgcgagaattccgatcttgcatttta

SEQ ID NO: 27370 - DNA, 858 bp, Zea Mays
aacatagtgccatagtggacacgatattcacccatttcagccggcagctaggtatttcttttttcaacaagccagaccgccaggcgccagtagccattgagtccttgacccgaagtcccacagccgccgccaaaagggttcctcaccatcttgaacgctcgccggaccaatcccaagcagtcctcgcagcagatggcagttcccggcggccgcaacggactcagggacgaggacgacgacatggcccagcacgccgaggccttcggcggcgtctctgacgacgaggacgtgcccccccaccttcgcgccctcgccaacgccgcccagtccggcgacgtcaccgcccttgtggctgccctcgataatcatgatggcagtattgatgttccagttgaagatggtgatactttgctccatctggcatgcttatatggtcatcttccttgtgtgcagctattgctggaacgtggagctagcttggaatgccaagacgaagaaggtgctattcctcttcacgatgcttgtgctggaggcttcactgagctggtccaatatattctcaactttgctgccaacaaggatggttgcgtagtgagaatgctcaacactattgattctgaaggcgatacgccgctccatcatgctgctagaggagaacatttggatgttgtcaagcttcttctccaggctggggcgtcccccaagaaggagaacacttacgggcagacacccgctgatatggctgaccaagacaccgaagttcgaaccctgttgactgccaagcaaattgagggatgggagagaaggggtccacagctacgagacgatggttcgagaggagttgacggcgatggcggc

SEQ ID NO: 27371 - DNA, 1129 bp, Zea Mays
ctagtatgaaatcacggaagtagtgaatagtgactatactcatttttaaaattataaaattatacgcatattcaaagtattgttgcggggttcgattttggctacacgtatacatcgcatctctaaaatcaaacacgtgaatcgcatcgataataccacgataaatcataagatccataaagtaatttaaaacaagatttagaaaatacatcaacaatttggggttgccttcaaccttgagtttgctcatgtgcaggaggaagggcagggtggtctcggcagaggtgctgcgtggacggcgaggtacgctccggcgaggctccacgggtggtccgagcactgcagggcagtggatggtccagcgtcggcgaaggcgcggacgacggaacgtgctctactgcgagaaggaggaaggggcgaggtggctggggttgagtgcggatgacggggcacgagctccgacgagctacgtacgacggccgacgaacacgtccgggcgaggtagcgatggagaaaagcttggacaggggagggagaagacagaggagctcggcggattttatagagagagggagagagatgtagggtcggccggggtgcttcatggccaataatggcgtcgacatcaatggagagaggagtaatggcgccaataactcggagaaacgctcggttgacgctccattacacaggtgaggaacggacgcgcggcacttggggtcgcttggtcttctgttgttgctcgatggctcggcttcatggcagcgaggcacatgggcgcggggtcgggtgcacggcgtcgcactggttccttgcggcgcggtcagcgcggtcgaggttggccggctggcgcgtcgggggaagctgcaggggcgccgcggcggctcgaggtcctgggcgcagggtgtcgcgcccggctgctcggcgcggtcggggctggggcgctcggccggtgccctggcagcgcacctgggagagagaaacgagggggaggagagagaggagagagaggcggcggctggctgggagagggcgtgcgcggcaagctcaccagccagggagcggcggctgtgagaggagcaggggcggcgctaggtttaggtgttggggatgttgggccctggtgggc

SEQ ID NO: 27372 - DNA, 1015 bp, Zea Mays
tcaagttgctggagcgcatgcagattcgacaagaggtatacgaaatcttgagtgagctgtacgtccatttggaagtagcaaagaagcaactcctgatgatgcaactgtaaggacaatctttcttatagctctaagttcgaatatattggttcctgattattgtgtctcgtcatggatttattgcgttcattgaaccagaaaattgcatcgcagtgtctacatttgtattctagtttaccaagaagagaggtgttttgaaatagaagagagggtacatatttgagcatatgtagagcccaggtacctcgctctacaacatcaaggattatcttgtcattcataagagttaaaggccctttcttcagtctttcactattaagacacaatttcatgttgcaaagatcttcaatggatgatattgatgacgatatataagggatatcactcttgagccacataagcttgatgaagagattgttgaatctaatcttgagcttgaagcagactttgtacaatttaaatatgatgatcgatcacaaaaggtacttcattctgttgccacaaacatgtttagcgacaaggagatgtgctgctaagtctgtttttacatggaagatgggaaatggacataaacagtgaacatgaagaagggtgtgctagatggaaaggaaaccggtcaagctgattgaataagaagaagtctcttaactactataaatccatccatgaaatggagaagattaatgctaagccacttcaagaaaaaaggttgggtctagtcgttgttgtctctatactggcaaagggaatgcggagatacatttcgagaagaaaaaggcaatgatatggaggtgttttgtctttcattgataaaaaattagaaatgagcaggtgatgaatgtcacatgaatatatttagctatttcaaatggaaaccaactttgttattgtactggcttttgttcataataaaaacacagaaggcaatggaaaatctacatgcaaatgttttgct

SEQ ID NO: 27373 - DNA, 651 bp, Zea Mays
aaggaccctcttgctttctcctttgccctctcctccttctgccgccacaagaaaaaggaaagcgccgccaccagaaatagccattgacagcaagtccggagagagtagctgggtggagatatcgccacgtctcaagtctcgggggcgaattcaggagctttggtcgcgttgaagggtctcgcgcgaggtgttgccgtgtatggtgggtgctcggctggtcgggaactcgccgccgtcgtgggatctccgtgtccggccactgcgggtcgtgccggctcacccaccatctcctcggtcgtcgacgagccagtgaccaaggatctaggtgtttagcaggtttgctgagcaggagctcattgaaggagaagaaaaggtggtccaggaggagccatacaataaggagtacgagttgatctaggtggcgtctcctagtcagctttgtggcgctaaagaataatacttagttcgctttattattatcatttatttttataagacttccgctatgtaataatgacatttatgatattgtgacaatcatctctatacactttgtcattatatgtgatgttctttttttggcgcacatatgagacgcacccgactttatcccttaaatccaggtgtgacaagagtggtatatgaggaaat

SEQ ID NO: 27374 - DNA, 391 bp, Zea Mays
cgggactgtaggtgttaaaaatgggaagttttattaatatatatgatacacaggttaaccggtaaattagtttagaaagttaatgaaagttcttctatcaaactttataagtgttaagtgtccaagaattttaaagttaagttataagtcgtttagtgtgttctctaaactaggaatgatattctatgtattttggtcgagttcatgatttgaatgaatgttgattgctatttcgaatgtttaggattaagtaacatcgatatatttgtttcaaccaaaatctagggtccgtctgataagtaatgcgtataaacactttaggtcttttagttctaaagttgtaattagtatattgtataaatatgcttggttataggttataagtgtttcg

SEQ ID NO: 27375 - DNA, 1257 bp, Zea Mays
tgacagagacactgtagctggactgtacattgataaattgctaagccacatcagcggccatcacacacacggtcgacgccatctcctgattcgtcttcgtctagaacgtcagaattcaccaaatcagccctcgcgtttctcccttcccccggctcccggcgtctctgcgctgcggccgtacggcgatgcggtggctatcgaggctgctctctcaagccgtcgccgccaggagggcctccgcggcggcgaggtccaacactagtctcgtcaagggaggatcccacgggttcgctagtggcggcagggatgggtcaccggaggtgcctcgggagtggttgcggaagctgtgggtagacgagctgaagaagcagaaggaagccgcgaggagatggggcgtcggctcatcattagaggttgcaggagcgaccgaggaggcaccgtcaaggagctatcagtacgaatacagcggctctaaccccgtggaggccaaactggctccgcttcttgcaagagctaacctcgtcattgccagggatattgagtgggcaaacatcatgtttgcttttgagcaggagagcaggtatatcataatggacccactctttccacaatctccagtaggttttattcgagagaaaagcaacatcatctttagacagctactcagaacaagacggccatttgttgcagaaataactgatgctatgggtaacgagatatttaaggttcgccggccattttggtggatcaacagctcaatttatgtagaagtgaatgataaggagataggtgtagtccacaggcgttggcacctttggcggagaatttatgacttgtacttagggaatatgcaatttgcagttgttgagaatccaggattctggaactggacctttaacctggtggatgaagatgataaaatgttggctcagattgatcgtaattggaggggcctcggctttgagggtctccaaagcgtcgctcaaccactgggaactcgtcctagtgccacccaaccgctcgtgaaccgagagccttgaaggtccttcactccttgccccttcaccctgcaccatccaacggtgaaagctacctgggggcatgatcaccaaggttcccattttgacggtcatctctaaccggaggtggcaaaggcccaactcctgtcgacgccgagacgaccggagaagcagcgagctgaacgcagcaggagagtcctcgcgactcaaaaggaccgtcaggcacagaaggctccat

SEQ ID NO: 27376 - DNA, 2656 bp, Zea Mays
caaaaaagctgtgtttatcccatccgatgcagtgttggggagatggaagtcctgcagcagcagctgccttgccagttagaggcatgatgtactacaagaaagctttgaatcttgaagcatttctagacatggccaaacgtgaagatctcatggaaggatacaaagcagccgagtcagtaaatgatgaacaatggaagatacaccagaggtccttatttgctcaatgtgaagcagtggctgatatgaaattcacctatgttgtttcatgccagcagtatggaaatgataagcgtgctgcacttgctaatgcccaagacatattgcagctaatgaggaactacccttctctccgtgtagcatatattgatgaggtggaagatagagtaggagacaagaaaatggagacagcatattattctactttggttaaggttgctctaactaaggattctgaatctgcagaccccactcaaaatcttgatcaggttatctatcggataaaacttccaggccctgcaattctgggagaaggaaagcccgaaaaccaaaaccatgcaataattttcacccgtggtgaaggtttgcagaccatagatatgaaccaggacaactatttggaagaatcccttaaaatgagaaacctgctccaagagttccttacggagcatggagtgcggcgtccatctatacttggagttagagagcacatttttactggcagtgtatcctcccttgcatggttcatgtcaaatcaggagcacagttttgtgactattgggcagcgtctccttgcaaaccctctgaaggtccggttccactatgggcatcctgatgtatttgatagacttttccatctgacaacgggtggtgtcagtaaggcatcaaagagtatcaatttaagtgaagacatttttgcaggttataactcaactcttcgtggaggcaatgtaacacaccatgaatatgtacaagttggtaagggaagagacgtcggattaaatcagatctctaagtttgaggctaaaatagcaaatggaaatggtgaacagactcttagtcgtgatatctaccggcttggacaccgctttgattttttcaggatgctttcatgctacttcacaaccgtggggttttatttcagtacactgttgacggttgttacagtttatgtatttctgtatggacgcctttatcttgctctcagtggacttgaagaggggctatcgcagggaagattgattcataatcatccccttcaaattgctcttgcctcacaatctcttgttcaacttggttttctgatggctcttccaatgatgatggaaattggtcttgaaagaggatttggtcaggcactaagtgatctaatcatgatgaacttgcaattggctactgtctttttcacattttcccttggcactaagactcactactatggaagaatgttgcttcatggaggtgctcagtacagaggtactggcaggggatttgtcgtctttcatgctaagtttgcagagaattatagactctattctcgcagccactttgttaaagggattgagctgatgattctgctcattgtataccaactatttggtcaatcttatcgctcaacaattgcctatatttttattaccttctctatgtggcttctggtattgacatggctatttgcaccctttctgttcaacccctcgggatttgagtgggcaaaaattgttgatgattggtctgattggaacaagtggatcagcaatcgtggtgggattggtgtgtcaccagacaagagctgggaatcttggtgggaagtggagcaggatcatctaaaatattcaggaacaataggacgctttgttgagataatcttggctatacgttttttcatataccagtatggccttgtttaccacttacatgtcacacataacaaaagcatcttggtatatttaatttcttggctcgtaattgtggcggttctgctcgttatgaagactgtgtcggtgggaaggcggacattcagtgcagatttccagctattcttccgtctgatcaagtttttgatatttgttgctttcattgctattttgattgtcttgatagtattacttcatatgacctttcgcgatatatttgtgtgctttctagcattcttgcccacaggatgggggatacttctgattgcacaagcttgcaagcctcttgctcgacatgtaggattatggggatctgttcgtgcccttgcacgggcctatgagataattatgggggtgcttctctttagtccagttgctatattggcatggttcccctttgtgtccgagttccaaacgcggatgctgtttaatcaagcgttcagtagaggactgcaaatttctcgaattcttggtggtcaaaagaaggaacgctccgctcgtaacaaagattgattagtcttctttcatgtgtgttccaatatgcacttgtaaatatttgttactgtctcacggggtatagtgtgtttttatgattacaatatgtaaatatcagatcaaggtgtcataattgtattcgttagattactgtgtgtgtttctattgtaatagtctttgatccagcacatgtacttttactacatatatacgcaaagtctactctaatcagggtttccaacatgata

SEQ ID NO: 27377 - DNA, 1435 bp, Zea Mays
gatagccttcccattggaaagcgaacgctcacagctcacagctcacgcacccatccacctccaaagtccaaaagcggaacccacgcctgccgcaacggcgaaaccgtcggaaccctagatctctctcgcccgcgctccgaaaccccagatccgccatgcaccagcctagagctcgctacccacccggctatggctccggcggtggaggcggagccggacgtggcggtggaggcggaaatggaggaggtggcggaaaccacaactactacggccgaaacccgcagcaacaccactaccaccagcagcagcagtcgcagcactctcataggaactcttcgtaccagcaacagtggctgcggcgagaccaggcccccgccgttgcgggggcagcgtccggaaacgctgtggccaagacggcgtctcagcttgacgccgtaggctcgagctcccaagactggaaggctcaactaaatataccagctccagatacacgctacaggacagaggatgtcactgcaacaaaaggcaatgagtttgaagattatttcttgaaacgtgaactgcttatgggaatctacgaaaagggatttgaaagaccatctcctattcaagaagaaagcattcctattgcgctgactggaagtgatattcttgcaagggcaaaaaatggcactggaaagactgctgccttttgcattccggcacttgaaaaaattgatcctgaaaaaaatgctattcaagttgttatactagtaccaacaagggaactggctctgcaaacttcgcaagtctgtaaagagctcgggaagtaccttaacattcaagttatggttagcactggaggaactagcttgaaggatgacatcatgcgtttataccaacctgttcatttacttgttgggactcctggccgaatacttgatcttaccaggaagggcatttgtgtgttgaaagactgttcaatgcttgtcatggatgaggcagacaagctattagctccagagttccagccttctgtggaggcacttattcatttccttccacctagtcggcagctgttgatgttttcagcaacctttcctgtaactgtcaaggaattcaaagataaatatctgcctagaccttatgtgattaatctaatggatgaactgaccctgaaaggaatcacacaatattatgcttttgtcgaagaaaggcaaaaagttcattgcctgaatacacttttctcaaagcttcaaattaatcaatccattatattctgcaactctgttaatagagttgagctactggctaagaaaataactgaactcggttattcatgcttctacattcatgctaagatgttgcaagaccacagaaaccgagtgtttcatgattttcgtaatggtgcttgcagaaaccttgtgtgcacagactatcatggttcttttttttt

SEQ ID NO: 27378 - DNA, 705 bp, Zea Mays
cgggtatcggagtcggagcatggcgtctgcagtggtggtggacgccggcgacgcgccggagcccacggttcgtaacctcctggaccaggagtccctcaagtgggtcttcgtcggcgggaagggcggcgtcggcaagactacctgcagctccatcctctccgtcctcctcgccggggtccgctcgtccgtgctcgtcatctccaccgaccccgcgcacaacctcagcgacgccttccagcagcgcttcaccaagttccccactctcgtccgcggattcaccaacctctacgccatggaaattgacccaaaggtagaaaatgatgatttatccaatgaaggaatggaaggattcctgtcagaactgacaaatgcgattccaggagtagatgaagctatgagttttgctgaaatgctaaaattagtccaaacaatggattactctgttgtagtttttgatactgctcctacagggcatacattacggttgcttcagttcccagcaaccctagagaagggtcttgagaaaatgatggagttgaaaaatagatttggcggtctgttgaatcaggccagtcgattgtttggtcttggtgatgagctgaacgaggatgcaatgcttgggaaacttgagggtatgaaggatgtgatcgaacaagtgaacaggcaatttaaagatccagcacctactgatttccatttttattt

SEQ ID NO: 27379 - DNA, 921 bp, Zea Mays
tcatgtgcaccgcctacccgactaatggtcgaccagcacacaatatgaaaaatttccctcgccgacagtgctccctcatcttaccatgcctcgctgcacaccaccaccactaaagctcgcagccgagttcctccatctccggcgccggcccactacagcagagggcctcccatggcgtttgtttccccaacgctcaccccgtcaacaaccatcgacctcgcacagcagccgcgacgccagttcacgcagccacgtggattccctcctcttcgcgccctcggtatgctcgacgtattgcagcggcagtcccgacgctatgccgtgacccttggtgaggctctttgctgtcctagccgctggatcgagccttgttccagctcggcgagagcagccgcgccgacgatctacacagccccatcctcgacgccaaaattcttcgccccttgtcgtcgtcgcgcttcgcgcgtcgtttctcgacagaaagccaaaccagcatgcaggcatgcgctacacgagtcggccagaaaccttcggactcggaataaagttgtacacaatatgaaaagcatggacaggacaaaggttgaaccagttccgaagctacgcgcaaggaagcttcggctcaacggcagagaaaggaaccaacttaaaggggaaaaggctatttagtcctcgctggattatctttaagtcaatagtaaacataaagggaatgaatgtaattttacacaggctgtgccctgtgcctataaatagatgaacagtacccccgtactgttcacgctaacttgtacttcctcgtgcgtcacgcttgtactttcaccttctgtcaggtcgaaggtacaaatgtaatcctatgttgttcttattcattcatgattatatagtaaaagatatattataatgtcatacgattatcca

SEQ ID NO: 27380 - DNA, 1834 bp, Zea Mays
cgcgattcccctcttccatcccgattcctccgcccgtgactccccgcgcccgcagcccccgccgccgtcctcgcgacctgcctaggacagctgtcacgcccgcaaatcacgtgaccatgcccttccatgtcctcgcgtcctccactccgcccgcgattcccctccccgcacccgcagcccccgccgtcgtcctcgcggccagccgaggacagccaccgcgcccgcaaatcacacgaccatgcccttccatgcccgcaaatcacgtcaccccttccatccatggcagtcgcgctccctctgcgcccttccatccatggtcgcggatccctacgcgccgcgattcttcccatacgctccctctgcgcccttccatccatggccgcggatccccgatgttgagatctgggagctgaagctggagatctcgcggatgcgggtgcggctgacggcggacgacggacggcgcaagaattgcggcggccggagctcccagtgctccgacggcaaggcccgcaggcggtagaaggcatccttcgcctatgactgatgcttcgctgctggcgtcgacagtggaggcgcgacaggcggtgatcgtggatggatgcggtctcagcgtctggaggatcggtcggagctaagcagggacggtggctgctgacagctgagtgatacgtgtatttctaggaagatcaagcccagagctgtcgcagagccagaagtgcatctacttccacggcaccgtcagcaaggacctcctcacacacaagttggtcatccagctctctaggaagatcaaggacgacatatgaagactggagtactttgaagtttgatgaacaacaaggacatcctcacgcacaagtttgatgaacagtcaacaaaattcttgagccagttcactccaacccaatgggacaaggatcagtggcatcctttcatggggccactgcggtccatccaagtgttgttcatttgtgttgtcttcatgatcgtggagatcaacacattcttccttaagcttgtgtcctgttgccgagttcctcaaaaggacaaagtcgttactgtggttcagtctctacttgaatgatattagtgacaaggtgatcattcctttcacaaaatattctttagtgataaaaccattagcttagagtatggaagggttgtgtccagcaaggtttatgacggatagtcttcgctgttatgctgcgtactcgatgtgttgcctttctcctaccattctttgggttgttatctatctttgtagccgaagaaacaatcctgagaaagaatggaaagctccttggctaggaataatgtttctaagtggaatcacctgggttatgcgagaagcacatcaatggattccactggtcctctgttagctggtaggagaagtagcagacatggctcaagtgagatgggggactgcatattcagctcaatgagacattttcttcagttggcgaatcaattactaggagaatttgttagatattaagattaatagtaacatgtattaattcaattttatataatcgttgtgcaccaacattttatttgaaagggagaaataaatcctagcaaaattgactatgggagaagggatataggaacaaaaatggaatatgggagagggaacaaactcatcggcctatgcgccttgattagaatgtctcctaaaagttttaggtattgaaaatatgataggacatttattgtaatatgtttattttctgaaatactaattttgatgtatagaatattgacaaaatcttcatgtcagtttcccttcccaagtaagaatagagcaatgcacttgttctgcccgtaa

SEQ ID NO: 27381 - DNA, 1155 bp, Zea Mays
caccgagtcaccaggtctggggttcgacgcagcctctccgcagtgcgggggtggattagcaaggttatcaggaaaaagcatgaatcttctgtcactagtcttgcatggcatccaaacaatatatatcttgcaacatcgtctacggatggtaaatgcagagtgttctctacttttatcaagggtgtagacacaagaggatcaaaatcgagcacttcaaccgattcaaaattcggagagcaaatcgctcagcttgatctatcatctacctgggtatttggtgtaaggtggtcaccaagtgggaagacattggcctatgcagggcacaactccatgatttatttcatcgatgaagtcgaatcatctcctgtggcacaaaatttggcactgcgtgatctgcctctccgtgatgtgggttctttttgtctctgagcgcacattgattggtgtcggatttgactgcaatcctatgatctttgctgctgatgatactgggctttggactttcataagattcttggacgagaggaaagctgccccatcagcttcaaaagcctcgcagctctctgaagcccttggaaagctatacggccaatcaaagcaagggactagtagtgataccgttgaaccatcaaaacctcgtggcggggcccatgagaattgcataacgtgtattgtacccttgagaaaaggaagcgacggtagtatcaaacgattcagcacatcaggattggatggtaagatcgtggtatgggatttggagaatcacgtcagcattgcaaaatagctcgagggagactttatcaccaatcaaatcgagggaactcctgtcattaccagccgtcctgcaggttttcaagatccagggccagccagatagattgttttttttttaatttttaaattttgttgtacctgtacacagaaacattgccttagcgtagggacagcttgcatctatcaagtagcttcatttttggcgagtaattttgccctttgaattgaatctatacaatattatactataattttagttaggtcgtaggcagttgacgtgatcccgcgttctttcgctctttctttccggtgccctgtgtaaaataaccacacgtggaatcttatctatccgggacttgtggtcatcttgtttcttctgct

SEQ ID NO: 27382 - DNA, 1358 bp, Zea Mays
cggcctcgcgcaccgtctacagctcccttccaggagttgtctcaccgacgatggctcccgactctgctcctcctctcaattaaggatgtgattcttcctctgtgttgggtccccgcatttcctaccccacctactatcgctccttcaaatgtgctccatccgttgctgatcctaattgtcgccgccgctggttggttggttgcaagcagggagggtctgagagagcgcgacgagcagtggaccaaagtcatctcatgggagactggggcattcgtctaccataacttcctggtaagcgatgccaccaccacggcctcgccgtctatgcacgcttcctctttcgtttaatgttcttcgtgtcatctcattcttatgactgagtttgatagaatcgtgagatgtgtggtagcacatttggatatgtgaatagaatatttgtcgtttatgtttctatggtttcttggcagatgaaggataagctggaggcggatacaatcatgatatgtgaatagaatagaatatatgtctggcgagtaacaaaaccccacccacttacaagaattaatattctatttttttacatttattggatacgaagaaacaaatgtgctacatgctcagtggatccttaaaactcacgtggacatggtgaatgcatctgcattctatagtcggtgtcaaagaaaatagggtcatttttagatgcaccaatgtgtgtatgtggtatgtatagttcgcaacttatttgttttgaaatgttccaactttctaggaaaaaatattctctttgtctataaaaatatatgattctgattttgggaattttaatcaagttgacatggatggactaataatcggaccagcaagttagcttgcttgtggtcgggcacgacgttttcaaatcaaaagctaaggtgggttcagtttgaacaaccataacccatacctcttgcaaggatgcatatagcttgcttcagaatttggacataaggtgacttcttctcatggatatcctgttagatacaagcaacctttccaagtagtgttcagagcaggtgaagagaagcagccttacatccagtaggcctagctcgacaagaaatgttatgaaaaagagcccaccgtctatcatcgtgaagctttctaaaagcatatagtagtcaaactcgatatgcaggttcaactgcctcaacaactattagtttgcttgttgcacatgttggagattctagagccgttattttcagaggacaggccgagtaagtttactgtcgtaacatggcatatctcagtgtctgttcctatgcttccacttgtaccagaaactttctatatgatgtgtattttcctagacgagt

SEQ ID NO: 27383 - DNA, 4532 bp, Zea Mays
cgccgcgctccaggccgtcctccctcctgcgccgcccgtccggcgctgccagcccctccagccccgcctctgctgtcccactgcggcaggactacaaagtacaaagatttgctactgcattcctcaccttgaggagtatacataagcacaaggatgtatccccacgaggttgtttggtatttgacttgatataattgcctgaaattatgatatattgaaatttccctatgttgtttaaaactacgtttaaactttgtttaaaccgtttaaaagttaaaactcacccatgagcgtttcaacgtttcgtcgttttaataaccttggaaattaatctcaggtaataaaagtagaaattgatctattttattatttaaaatttggaatagctgataaatgtacccctctgtatgtgacacattcaatatatgattttcaatatatgatcttctttgattgtgggtcctcctcaatattcacattttttcagcagtggctatatacacacacacacacacactactattaaggctgtaaggggtaggctgcctcccctggttctgccttcagccaatctgcaccgtccatctatatgcgtcaaatcatcaccgtccgtctcgtcgcctccgcttcaagcctcctccatccatcgatcgcaactgctcctctccgctcccctcttcctcaacagctagatcctccatcaggcttcattcgcgccgtcgtcggcaacggctccggccttcccacgccgccgtccaacctccccccgactctcctccccacaccgccgccgctcccaccgcccgcaaaaacaccacgcacacgggcgcgggcgcggagaccgaccaccacggcaccacctcctcctccggttgcctccggcctcgccatccctctgtcctcgacttccctccgtcctcccggtctccagcctcccggaccggaagctccacgtggcgcgacagctcgtctctgtcgtctatggcggcggcagaggtgtactcgccgaccgcggcggcgcagcagcagagggagaaggcgacgtcgcaggtgtggcgggcggtggtggggtggatcggcttccttgttcaggttctgcttcagatcctccggggcacgccgtcctgcgcccaactctttccttcggcggcgtccggtacccgctcctcttcgggcctgcggcctcgaactcgtcgccggaggtggcctccgtccgtccagctctgaggcgggcccatggaaatcgttgccatatcagatcagcttcgccacggaccccatctgcgacccccggtgacgcgctccgcccacagctctgaggcgggcccatggaaatcgttgccatatcagatcagcttcgccacggaccccatctgcgacccccggtgacgcgctccgcccaccgcccaccgccgcccgggaatggctcgagcgctgctcctgctgcgagtagctgtagctcgctaccctcctctcccggcctcacccgcgctcctccagccgcagccgctgctgcgctgccacgcgccctcccagtacaaatcccagctccgcttcctctcctccctctcctcgtccgtgcccaacagctcagatgctcccagcgacggcgggggcgaccgcgacggggaagaagatggcgcgaagagtggcagccacgtcgattacttggggatgagcgacgaggagctcatggagcagtgcgatatgggcacgttcaaggcgtccggccccggcggccagcactgcaacaagcgcgagtccgccgtccggctgaaacaccttcccatcggcatcatcgcccaggctgtggaggatcgatcacaacataagaaccgagcgtctgctttatctcggcttcgaaccctgattgctcttaaagttaggaggccgataaacctggaagactacactccacctgttgagcttcttcagatattacccctgaagtccagcgttagaggaaatgatgttggcccccaaatcggtccaaataactcaaaattttctccaggaatgcaagcattattagacctgctgtttgctgttgaagattctgtatcagatgcagcaaagattttaggcctaagcaccggtgctttgtcaagattgattctgtcagatgattctctccgaacggccgcgaatgaactgcgagcttcgaagggcaccggtgctgtactacgtgctcctgacgttgcaggacagcgtgcacaaggtcttctacgccgtcgtcgaggccgctgcagttcgcgcagacaacagccatcttggagggttggcgaggtatccggtctctgcaactcttccacagattggatccagattattccttacatggggtgtcttctggagttttcctgaggtgattgactgactcgagaatttgccgacgcttgaagaaggacctaatgtgagcttttacatacttgatgaacagcttgagctcttgagcaaggtgctgaatgcaggggatgacatgattggtgttgagtgcttagaagaagattgtgatggcaaggttctatttgtttgaggttgcttcaccattccccaaagcacattgcatcttgttttagtgtttttttgattgccgtcgtcgaggccgctgcagttcgcgcagacaacagccatcttggaggtatctaattccaatattgtatgtctcggttgaacttgtgaaggcgttgcaagcacatatcattaactgggatattcatatgtttgatgaggagatcggcaataccactcagggtggcaagtttgaccatgcagatcgtttgttccaaagcattgagaacgcttacataaatagcttatcaaatacaagatggggaacctataggcgatgttgctctccctccatgggcaaaggatgataactcaagtgacgagtttgacaaagattctattgagagtgatgatagatctcttgaagagctaagctgggagacactagaacttcttgtggtacctcatatattcaggtatccaagctctgtgctaccgattaattgctgaaaactgaacttgggttcatgttaaatattcccaaggaaatataattgggcaacggtgtgtgtatatgttcagattcagaaagtgaggacaatatagcgtttgcagcagtggtcgtcgccctgtgcagggagggcctgctgatcagagatcaagagggaaagcagaagacacgttgtgccgggaggaaacacacgacgaagtagagacttagaagcaataagctaaatatttagacaactttaattcgagcactccaagaggtgtctcaaacaactggttaattcgttttatgaccaaaagaggaaaaatggccatctaatagttttgtaaaacaactccctaaagataagcacttgcttaatctccccctcaactcgccaacatgtgtgtgccttctgcgcttgctatttgcttgggtagttttgtaaaacaactccctaaagataagcacttgcataatctccccctcaactcgccaacatgtgtgccttctgcgcttgctatttgcttgggtgcccctcctctggttgtacctgcaccctcctgtccatctcgggaatatatcaaatacaaaccacgttttggtgcaaaccctgtgtaaacctactaaaaaaagtttcaaaaaattctaaaaaaaaacatgaatgtacatctcagcttacctcatctatatacaaaattttatgatcaaattcatcttactctagcagttacaaaaaagacaaattttggtgcatttgaactattaccgtttatcagaaattttgtcttttttgtaactgctaaagtaagatgaatttgaccatgaaattttgtatatggatgaggtaagctgagatgtacattcatgtctttttttagaattttttaaaactttttttagtaggtttacatagggtttgcacaaaaacttggtttgcattcgatatgtttccatccatcttctcctcctgctcgattttttttttgagtttttggaagctaccctcctatctctttccttaaaaccgcaacccctttccctccgcgccctcacttcacggctgccaagaagtcttcaacgcccgacgcgtggccgcacagggcgaggtctcgctcgatggccaggcttggccttcgtgccaccacccacccacgcttcctcaccaccgtggagatggatgtgtcgctgctgtggtggccctagcttctgcgtgggcccacgtgtagatgccgctggagaagatttattagggcgttcgatggtagcctcctcgccccagtacgctgacgtgcgcctcaacactgcccccacgtcccagcagcagcactaagggctagtttgggagccaaaaaactgaaggggttttatggctcccaaactagtcctaagacactaacgtcagcgtgttgctcccctcgtcgaccatgtgggtacgttccccatttgttttctccttccttgtcctcgccgttccccatttcgcatttctacatccgtacctcggcatttcccctaagtctgccttcct

SEQ ID NO: 27384 - DNA, 3091 bp, Zea Mays
gccgccgcggcgatccctctcctccacttcctcatcacaacattcaagaacagaccggggccttgcgcaaaagaacaaaaaaaatctcagaacacacacacacacctctatcgccccgacctcgacgcgacccctctcgcttggatccggacggcccggtccctccgccctcccatgcgcacggcgccgccgccgccgccgcagccgacatgacgctcgcctccctcgcccgcgccctcggccggtccgcgcgctcctcccgcccgcgccagctcgggggcctccggcagccgcccgcgccaccgctaccgccgcccgtccacggcggtgagggtggggcggcaggatttgttcgcagctacctgactgcggcctcgtcggcagctcttgggaagccatccgcgggcaagaccgtggattggagatatgtcctcgccagcccacatttccgacgcctcttctcggacgggtccaagaagaactacgagaactattaccccaagggtaagaaggaggtgcctaaaggagatggtacaaacaagtctgaatctaagcaggaatccaatacagatgaaggatggaattttcaggataatgctatgaaacacatgcagaatttccttgcgcctttattgattcttggcctgatgctatcatccatgtcatctagctctgcagaccagaaggagataagcttccaagagttcaagaacaagttactagaacctggtttagttgatcgcattgttgtttcaaataaatcagtagcgaaggtctacatcaggagttcacctcatccaaagagccaaggccaagatagtgatatccatattactaccactgatgctccaggcaagcctgctcccagcagatgcaagtattacttcaatattggtagtgttgatttgtttgaagagaagttagaggaagcccaggaagctttgggaatagatccacatgattttgtcccagtaacttatgttgctgaagtaaattggttccaagaagttatgaggtttgccccaacagcattgattgttggtctattatatttcacgggaaaaaggatgcagagtggtttcaatattggaggtggtgctggcaaaggaagaggaggtattttcaacattggaaaagctacagtgatgaagatggacaagaactccaaaaataaggtgttttttaaggatgtagccggttgtgacgaagcaaaacaagaaataatggagtttgtgcatttccttaaaaaccctaagaagtatgaagatttgggagctaaaatacccaaaggtgctctacttgtaggccctcctgggacagggaagactttgctcgccaaagctacagcaggagagtctggtgtgccatttttgtctatttctggttcagatttcatggaaatgtttgttggtgttggaccgtccagggtacggaacttgttccaagaagctaggcagtgtgctcctagtattgtattcattgacgaaatcgatgctattggtcgtgcaagaggacgtggaggtttttcaggttcaaatgatgaacgtgagagtactttgaaccagctgcttgtagagatggatggatttggaacaacttctggtgttgttgttcttgctgggacaaatagacctgacatcctggataaggcattattaaggccaggaagatttgatcgccagatagcaattgacaaaccagatataaagggccgtgatcaaatattccgcatatatcttaaaaagcttaagttggacaacaaaccatcattttattctcaaaggctagctgccttgacacctgggttcgcaggagctgacattgccaatgtttgtaatgaagctgctttaattgctgcgagaagtgaggaaactcagattaccatgcagcattttgagtccgcaattgataggattatcggtggtttggagaagaaaaatagggtcattagcaaactggagcgccgtactgttgcttaccatgaatctggacatgcagttgctggatggttcttggaacatgctgagcctcttctaaaagttacaattgttcctcgtggaacagctgctttaggctttgcacaatacgtcccaaatgaaaatcttttgatgacaaaagagcagctttttgatatgacatgcatgacattaggtggccgtgctgcagaggaggttttgattggcaaaatctcaactggtgctcagaatgacctggagaaagttaccaaaatgacatatgcacaggtcgccgtgtatggttttagtgaaaaggttgggcttctgtccttcccccagaaagatggtggtttcgaaatgagcaagccttacagtaatcagacagcatccatcatcgacgatgaggtccgggaatgggttggcaaggcctacaagaaaacagttgaattgataacagagcacaaggagcaagttgcacagatcgcagaattgctgctcgagaaggaagtcctacaccaggacgatctaaccagggtactaggagaacgtccattcaaggcactggagccaaccaactacgacctctttaagaaaggtttcgaggatggtggtgacaacagccaagcaccagcagagaacgccgagctgcctgatgattcatctcccccagttggtgacgttgtacccacgtagtgtttctctcctcaacgtcagagctgtacattgagcgctcattctcgatagattcttgtttgttggttgcatcataaaaaagatctgtataaattcgcgcccaagctgattatgccactgtggaaatgcatttggatttccgtagtgtcagtccggtcgatagggtgccttgggttcttcatggcacgagcaaatgttctgattcttgtattcgaatgttttgaaatattctgtctgacgggactgcggagttggcgcgagaagtgtgcttgttcagttctatctgaaggcttagctgtctgtagctgtagctggtaacaacagtggctaaaatggtacctctgaaatctttgtgacagtaacaagccattttcctttgaatttttatcaggtagtcggcgcgattactttgtttgacaagcacaaactaaatgtcttggttt

SEQ ID NO: 27385 - DNA, 2865 bp, Zea Mays
catcagtccaatctgatacctatttggagacacaatatttcagttgtagtgtagaagagaagactgcagggatgccgacattactttctcttgaagtaactggtgatgcaattgaaggaacaactatgtttgccagtaaaaggtattggggaggagaagaaggggacacaatgttccgctggatactgacaaattctgatggaaccgagaaagaaattgaaggagcaacaagttcatcatacaccttgaaatgcaatgacattggcttctacatatctgtcttgtgcaagcctgttagaaatgatggagttgatggttctttagtgtcgactgaagcgattggtcctattataccagggccaccaacatgtcaatctcttgaactagctggctctatggttgaaggtggccgtttgacctttcatgctgtgtatacaggaggtttgcggggaagttgcatccaagaatggttcagattacatgatgatgggcacaaggacaagttgactgctgatgaatgtctagaccttgatctagctgatatcgattgccggattgaacttatgtatacacctgtacgagaagacggagtgcacgggttaccaaggagtgttacttctgatacaatcttacctggggagcccaagggtgtcaatcttattctacctgagtgttttgaggacaatgaaatttctcccatcaaaacctatttcggtggcaaggaaggcactggcaaatatacatggtttcgaaataaagagaaacttgataacttggaatttgatctggttgctgaatcatcagaagttgttggagaaaccttaaaatataagccttcattgaatgatgttagttcctatctgattctttattgggttcctacacggcgtgatggaaaggttggtgatcctttgatggctatctctgatgatccggtcatggcagcttttccatctgtttcggatgttcacttagagcagaaaagttcagatgtatattgtggactaggcatctattatggtggatatgagggattaagcttgtatagatggtacagggaatctagtgatggaactaggcttcacatagatggtgctgattcagtcacatacgaagtgacagatgctgattacagctgccgtctactgtttggttatactcctgttcgttcagatgggataagtggagaagaaaaactctctgaaccatctgatgtaattttgccagaactactcaaaatcgagacactcaatttcaaggggaatcaggttgaaagagaaacactgactgctgctgaacaaattccgtacagtgagattcaacaacatatatggaaaaattataagaaagagatgaaatatcaatggtttatttccaatgaatcaggaggcgatcagtcttttgaaccattggcaacccagtgttctcgctcatacaaagtgcgctttgaggatattggtcgttgcctgaaatgcgaatgctttgtcactgatgtatttggacgatctagtgaattggtatccgctgtgactgctcctattttgccaggcctaaaattgaaaagctggagattgaaggaagaggtttccacactgacctatatgccgttcagggtacctatagcggaggcaaagaaggcaagagtaaaatacaatggctcagatcgatggttggaagccctgatcttatctccatacctggcgaaactggaagaacgtatgaagctaatgttgatgatgtagggtataggcttgttgcaatttatacacctgtaagagaggatggagttgagggacaacctgtttctgtttcaacagaacagattgcagttgagcctgaactttacagggaagtgaaacagaagctcgatgatggttcagtcaaatttgaggttctgtgtgacaaggaccgaacacccaaaaaggcacaagtaatgggccatttggagcggagggttttggaagtcaaccgaaagaggataaaagtagtaaagcctggatctaagacatcattcccgagtactgaagtacgaggaacctacgctccaccgttccatgtcgagctgtatcgcaatgaccagcaccgcttcaagattgttgtcgacggtgatactgaagttgacttaatggtgcaaacacggcacatgcgagaccgcatcatcctcacgatcagaggcctcgcccagaagttcaacagcacctccctcaacacacttctcaggatcgagtcatgatagacctgacagtgtaaaaaccaactattacgggaagctgtaccccttgttccgattggttagagtgcgtggttttagtaggattcgtgacatgccagccttttgtgtgtatgggtgtgggacgggccgagcgtgttggattacaattttttccctgacacatctctcaaatcagagcagcatcagctggttgctctgactggtgccgtcgtgcgtcatgaaatgtacatagggtggttagagcgagaaagagagtggtgtttcttggtgctgtatttattatgcactggttgggttgggttttttcgactgccattctcatactaagtattggttctttcttttttcggtcgttgggtttgcatatacttgtaccgacaacacagcttggggtgattgggcgagtgctgttcagaatgcctggtccacacttgtgtacgactggaatcctacggtggcgtattcacatgctgttttatggtgcaaatgtaaattcatctgttcataaacgagaatcaaaatcgtcggccacgtgtattcgtcgtattcgtaccgatgtatactaccttataaaccagtactaatctcacggtggcatcaattatcttcctctgtttcacaaggcacacgtt

SEQ ID NO: 27386 - DNA, 3743 bp, Zea Mays
gcggctgcaatccggctgcggctgcggcttctacagtatttttctctctatggattgcagctgcagcagtccaaacagctgcaacagtgtcggcttgtagccagccgaacacgcccagtgttcccagccctaaaacacttgacactacgacactaccgtatcagtctggcaggtcctgtgcataatccaccatctcgctcacaggctcgccgcccccgccggcaatggagggcgttcacagcctcctggcccggcccaactccgcgccgttcgccttctcaccgctgcccctccgcaggagccacaggccgccaccgcctggcccctccacctgccgcgccgccagccgctgggccgaccgcctcttcgccgacttccacctcctccccgccgccgccgacccgccagccgcggcctcctcttcctcctcgtccccgttcgtcccgatcttccccgaagccgccgaccgcgccttgcccctcccggtcgacttctacaagattcttggtgcggagccacatttcctaggcgatggcattcggagggcgttcgagtcgcggatagctaagccacctcagtatgggtacagcacagaagctcttgttgggcgacggcaaatgctgcagattgcccatgatactctcacaaaccagagctcgcgcaccgagtacgaccgtgcgctttccgaggaccgtgatgcggcactcaccatggatgttgcctgggataaggttccaggtgtgctgtgtgtgcttcaggaggctggggaggcacaactggtgttagcaactggagagcacttgcttcaggaccgtccacctaagcggttcaagcaggatgtggtgctagcaatggcattggcttatgtggacatatcaagggatgctatggcagcaagccctccagatgtaatctgctgttgtgaggtgcttgagagggcactgaagctcctgcaggaggatggtgcaagcaatcttgcacctgaactgcttgcacagattgatgaaactttggaggagattacacctcgttgtgtattggagcttcttgctcttcctactgatgaaaaacataaaaataaacgccaagaaggtctgcaaggtgcaaaaaacatattgtggagtgttggcaggggtggtattgctactgttggaggaggattttctcgtgaggccttcatgaatgaggctttcttgcagatgacatcagctgagcagatggatttcttctctaaaacaccgaatagcataccacctgaatggtttgagatctatagtgtcgcacttgcccacattgctcaagcaattgcaagtaaaaggccacaattcatcatgatggcagatgaactcttcgaacaacttcagaagttcaatataggttctcaatatccttatgaaaacgagatggacctcgcattagaaagggcactctgctcgttacttgtgggggatatttgcaattgcagaatgtggcttggaattgataatgagtcctcgtcatatagggaccccaaaaatatcgagtttgtggtgaataactctagcatgaacgaagagaatgatcttcttccagggctgtgcaagctcttggagacatggcttgtctccgaggtattcccaaggagcagagatacccgagggacgcagttcagactgggagactattacgacgacccaaaagttctaagctacttagaaaggatggaaggcggtggtgcttcccatttagctgcagctgccgctatagcaaaacttggtgctcaagctactgctgcgcttggtactgtaaaatcaagtgctcttcaagctttcagtaaggttttcccattgacagaacagctagacatgtcaggcaaggatatcccaagtgatgatcttgataaatctcttgaaaaactcgcccaaggaagtgttgctggagacgctatccatgattccagaaatgacgccttgaagattatctctgctggtacactgcttgcactatttgcagtgttaggtctcaagtgcttgcctcgtaacaagtcacttcctgctcttaggggcgagtatgggtctgtggcggttgttgactccattgatggtccagcggcagatgaagagccactggaaatccctaggatggacgcgaagttggctgaagacattgttcgcaggtggcaaagcatcaagtccaaggctttggggccagaacacactgtcacggcattgcaagaggtcctcggcggcaacatgctgaaggtgtgggcggaccgagctgcagagatcgagcgccacggctggttctgggagtacgcgctctctggcgtgacgatcgacagcatcaccgtctccgtggacggccggcgggcagcggtggaggcgacgatcgaggaggtgggccggcttaccgacgtgaccgaccctaagaacgacgacgcgtacgacaccaagtacaccgcccggtacgagatgacctactccaggccagcagggtggaggatcaccgaaggcgcagtcctcaggtcgtaggtagaacggctgtgcttgtgcagctgcagcaggagtaggcgagtagcgattctgaagaattccagccagttgtgcctgttgtgaaagccgagccacttaaaaatcagtgggctgatgaagatgttgaagaagatgatgtaaaagaatcatgggaagaagaggaggaggaggagaaacctaagccagcgccagtggaaaaggtcgctgcaaaacctagcactaaggctcctgctaaaaagggaaaacagcaagcattgacaagtgctgaagaaccagatgagcctcctcttagtcccacttcacagaaaattcgccaacaaagacttgtggaagaagctgacttcaagtctaccaccgagctttttgcaaagaagggcagtgagcaaaagtcactagatacttttattccaaagtccgagagtgactttgcggaatacgcggagcttattgcaaacaaactacgcccctatgagaaaagctttcactacatggctctgcttaagaatgtcatgagactttccatgacatcgttgaaaggtgcggacgccaaagatatatcttcttccgtgacggcaattgctaacgagaagatcaaggctgagaaggaggctgcagcaggcaaaaagaaacaaggagcgaaaaagaagcaactccacatcgagaaaggagacgacgacttcatccccggccggggtggtggctacgatgaccccgatgagtacgacttcatgtgatctggctgggagggatagtaggtttctgttatgtatacctttggcgggcagagaatatatcactagagtttgcggcatactattgcatggaacatgcgttatctattcgagaatgatttttgactctgcaggataagaagagcacttgtgatctggatgcatgggtgttttcttatttatccttgaatctttgtgttatttttttttcaacattgcattttttgccaaatgtactatagtaccttgtactatctggttactccgtgagtcatgaaagcaattaaatccctggagggtgtctcgcttgtgtttgcagctgtatgaccgtgtgcattgtttttggagatcttgtgtgatccactgactactccgactggcatggttgtcttcctttttctgacgctcggacgagacacagcaagacactattggtgtgctagtttgctgcacggaggtgttgttaggttgcacactgttggtgtgctaatcttacttctgg

SEQ ID NO: 27387 - DNA, 583 bp, Zea Mays
ggtttgcctgtatactggcatgctgcagcacctgcagccctgaccggcgacgattgggcggccgtcgctgcctccttactccaggtgtccagctcttcttcgtgccatttgccggccgtgagcaccaccaggagattgaagaagtcgacactgatgaacattatcagccaaaggccgccgccaccgccataggcatctcaatatcatgctaaagcaggagccttcagcccgtatcctccttgtcatgcacatgaaagaccttaaccacatgcatgcctgatgactttctgtagctagctcgaaaaggtccatacatctcatcgagagtctggtcgaccgtcgatgccttatgtgttgcgtggaagacatttgtgacgcttggttcaggagctgttgcagcgtttgtgtatataatattctcaggtttttggctgtcagcatgtgcgggcatatatatatattctgctgctggcgtggctgtggtaacaggcagtctattctttgctattgctacctgggccttgtgaatgaattcaattcaatataaaatcagcgcacgtgcttctgatcgttttctctttgg

SEQ ID NO: 27388 - DNA, 142 bp, Zea Mays
cggcagactcgagcgcgggtgctagaacatgctccggcgaggtggacggcgtggcgacgaagatgggcggcacgacatcagcgggtggcgcgatggcggagatgagcggtgtgccgggcggttcctggctcaggatgtgagg

SEQ ID NO: 27389 - DNA, 141 bp, Zea Mays
caacaggaaggggagctagttggacctgagcagggcgacgtcggccatggaggtttgggcattgacgctcggcttgggagaagccagggatggcgcttgaggaagagagatgctggtgaagggatctcacgtgtgggggag

SEQ ID NO: 27390 - DNA, 1518 bp, Zea Mays
ttttgatgcaacacaggtataaagctggttcgataggaggatagagtatatcttcttcagatctggtttcaaagtggatgggtgaaagtgagaaattagttgcaaatctgttccaaatggctcgggaaaatgccccttccattatcttcattgatgaaattgattctttatgcggtcaacgtggagaaggcaatgaaagtgaagcatctaggagaattaagactgaacttcttgtgcaaatgcagggtgttggtcacaatgatgataaagttcttgttcttgctgccacgaatacgccatatgctctggaccaggctgtgcggcgaagatttgacaagcgtatctacattccgctacctgacttgaaagcaaggcaacacatgtttaaggtccatctcggggatacaccacacagtttaactgaaagtgatttcgagagcttggcccgtcggacagacgggttttctggttctgacgttgctgtctgtgttaaggacgtgttatttgaacccgtgcgcaaaacgcaggacgccatgttcttcttcaaggcggacggtgacatgtggatgccatgtggaccgaagcaaccgggcgccgtgcagaccaccatgcaggagcttgcatccaaaggcctcgctgcgaagggccattttattagagagggtatattctggaggtgatctaattctctcgggcgttctatttgaggtatttacctccgctagaatctgcacatctcagtaatggttcaaattttttacggtttccatattatatctaccacaaacttcagcagttctgaatgatctgcacgttctgtatttttgattagttgcttagtatagtaactactcagtatagccatcatctatttacttagtatattaactactcatggttaccagctagaaaaagcgagcaatgcaggtaggttgctgtggtggtaataatagcgacgtctgggtgttggttcctgactggtttggctggattcatcggtgcacgtgatggtgctgcagttgcagtacacagatgagattgggctctggctcagctatgcacgcgtcgtgtgtcagctagaaaacgacgggactcatcgatcgatcgtccatccatgtccaccatgggtgttactgacatgtactctccgactccgttgcacaacgaactgatgatcgaaaggagaagaactgatgatcgaaaggagaagacgtatactactactcgtacggtctacactagacagaagcgtacgtgtccggcgtcgtcttgcctgctcaagtttctttggacggacatgcatgcattttgtcagaccaactgtgcgtagataaggttaggtcatccttatcatctctctctcacaccaagttcatgccgtctgccggcgcgcgctttaatcgtgcctaatgcatgcctacgagtataaatactatataccgagtattatgtatacaaagaactactgtaactttaattgtagctatctcctctcctcgcctcaataaataaaaagca

SEQ ID NO: 27391 - DNA, 933 bp, Zea Mays
gcagtcgcctgtcctgtgtcctccggtcccggacctctgtgccgcactgcccacagcgacagcatcgacatcgccccggtcccgtgtcgcttcgcttcgtagctcgccgccttccccgcgccccagcagcaacggattcccctcccctcgagagatccgacccttggcccggtcgctggggagagcggcatggggctctgggattcgctcctcaactggctgcggagaatgctgggaagacatcgctggtcaatgctgttgctacaggtggctacagtgaggacatgattccaactgtaggcttcaatatgcggaaaatcaccaaggggaatgtcacaattaaactttgggatcttggtgggcaacgaagattccgcactatgtgggagcgctactgccgtggagtttctgctattctatatgttgtggacgctgctgaccgagatagcatcccaatagcgaaaagtgaattgcttgatctgctgacaaaacagtctttagctgggattcccttgcttgtccttggcaacaaaattgacaagtcagaagtgctttcgaagcaggcattggttgatcaacttggactggaatcgataaaggaccgcgaagtttgttgctacatgatctcctgtaaggattctgtgaacatagacattgtcatcgactggcttatcaagcactctagaacagcaaagtaggctttatgtgtgtttgtatcacttgatgcatggtaatttgaatttacctttgtgaatcagtactcccagaatcctggtttcttgtccagatgttaaaagcgttcacctcgtaatttatgatccctttggtctcacagacgaattgtatggtatctagaagaccagaaccttgtatttcctttgcaattcccttgaatcttttattattcttactgtgaattaaaaaaaaaaaaaa

SEQ ID NO: 27392 - DNA, 3313 bp, Zea Mays
caaatgcaaaccctggccgtcgtcttcctcataccagccgtgagtccctcgctgcgcacgcggtgctagtacacatgtgcacgacgttcgtccccgtacgtgtggactatgtggaagcgcagctgcgactgttgcgctgacacactgcggaggaggagacgatcgtgatcggctatttcctcttcatcgacgcgtgcatataaccaaacctagctgcgcttcctccagatctcggcgctctggccccatggccaccctcgttactagctccagtctctccgctcaccgcccttgcgccctctagctccggatcgcccgcgcacacgaggccatggagcccgcagccgaggacgttgcagccgccgcgccggactcgtgggaatcggccgacatcgacgggcccataagccggcttatcctctccgcgcgccgcgtgtcctcctcgccggacctcgctgacaacccggacccgccccagccgccgcctgcgctgcagccgcagggcccgccttcggttccctcggctgcgcgcgaggatttgatggctcaggtcgatcagttcctacgagaggctctagagaagccgagggagaggctttctgtgctaagaatggagcaagaaattttgaagttcattggtgaccctaggtttacagagtatgaattcaatggtcttccaacttcatatttgcgtctcgctgcacatcgcctggcgcagcattacttcctgcagtccattgccataccagacaacagtttgcctgatggaactggttcgcatatcatccttcgtaagacatcatctgagtgccaactgcctgatgtctgccttgcagatattccagttaacctaccacaagaagaaaacatctctgtggcgaaagtagctattaagcagaggcctcaaaagaatctccatggcatgaacagctcaagtgctcactcctttagagacaatcaccagaaaagcgttgaagaaagaaaagaggaatacaacaaagcacgagcgcgtatatttaacaacggcgtcagtaatgctactgatgggagatcagctgaggaagtgacttcactcactactcttcacaggtccacttccttggagttgaactcaaacaatagaatgggccaaggggctgaaattactcttgagaggaccttgactaccacttcagctagcagcatgtcaaatagaagcaagagtgataaggagcctgcagtcaatagaaacagacagaacaatagggttgcaattttcagagaccgtgagtcagagcgcagggatcctgattatgacagaagctatgacaggtatatgcaaagatttgatcctggatttggatttagtggagggtcatacacaattcgacctctgtatgcccctgctgttaactacaacactgaattccctcagcttggttcagcacaccaatcacctgttgctgtcgaacagcaacctcgtccaatagctcagcacatgcctgtgacatggtctgcggctcaagcaaccaatgcaattggctatgggccagatggtgtcatggggccttacagccctggccatattcgtgcacctgtgagatcatctgttttcatgcatgcttcacagcaatatgccataccttcacgccctggagttccatttgtacatccacaggaatccatgggaccatttgcacaagtatgtatgcgttttttcatcctatgtgattcagttcgttctttgttaccatactgagttaatatttgctcgagtattattatagaagcttatggatacacagtatatggttggtactcactataataacattatatgttcctagaaatcctattgcatgatattcaactgcatatcgtaatagtcgtcgtattgcattatatgtcatagtctactcttctccatttcaaactgtaagactgtgtccaggaggtgttgtaaaataggggacacggaactgtagataaaattgtttgatattgtttgcagagtgaagtttgaaataggggatgagataagaaatctgttggagatagcctaagtcgttttgggttttctaggtacatagcttttgctatgcatctagatatacattatgtttagatacatagtaaaagttaagtacattgaaaaaccagcacggcttacaatttggaatggagggggtatttaacttcgaatgagttgaaactccatgagatgcactagttaaatttagttcttggctaacagattttttactggtacagactcaccaacaacaatctaatgctagtttgcgctttgctcggccctggtgaggggcgccgtgcatgcctgcacctgccagtgtgcaatgaacacattacccttcgttttgctggcagatggtagcaggcattaaagaacccagaggtgtaaggcagagtcagccatccatttgatattgtcagcctgtacacactctcggtgtagttgctccctggtccctgcatactgagatgcaggagggacacttcatactctgtactctaaacagaagcaactcgaggtttattgggcaacccctcttccaatccacaagaagctgggaggtgaagcttgggctgtggggccacctgcatgcccctttcaacttccttctgttgcttgctcctcacaggttgagatgctgaaggagcacatcttgccctatttgaatgggctctgttgtcgaaggactgatgacgatgatgaaaaattgggattcgcagtgagtgggcgatcagggaggagagcaaagattggggtggtccagtatgtgaacaggcgacagggatgtgggttagtgcagttctcacgtttcttttttgcttaatacttggtcctcttggcacttattgatgaagatgaaccatatgcagccccattgtgcataggatggttgccgggttgaactgaggaggcatgaagaggacgttgtttcttgctttgcctagtgcgggcccggcaccattgttgatcaggtttagaagcagaggcatctctgttgacacaattgatggtcaggtttacaagcagactcatctggtagtcagtgttgtgttgtaaattaatgagtgttattgaattaccgaacctatttcttgtaccatgcatgacaagcaacgacactagttatgatcatgacgaatcatgtaacagacctgtttactgcagtgcagtgtttaatgttagaccgggttatttgcttgtgtttggtagttgtttaaggtttcactcttctttttttattaaggtattgctggaaactaatacttcctctataccaaaagattagttgttatagctctt

SEQ ID NO: 27393 - DNA, 3373 bp, Zea Mays
gcagaaagtggaggcccccgcgtcgcccccgcttgggcggcgctaaccgtcgtctcctcctcttcctcccctctctacctcgccgccgtcggagctagccggcgggttgttcgcccggctcgtgaggaaggcggcggtggggcgtttcggcgtgtcgtggctcgcggcggcggtggcctgtgctcgcgcgcacgccaacggcggtggcattgctgtgctccaacgcgtggccgaccggtttggtaagcatggcggtggtggtgacgaacaacagggcgagagcggagctggcgtggctgcagtggcgggagcaggtgccccggagttagctgatggcttgctcgcggcggcggtgtggctcacgcgcctgctcttccgtcgagtagtggcatccccggcaatcgctcttgaggctggctcgcggcgccgctcgcgtgttcgctgcgtgcgcggcaacacacgcggggaggagtgggctatgtgggctttggtcggcggcggatctggcattgtcggcggatctaggccccatcggcctagatatggcccaccctcaactgatctacgccttggcgatggttgtcattgcggggtgcatgttggtgcgcaacggaggcggtgcgcccggcgacagctggtttcgatgtcgcgggtgccagggccagtggcggtagctcaagctggtttcagctctggcgagtgggcagtgtggcgcacaaggcaaggtgttccctggttccatgtgcccaaccggaagggatggcagccggcgcagctttgcggctgctgcggcagccggcacggtgcccctctggaggggtgtgtgcggaggcaagggcggtggcgacgacagaggctgcatgctttgacctagggtcctggactagcgatgagatggagggcatcttggacgaaagcttcggcgacagtgacgcctgtgtgcgccacttcactctgttgagggcgacgcattgctatgtcttccatgggcgaaagcccgatccatctggaatgtgacggtggcgtcctggatgtcactcccttcctaaaggcgtcacgtttgagtccgtcttggcctcgacgttgccttcggttgatgctttcgcttctcgacgtctggattgcgggtcgaggtgggattttttgaaacatgaagtcgaagctgccacattaggagatgtggctcgttaacgatgacatgaggcgaacctccttcttcgtggtttggattgttttggaggtcgagcaaaaaactggaggtgggtgttggatcaagatagttggtgaagaatcggagctgcctcgagtgtgggtgtgttgaggcttagcaacgatggcgtgtcacggtcttcctccttctgtgccaggttttaggtgtaggtgccttcgtgtttcttttgaccgtgtgcggcccgtctggtgaagttggagctgcccgtaccttgtgttgagctcggcaacggtgactctgtatgggctttgtgtgtggggttgccgctgcttatgttgtttgggcactctgtgttccatgtttttggaattggaacaaggtcacttgggttcaacatcagggtacaagttaagaaaggttcatctgtatcggaggttgttgttggtccagagaatagaactgttgtttctaaagacaactttctgagagtgaatctcattggtgattttggtggttataccagcatcccagcatttgaggacttctatcttgtgacccctaggaagagtgctggtagtggtgagccacaaaaccttggtgctgaatatagaaagtggatgctgttggagagagttcgttttacagacggtgtcgaatgtaacaagattggtgttggttatgaggctttccaaaaccaacctaacttttgtgcatcgccatttgagagctgtttgaacaatcagctatggacctttttggagtctgacaaaaaccggataagcatgagccgacagccccaatatgttgtgcagggaaggtttcagaggatcaatcaacatccagatgcaagtgttcattctttttctattggagtgacagaagttattaatagcaatttacggatagagctgagtgctgatgacatagaatacatgtatcagaggagtccagggaatataacagacattagtgttccagcatttgaagtcttaagtcaatatggtactgcaaaggtcacaactaagaatattggtacactggaggcttcgtataccttgacatttcactgctcaagtggcatcagttttatggaggagcagtactatatcctcaaaccgaatgaagagagtacccgtttattttacttgcacgcatctacagatcaagcagcaaagtatcaatgtacagctattctgaaggcgtcggattctagtgaactcgacagacaagaatgtgttttttctactacggctacagttcttgataatggaacacagattatcggttcaaatggctacaaattgggtttctttgacaccatcaaaggctatttggttagcttctgggattttctgattgatttaatcagtggcaaatcctgcaggctgaacaaatgtcggagcttttttgacttcagctgccatgcgcagtacagatgcataacctggctcgtcatgttggtgctgctactttttatgttacccgcaggcgcaattgtcctgtatcttcttcatcagaaaggcttcttcgacccagtatacgactggtgggatgacctgctgggggcggactaccgcgcgcaccggaggcacaagaaaggccgccgccaccaccatcaccaccacgaccaccatcaccaccggcaccaccaccaccacgggcactcgcacggccatgaccaccacccccacagtcaccaccacgcgcaccagaggagaaagatcgagcccagccaccaccacgtcctacacaggcagcagcccgggacagcggcagaaggccaccggcacaagcacgacccggcgctcggcgtgcagcacagggaggccgggcacttggggcacaagcgtcggcatggcaaagcggtggtcgcggaggacgccctggacctggagttcagggaacgaaggccatacgaggtcaggcatgccgggcacctgcaccgcgaccaccaccaccaccaccactcctgggaagtgtaggaatagttctgaccgtctgaactttaagacatctagcgtaagatgaagttggtgtaccgtgggcacgggacatgcccttttgcatgcatgcagtgagttagtgggtgtttaatttctagtaaactaatttgtatcgcttcattttatttcattttagtctttaatttgcttaatattgaaactaaaatttcatattcgacaaattagaaaataaaataaa

SEQ ID NO: 27394 - DNA, 755 bp, Zea Mays
atggcctgccccgtggccacgtcgttcacgtacacgacgcaggccacgcgcatgcggtgcgtccacacctcggcggccagcacgttgcactggaggtcggcgaggaccgcgaagatctccgagaggaggcccctcctgtcgggccccttgagctcgatggcggtgtggtcgccgatggagtgcagccccaccgacctccccgctgagttgctgccctttgcgcccagcaaattgctctccggacctaaagccttctcaatgtacttgatggtcttgtcatcagtgatcttctgcccttgcttatcaacgacatggaacacatccatgaaccacccaccatcagaggtgatgtaggctttgaagatgtgaaggtccagatcgctcaggacctgcagcacctccagcagaatgccattcttgttcatgctgtcaacctgcatcaaggtgcagtcgctgcatgtggtgttgtcgatgcaaacccttggggggttgatgcgctggttgaagttctcgtactccggatcaaagtagggcagcatcttcggacggagcccgtgcgcggatccttccactcgtgtcgtctcgtctgcccgatcctttgcggcggcgccggcgccggcgcttccgatcgatcgaccgccttccttcctccttcctcctccctctgccggaatcctgcttctgcttgcttgcttgctcggttccgatgcccagtcaccagctctccgtgtgcccaccacttgatgccgctatag

SEQ ID NO: 27395 - DNA, 1716 bp, Zea Mays
cgtttggccatagttgcccggctacccgccgcgccgcaaacccgagccactcgcctgccgcgctgattagatttctttgcatccgccagtggagtcgaatcgatggcggcgtggtcgtcgccgccgtcgcttcgccacctcctcatgctccgtccatgcttgcccctcagccccacctgccttgctggctccttgcgccgccacatccacagccgctgccgcctcttctcctccgccgcatcctcctcgacactgacccacggcgacatcgcctcgacgcacggtgacgccgatggcgtcgtcgaagtcaaccctccgcgcggaactagggatttcccgccggaggacatgcggctccgcacctggctcttcgaccaattcagggaggtctcccgcctcatggccttcgaggaggtcgatttccccgtcctcgagtcggaggctctcttcatccggaaggcaggggaagaaattacgcagcagctctacaacttcgaggacaaagggggtcgccgtgttgttctcaggcccgaaattaccccttccctcgcgcgcctagtcataaagcaagggacaatgctggcgatatgagcgcatgaccagaggaagaaggcgggaacattaccaatggaatatggatatatttggtgtgcctaaagttcgggctgaggctgagcttcttcatgctattgttctcttatttcaacgtcttggaattacatcttcagatgtggggatcagggtgtccagtcggaaggttcttcaggctgttttgaacatgtactccatcccagatcacttattcactcaagtttgtgttattgttgataaattgggtaaaatgactagggaagaaattgagaaggaacttgtttcaactgggttgtcatctgaagctgtacagggtatcatcgatgtgctttcaatcaagtcattgtccaaacttgaagaggtgttaggctctgatgttgaagctgttgctgacttgaagaaactcttctcctttgcggagcaatatggttatgctgattggatttgttttgatgcatcagtggtccgtggccttgcatactacacaggaattgtatttgaggcatttgatagagaaggaaaactgagagcaatttgcggtggtggaaggtatgatagattgctttcaacatttggaagtgaagatataccggcttgtggctttggatttggagacgctgttatagtggaactgctgaaagaaaagggtctcttgcctgatatgtcacgccaaattgatgacattgtcttccctttggacgaagaacttgaaggaccagcatccagtattgcttcctctctgaggaagaaaggccgatctgttgaacttgtagaagacaaacgtctcaaatgggtatttaagcatgcggagaggatcaatgcgagccggctgatattggttggaaattctgagtgggagcgaggcatggtacgcgtaaaggtgctatcaaccagggaagagtttgaggtaaagacaagtgaactagagtgattgtagaaatgttacgttatgctagcctcggctaatgcttgtgagatgatacaatcaaacagtagctagctatttctggagagtttaaacttattgtaacagcctgtaacaactattcatattcatacagaatggatgggcatgatccttgccagctagtatgctcatctgacattctgactccaagtatacat

SEQ ID NO: 27396 - DNA, 2220 bp, Zea Mays
gttatttctaactattaagtgttaattatctaatgtatttaatgaagtaacacagttagacttgcctaaagaggccagtgaagcttcactggctgcatagagaagtacttttttattatcatgtaaatgcatggttctttggaaccatttggcctatctgattaattattactataaccgggaatgggggcccgaggctataacccggactcctcgccctcgtacctcgttgctggcgaagagcgtcatcaatggcgagtggaggttcactacacagccgccggatcttggagcatcattcgcggtcttggcgcgtctacgcaactgtatcctaagggcgtcgaagaggagagacggtacgccggtggcgacaagtgccgtcaaggaagatgacgatggtggtagggatcgacgatagcgagcacaacttctacacgctgaagtgggcgcactgcagcacttcttcccgccgaccaagctgcaacactactgccttgttgtcgtcaccgccaagccctctgtcgcctccattgttcgccctgccaacctaggtatgcgaatctccaatccatgtgaggattcagagctagactagatgtagcttctgacctatatgattagttatatatgtattgtaattgatcagtgcaggcaccgcgaatgtgttgtcgtatgtggggagcagacagtcaacttgcatctaggtctaaataaaatagtagtgattaaatctttgaatctgtagatcaaaccatctcaagtaattttagttttgttatgaaaatttttagctcagatgaaataattgcattttgattattaagatttaacatacatctggttctatgaggaaggaaatcataagtggagattgaagttgatcaacttgacactcgaataaaagaatcaacaaatattgcaagtgctgaaagttgtgactgctcaagtccaattgctttatcacacaagttctggtggagatacttattctagaatcttcaaaagcatcaacgttagtgttcaagggactgattctggactttcaacttaatgcttctctacctgttgtcatactgaagctactgctcctggaagagcatcaccaacatatccctgatggccctctctgcttcatgctccaagcacttggatgttcaccttgaaatataattattaatagggactgtccaaatacttcagctaagcaaaatagcgacctccataaaaaagcaacctgtaactatctctgaaaattttgaaaaaaactgatggtaactgataagctgctgctagcaactaccgtcgcctatttgttttgtttcagaaagttaaggtgcatgaacctctgatatagcatttgacacactgtactttacacatcacccaggaggaactcttgtgtgggtgtgggtgtgggcagggctagaaggaagaaccatgcatgctactacattcatataatctttttcagaggtttaagatatcaacactaatctgactttgattgtctgaaagaatttatcatgctgctgcttactgttttcggtagggggtcaatgcttactttagctgtgcaataattcctcaatattaaaccgagtttgatcaagtaccttgaagctacaagtagcagtgatttgacaggtttactactgcctgaaacatgattgtaagtgttcttagtatatagctcttctccatttcctctccaactgtcacatgtgctcatacgcttttgccttagtttattacatgtccagaacaccaacataaagaaaacctgccctcgattagcattattcagtagagagagttgtggagaaataaagttaatttgtttgttggcgcaactaattagaccacgttttcattaacaataatactaacatgtttttgttgtagggagggcacattgtggcggctacgagagaccgattttcctgtgtggtggtgacaacgacaccgtggagccaagtcaatgtcggcaagctgatttttcagattggaacctatggttctttttaaagatcgaatatgttctagcatctttaaaagatttgtcagaatgtaaacatttgttttgaggtcatttaagcctcaaacaaaatttcttggacttatttcgttggagggaacgagacatctcgagatctaaatgtgtatagaacatatattttttatgggtatcaaatataattgtgtgtaaagcacgtacatagt

SEQ ID NO: 27397 - DNA, 4461 bp, Zea Mays
aacgagacccccaagtcccaactgccttgatggccaaggaaacaggcctgccagccagccgcctttcgaaaccgagcaccagggagcagacgcggtctctggaacccaggttccagcgagcaaaccatctaaccaggcgctgagaattctgtgcggaggaggcggatggcaatggtggcggcggcggaggggagcgggcgcagggacgccgaggcggagctcaacctgccgccagggttccggttccacccaacggatgaggagctcgtggtgtactatctctgcaggaaggtagcgcggcagcaggtgcccgtgcccatcatcgcggaagtggatctttacaagttcgatccgtgggatctgcccgagaaggcgttgtttggtcgcaaggagtggtacttctttacgccgcgggaccgcaagtacccaaacggctcgcgccccaaccgcactgccggaaaggggtactggaaggcgactggggccgacaagtcgatcgtgcccatgggcagcaccagggcggcggggatcaagaaggcgctggtgttctactctggcaaggcgcccaggggcgtcaagacggactggattatgcatgagtaccgcgtcgctcaagcggaccacaccctggggaagaagggctcacagaagctggacgagtgggtgttgtgccggctgtataacaagagaaacaattgggacaaggtgaaggtcgaggagcaggagttggaggcggcgccgcgccgacagcatcacttgcagagcgcggaggattccatgtctaacagtttccagacgcacgactcggacatcgacaacgtcttcgagctacaaaattgctacggtaacaacatggtgcaagggcaggccatgacccccaggaacgacattggcgtcgtgacggtgaaggaggacaacgactggttcaccgacatgaatctggatgatttgcaggcatcctacaacatggcccatacgacgaaccattcaacagttacgttccaatctttcttcttaaaactccaccccttttgcccacaccggactaccggagacgcccacgtccgcgctgctggccaatgcggcccaattctacacggcttgaacctaggtagccacgagccctcagcccctcactccgtcacccaccagccgccgctacgtgacgaggtctcccgtgtgacacagactgccgtccttcgcctggcgagtggtgacctgcgacctccgtctccggctgccgtcctctgccatggtccgtggaccgtagtccggcagcagcagggctccagcctctgcccgaccgcttgcccgccaccggcgtctgctacctccgcatccggcctctgggcaccggtctcccgtctctgcccccggcgttcatcgtccggtctccgacaccaggccctcagctacagcagtacagcaccagttcccgcaacagcgaggtcatcgacgccgccatctaggacggctcttaaggaagcaggtgaagtgaacctcatgtccagttcttgctcctctttaactagtaactagatcatttgtagtgatggaagctgtaaagaagctccatgctcatctcgttgtttctggcctgcacaactgtcaatatgcaatgtccaaggttatcagattgtatgctcttcatcaatcagatttggtttctgctcataaagtatttaagcagattgagtcaccaacaacttttctttggaatactcttctaaggggtcttgctcagagtgatgcaccaaaagatgcaattgttttttacaagaaagctcaggaaaagggtatgaagccagacaacctgacatttccttttgtgttgaaggcttgtgcaaaaacttgtgctccaaaggaaggtgaacagatgcacaaccatgttataaaacttggatttcttctggacatctttgtttccaattctctgatttatctatatgctgcttgtggtgctctggcctgtgcaagatccgtctttaatgagatgctagttaaggatgttgtgtcctggaattccttgattggtggatacagccagcacaatagacttaaagaggtattgacattattcaagctaatgcaggctgaagaagtgcaagctgataaggttacaatggtcaaggtgatttcagcttgcactcatctaggagactggagcatggcagattgtatggttaggtacatcgagcataatcatattgaagtggatgtgtacttggggaatactttgattgactattactgtagaattgggcagctgcaatcagctgaaaaggtgttttctcagatgaaggataagaacactgtgacactgaatgcaatgatcactgcatatgcaaagggtgggaatttggtctcagcgaagaaaatattcgatcaaattcctaacaaagatttgatttcctggagttctatgatatgtgcatactcgcaagctagtcacttctctgattctctggagctcttcaggcagatgcagagagccaaggtaaaaccagatgctgtcgtgattgccagtgtactttctgcttgcgcacacttgggtgcacttgatcttggtaagtggattcatgactatgtgaggagaaacaatatcaaagctgataccattatggaaaactctctgattgacatgtttgcaaagtgcgggtgcgtgcaggaggcactacaagtgttcacggatatggaggagaaggacaccttgtcgtggaactcaatcatactaggactagcaaacaatgggtttgaggatgaggcgctggacatttttcacagtatgcttactgaaggtcccagacccaatgaggttactttccttggtgtgctgatcgcttgtgccaacaggcaactagttgaggaagggcttgaccactttgaaaggatgaaatcagttcacaacttggaaccacagatgaagcattacggatgcgttgttgatattctcagccgtgctggtcagctggagaaggcggttagttttatcagtgagatgcccctggctcctgaccctgtggtttggaggatactgttaggggcgtgcaggacacatggtaacgtggctgttgccgagatggccaccaagaagctcagtgaactagaccccggtaacagtgcggactccatgttgctgagcaatatttatgcaagtgctgatcgatggagcgacgccatgaacgtcaggcgatggacggctgataatgcagtgaggaagtcgcccgcttgtagtgttgttgattcagctagctcgacgaatagttaggacccaccgaattgccttcgttgtcaggtctaattttgtcaacagcactgtctattatggtagtaacctcgtctcaatttggtcaggggaatacatggcgccggagccgtgacgccccagtggtgtcttaagatgtgtcgaccctttcagggccttggaattgacagaacaaagggccccggaaataccagcctgactcccagctaggtctaatgcaggcctgtcttctactgatggaatgttgaagaaatctttatcagcatccgagagtgtattttctcagacgctgacatgtattttgcgaagtcgttcttcgccttgctgctgatgcacttaaagagaggcgcagcaaggccactttgatagagttcatcgtctactatggataaggcctggtgcgagtgttaattctctcgagtttatgtttgttcgtcggcgcatagcttctgtttaggtaggtgagtccgagctcgtgcctgaccgcgatgacagtgtgctcgagctcgggatcgtcaggaagctcacgaccagctgcgccaaggccgggaggagcatctccctcgcgctcgaggcctttccctgcgacatccaggagcagctcaatcggttcatggatggcagaatcgatggcatactttgaggctttatacatctcactgggcaccagagcgatggcaggagtatgaaccacttttgaattactgtcgtgataatggaataaagcttgttgcatgtgggactccacttgaggtggtaagaactgtgcaaacagaaggaattagaagcctttcaaaagctcaaagaaagctttatgctcctccagctggctcaggcttcatttctggctttacatccatctcaggccgatcattgatagacaaaatttcatcaacttgtggttccccttttggcccaagctcatatttatcagcacaggcaagagtagtcgatgattataccatgtccgagacaataatgaaagaaattactgatggagatccttcaggaatgctcgttgttgtaactggtgcgagtcatgtaatgtatgggccacgaggaattgtagtttttttttataaaaagtaacttcatttgataacatacaagaaaggtatgatattttttttctaagatggcaaacgcttgtacgtgaataatatattaataaaacttgatttgatttttagaccatc

SEQ ID NO: 27398 - DNA, 2637 bp, Zea Mays
cttgaaacttggagacttcgtacacccaatgaatgggatcatatgactgtttggtatgatctgctccaatggaggaatgagatgtacaattcagtaatagatgcattcaaggactttggtcaaacaaatcctcaacttcatcatcttggctaccgagacaaggcttggaatgtgaataagctcgctcacatagctcgcaagcaaggtcttcctgaagtttgtgtaactatacttgataagatgtatggtcatgctactatggaagttcaggaagcatttgtgaagatatgtgaacaagctaaggcttacttagaaatgaaaggagaactagtcagtggtcttaacttaatcaataataccaatttagaatttttccctgtgaagaacaaagcagaaatatttcgtctgagaggtgattttctgttaaaaatgaacgaatgcgagactgcaaatcagtcttattcaaatgccataactctttttaagcatttgcccaaaggatggattagctggggaaattactgtgatatgggcatcaaatatggagtttcaaactcaaggagccatctagctcgaattctctaccttcttagctttgatggacaaaatgaacctgttggaagagctttggataaatatcttgagcagctgcctcactgggtttggctttcatggatacctcagttgttgttgtcgttacagagaagtgaagcccaacactgtaaattggttttgatgaagatagctcaagtttacccgcaggcattgtattattggcttcgtacatacttgatggaacgccgtgatgttgctactaaaactgaaataggaagaaacatgttggctcagcagcgcatgcagcaagctatgatggcaaacaatgcggccaataacttacctgacggaagtgcaagggcatctaatcatgcaggtagtaacatgacttctgacaaccagtctcatcaagcctcccaatcagttggtgctgcaggttctcatgatggtggtaatgtccaaggacaagatccggaacgatctacccctgaaggtggcacaaataccagccatgatcaaggtcaacagagttctacaggtgctgagggctcacaagttccgcttagacgtaatagcggacatgggtgggtaacttctgcagcaagtgcatttgatgctgcaaaagacataatggaagctcttagaagcaaacatactaatctagccaatgagcttgagcttttactgtcagaaattggatcacggtttgttactctgcctgaggaaagacttctagctgtggttaatgctctgcttcatcgctgctacaaatatccaactgcaaccactggcgaggttccacagtctctcaagaaggaactctctggtgtatgtagagcttgcttctcacaagatgctgttaacaagcatgttgattttgtgaaggagtacaagcaagattttgaacgtgatcttgacccagagagcgctactacttttcctgcaacccttgctgaacttacggagagattgaaacactggaagaacattcttcagagtaatgtagaggatcggttcccagcagtattaaaactggaggaagaaagtaaaacacttcgggattttcatgttgttgatattgaactcccagggcagtacttcacagatcaggaaatcgcaccggaccacactgttaagttggacagagttggacctgacattccaattgtccggaggcatggcagtagctttcgacggttgacactcattggttctgatggttcacagcgccattttattgttcagacatcactgactccgaatgctcggagtgatgaaaggatgctgcagctattccgtgtgctaaataaaatgtttgacaaacacaaagaatctaggcggcggcatctggctatccatactccaataattattcctgtttggtctcagcttaatcaagccgtttcagggcagctctctcctgaagcaattgtggagctacgtctgcaagcatacaatgagattacaaaaaatattgttaatgataatattttctcccaatatatgcacaagattctgccaactggcaactacctgtggaccttcaagaaacaatttgcaatccaagtggctctctcctgcttcatgtcgtatatgctgcagattggcggcagggctcctaacaaaattctatttgctaaaaatactgggaagatcttccagactgacttccatccagcttatgatccaaatgggatgattgagttcaacgagcttgttccatttaggctgacacgcaacttgcaagctttcttctcgaattttggtgttgaaggtctcattgtgtctgccatgtgctctgctgcccagtcagtggtttctcctaaacaaagccagcacatttggcatcatttggctatgtttttccgagatgaactgttatcttggtcgtggaggcggcctctgggcattccatcagtccctgtcgctgctggaatgatcaacccatcagatttccaacagaaggtggtaaacaatgtggagcatgtcatcagtcgtatcaagtcaatatcgccacattgtctggctgaggaggaagtgtttcttggtgggattaatattgtatcattatggtgcttctga

SEQ ID NO: 27399 - DNA, 958 bp, Zea Mays
gtacaacactgtgaccaaggaatcgggctttagggatccctatgtccagtaccaccacctcgcctccgccgccggccgccggggaccatccccgcgttctgctccgaggtttcctctcccgtgagacatgcaagttggtgcaagggagcttctattggatggcacagtgatgacaacaagccttatcttaggcaaagggcattcacagcagtttgctacttgaacaatcatggagaggactataagggtggaattttgcagtttcaggatggtgatccttcctgtattgttccagttgctggtgatgttgtcatatacacggctgatactcgtaatgttcattgtgtaaatgagtctggttttgacatacgatgtgctagagtgcatattctggggtttagttttcactcaagtagtggtgaatgcaatatatctgcgtcaccagctgaagatgacccaatagagttgcttggaaagcaactgcggctcgggaggggagatgatgtctttgagaaaatattttctaacagcttacatgctcttcaggtggtgcaattctactactggaaaaaacatgagctggcagcaaggagggaacaaagtgttgttagttcaggaacagtctgctgtccagttacacatcattcaaaaggaacagaattaccattaccatgcaatcacgcacttgcacaaactatatttggatcatataatactgaggagattgtccagtggaatgattttgcattagctgttgctatgtgggaaaaatattcagaagagttaaagaaacagttgttgacatttttgccatattggttgtccaatgaaaccatttatgttgttgatacctctgagctgcagagagccgaaccaatctaactctccaatggtgatttggactgcctcattcttatgcgacatagctgtggcgtagatatgtttctctcaagctcca

SEQ ID NO: 27400 - DNA, 1239 bp, Zea Mays
tgctgaacctgtctctcatttgtctctcttttcttttttggaaaatgttgtccagtttgcttggtgcatcagccttctcgatgaatgctttactgtgtaaacccttccgtgagatcatctacaggagttcctaaaagaatctaaaaaaacaattagaaaatcaagagtttttaagtggctaaaaaaggtatgagcatatacccacttttcaggctgcaagtccaccaattcggcctcatctgcgacaacctcgacgcagtcaacaagttcgagcccaattacaggcttatcagaagattggtatattatatgctcgagtggtgaaaacaaataataccatgaatcccgatgtctcatgcagattggtatattaatgcatgctttaaagaataggaatatataagagataagacttcttcggtttccactactatcatcacctgacatttaatcagaaggcgtagacaatttctaacttattcatgtacatatttactgttctgtaacaattactgtccataaggtatacttactacatcgataagctttgttgcaggtaattcccattcattgttcttattgattaacatgctgacacttaagctaatgtgttcagtgttacgaggaacatactccaatagaaatcttcaagtttgaaacagagatttactacaatttgtttaacctgaagatctaacaactctatcaaaacctttgtttcttacatgcctacctgctttacattgtagcctccccatccacccacccacccaccaagagtgaaaaaatctaattccgtcatttttataaaaaatgttatacttttagtgcttcctttgttaagcacctgaagtgacatctttatttcttccaaaaaaattgttgtgttatactcgcaggcccctgttcctctatccatgttttgaacatacttcatttcccggttatacaaaaaaatctttcaatgcattttttggtgaacacgaacatatttacagaaatttgttttaatgagtgttgtcttatgttatttccatgtggcaatacttcagtttttctctttgtcaccaccttaacgtgtactactacagtgtttacaactatagattcgtcaagtattgccctaattaagttacattttaagatattataatcccattaaactgtctaggtttctcttaccaatttaatagttaaagaaattttatgatgcattgtatttgtagaagtaaatgttcg

SEQ ID NO: 27401 - DNA, 1994 bp, Zea Mays
accaaccaaaaaccccgagcccattaaaaccgcgccaccccgcctcgcctcgcgagcgagtgccactgctgccacgaccccgacgcggctccggccatggcccgcctcctccgggccctcgctgccctcctcgtcctcctcctcgcggccgcctccgtcgccgtcgccgacgacggagaaacactgctggagatcaagaaatccttccgcgacggcggcaacgcgctgtacgattggtccggcgacggcgcgtcgccgggctactgctcgtggcgcggcgtgctatgcgacaacgtcaccttcgctgtcgcggcgctcaacctctctgggctcaatctcgagggtgaaatctcagcggccatcgggagtctgcaacgtcttgtctcaatcgatttgaagtcgaatggactctctggacagatccccgatgagattgggatttgtcatctaacaatctagaaggagacataccattctccatgtccaagctgaagcaccttgagaacttgattttgaagaacaacaaactggtgggagtgatcccatcgacactctctcaacttccaaatttgaagatattggacttggctcaaaacaagttaagtggtgaaattccgaatctaatatattggaatgaggttcttcaatacttgggattgcgaagcaatagtttagaaggaagcctctctcccgatatgtgccagttaactgtgatgtgaagaacaatagcttgacgggtgcaataccagaaaccatagggaactgtacgagctttcagagatttgtcaaacaatcatcttactggagaaatcccgttcaatattggtttcctgcaagtggctacgttatctttgcaagggaacaagttctctggtcctataccatcagtgattggccttatgcaggcgcttgcagtgctatctgagtttcaatgagctatctggcccaataccctctatactgggcaacttgacatacactgagaaattatacctgcaaggcaataggttaactggattgataccgccagagcttggtaatatgtcgacactgcattacctggaactgaacgacaatctgttgactgggttcattcctcctgatcttggaaaacttacagaattgtttgaattgaaccttgcaaacaacaaccttataggacctatccctgagaatttaagttcatgtgcaaatctcattagtttcaatgcttatggcaataaattgaatggaaccattccacgttcatttcacaagcttgagagtctgacttatctgaatctgtcatcaaatcatctcagtggagcacttccaattgaggttgcaagaatgagaaatttggacactctggacttatcctgtaacatgatcactggttcaattccctcggctattgggaaactagagcatcttttgaggctcaacttaagcaaaaataatgtggctggacacattcctgctgaatttgggaacttaaggagcatcatggagattgatttgtcttacaaccacctcagtggcctgattcctcaagaggttgggatgctacaaaatttgatactgttaaaattagaaagcaataatattactggagatgtctcttcacttatttactgcttgagtctcaatatcttaaatgtatcatacaaccatctttatggtactgtacctacagacaacaacttctcacgattttcacccgacagcttcttgggtaaccctggactttgtggctattggcttcactctgcttcatgcacacaattatccaatgcagagcaaatgaagagatcctctagcgcaaaggcctcaatgtttgcagctattggtgttggtgccgtattgcttgttattatgctcgttatcctagtagttatttgctggccacataactctccagtgctcaaagatgtctctgtaaacaaaccagtctgacactcccccgcagtctaatcgggagcatcgctaacggtcaggctggaccggaactcctg

SEQ ID NO: 27402 - DNA, 1728 bp, Zea Mays
atcagcgagcacaaatcgaaccgtggtcgtacacgggcctgtttgcagcagcaagcgttcaagaaatcaagcggccgcctcgtcccctccgcgcccggcgcctccgacgcccaagcagcgtgaccgtggaagggacgaagaagagcaccctcaagcggccgcactaatcccaaaccggcctccgacccccaagcagcctcacgctgctcgatggcggcgccgtatcaccagcctacgagcctggaggaggtccgcactctgtggatcggcgacctccagtactggaccgacgagaactacctctacagctgcttcgctcacaccggggaggtacaatctgttaaaataatacgcaacaaagtaacaagccttcctgagggttatgggtttatagagtttgtttcacatgaagctgctgagaaaattctccagacttacaatggcacacagatgcctggaactgaacacacattcagattgaattgggcctctttcagctctggaaacattccgagtgaactattcatctgttagaggtgctaaggttgtcacggatccaaataccgggagatctaaaggatatggatttgtaaagttcgcagatgaaaatgaaaagaaccgtgcaatgacagaaatgaatggtgtgtactgttcaacgagacctatgcggataagtgctgcaatacctaagaaatccactggctctcagcttcagtattcagctgctaaagcggtgtatccagcaacagcgtatgcaatgcctcagctccaggcagttctccctgacagtgatcctacaaacactacgatatttattgggaatttggacccaaatgtgatagaagatgagctgaggcagatatgtgtacagtttggagaacttatatatgtgaaaattcctgttggtaaaggatgtggttttgtacagtatgcatctagggcatcagctgaagaggcagtacaacgtcttcatggcacaatgattggccaacaagctgttcggctttcatggggccgaagtcctgcgagtaaacaggattcatcagctgtgtggagtcagcaagcagatccaaatcagtgggcaaacacttactatggctatgggtatgatgcatatggatatgctcaggatccgtcatacgcttatggtgcttatgcaggatatagccaatatccccaacaggttgagggaactgttgacgccacttctgttgctggtagccatccaggcatggagcaaaaggaggagccatatgatccaatgaacatacctgatgttgacaagttgaatgcttcatacatggctgttcatggtagagccatgctagggcggtccttgtggttgaagaccaacccgctgccccaaccgacataagcatgtttcctcccccgaagactacagccagtgctggtgggcgcagctgggtttcatcgcgcagatgattttgcccttcccagtagtcacgttaaactctgaaattgttgtaggctggccagcagcttcgtctatattgagaacattcgatgtatgataggcgtgactcttttgtactgtatttcttaggctgttggttaatattattaggacaatattgagggagcggtgaaagtcaactgtctgtatttccaactgattattctgctgttcgatactcaactcccgactcccgttcacttggcaggacaatggcatatctgatatttctatcgttgaattacctttactta

SEQ ID NO: 27403 - DNA, 3878 bp, Zea Mays
cgccgttgcggaattgcggagcgcgccgccaaaacaaacgcgtcctgctgccggaatcagaagatcccgaggggttctgatctgagggcccaccatcctctctacacggcacaggaacccaactactactactacaatcgttgccagggagctcaaccgactcgggaccaaaatcggctgctgttgctggctgggacgaaatcggaggcatccgcctttctcgagagatcgagctccgcgccggagcaggcgggccaggcggtgccgctgctgcctgctggtgggtttacaacatagggatggagtcgagatccatccggattcgacattcgaggtcttctgctttgctgttttaaacctgtagaggcagaggacttgggaatgctgaaaaatgtgcctgcaaaccgacgggggaattttttgtgcaaacaagattcgacctctgttcaagcagatattgttggcttctcatgagtatgggcttcatgctgatactgcccttattttcaatgatttaaagcacagtagattgaaggcctttatatttgttggccatcaccttggagacgacggttaaaatcttctacattctttgataagtggtgtggcgcttgttcattattctatcgttgcatagtttgatacgatggatgggaggaggacaattttgatgggacgatatgaaattggtaaacagctgggacaaggaacctttgcaaaggtcttttatgctcgtaatcttactactggcctggctgttgccataaagatgattaacaaggacaaggtcatgaaggttgggctcatggagcagataaagagggagatctcaataatgaggttagtgaagcatccaaatattcttcagctttatgaggttatggctagcaagagcaaaatttattttgttctggagtatgctaaaggtggtgagcttttcaacaaaattgctaaggggggaaagctcagtgaggatgctgcgaggaaatatttccagcagttggtcagtgctgttgatttttgccacagtcgaggtgtctatcaccgtgacttgaagcctgaaaaccttctacttgatgagaatgaaaaccttaaagtctcagattttggcctaagtgctctagctgagtccaagaggcaagatggtctcctgcataccacatgtggaactccagcttatgttgctcctgaagtgctgagtagaaaaggttatgatggtgcaaagtctgatgtgtggtcttgtggagtaattctttttgtgcttgtggctggttaccttcctttccatgacacaaatttgatagagatgtacaggaagatttccagagccgagtttagatgccctcgttttttctcaactgagctgaaggatctgctacataaaatccttgttccagatccaagcactagaatttctatctcgaggataaagaggagtgcttggtacagaaaaccggttgaagcacatgcaaagaaaaatgaggcagaaacaagcgagaatacttgtacgggtgaaggtacaacttctgtctcaacagagtgcagtacgtctgagggaaatcaagggccattaagcctcccaaacttgaatgcatttgacatcatctgtctctcaacaggttttaatctttctgggttttttgaggataagtatggtcgcagggaagagagatttactaccagacagcctgtaacaacagtatttacaaagctgaaggagcttgccaaacgcctaaagttgagggtcaagaagaaagaaaatgggaccttgaaattggcagctccgaaggaaggaaagaagggtatgcttgagcttgatgcagagatttttgaggttgctccttctttgctcttagttgagttgaaaaaaaccaatggggacacgctggagtatcaaaagctagtgaaagaggagataaggccggcactgaaggatattgtttgggtttggcaagatgatcaacaccagtgctcacaatcaccagagtctctattatcaccaccggagacacaggatgaattgcgattatcattgcctcagcaagagggtcaagacttcttagaagccccattgccatcactatcgcttgaccagttgaaatcaccaactgccccagagcaagcagagcaactgccacaaccagaacagttgcaaacgccaatcgctccagaggagcaaattaactagctctaacagccagctgaggaacgtctctcctggagacatacaaaggcatccagatatgtccccatcgaagaaacagttaacaaacaacaatgattcgctgtactggtcaagagcgctctcccctcttcctcttgtagctggtgtggaggctgagctgcatccggtctctgttggccataagagcatggatgcagaaatgaaacagccacttgagggatccatgtccctgaacatcgacagcgaaggtgaaccccacattggaaatggatcgatcgtcgtcgagaaccctgcatctgacctggtgaagtcagaatctgaccgaataaaaaccttttaccagacggtcctgtcggctatcatggtgttcgtcacggcagcgctatcaagctacaaggacatgaagcctctttactcgaccacaagccacggcaaagctcacctcagcaacctcctagtcgacgagggcctattcatattcatgaccttcttgtgtgctatggtcctaatgatgtctgagttcgtcgtgcaccagcatggccggcggggccatgtctggtgctgggttcgcaccattctcgttgcagtcaccggtgtgatgctaatcgtggctgacacaatcctcctcatcgtgacgaaccgaagcaacatgttgctgtcagttcttcttgtaccggaggtgttgcttttcggcgtggccgtgagcgttggagcatggatgcaagagagtttacccagctcggagcttggcagcaggtacgattccgccatgaagggaacctttgatatagctacagttggcaccattgtctcgttcacgcttcaggggggcatcgtctttggctacctgaaaaccccagacagtaatcaggtcaagcatgacccgccgctggacctcgctgcgtgctacgccacctcgacgctctccctgaccggaatgacaatgtgtgccatgccgctggcatatctccccaacggcatgctggaggttctcgtcagagtcgtcgagaggcttaggagtgctgtgctggccgctctggcgatgatggcgctggtcgtctcagtggagttcctggatggattcgtcgtggtctccttctttcccgacgccgtcacgattgccctgtactacgtggtgaagctgttctcggcatgtcaaccccgagaggagatctcacagctggacttcaccttccggatcgttgccgccgcggggttcacgctaatgactggactctatgcggcttttacggggacagatcactatggcttcaacctcaagaccgctatgttcatcctgttgcttgcagttgtgtcgagcttgagccgtctggcaatcccacttcacatgcctgaggcgggagtgggaggagtcatcgagttcggcattgttagtatagctctctcttttcccctgctggcgcttctggctgccattccattggtgttcaaggtcttcgtcgaccattacatcaatcgctagtctttgggttgtctggcgcaattcttcctgtggtacagtgccagtaatgaatgatgcgtttttaaactaagggcataaatttaaaaatcttatttttattactgcatttactcagtctaggttgcttgtttggaagagcaacagcaagagactagccagatcctttgtaaggataaatttggctattattagaagaaaaatgtctttaaa

SEQ ID NO: 27404 - DNA, 1694 bp, Zea Mays
gtgtcaccgagcgccaaaaacagaaaaaacccctgaactccgaagacgggcagggcaggcaccattggcatcagccatgccgccggcgccgccaccgcaacaacctaagaatcgcagccgtgttcccacgccgaccggagagaaccgtcggcctcagcgtcggatggagagccggaacgcgtcggagcgggccgcgttcttcgcgcggcgagaggcagcggcggtgctccggcgcgtgcttcgcggggacgccaccaggcgcgccgccggctccataaaatcccttgtatactccccaaccgtccgcaacaagcgcgccaccttcgctctcgtctgccagaccctcaagtacctaccaattcttaaagaggttttagcatcgagtgaaatactgagcagcaaatggaagaaacaagaggaattggtttatgtgactacctatgacattctctttggtcagggaattgcggtttctgggtcagtcgagcaattaattatgctacaaaaggattctcttaggactactcttgataaagtttgtgcgagaaagagagtccgctgcgttgaagacctattgagcaataaatcagccgtcaaaccaaagccccgatttcttcgtgttaacacactcaaggtcactacagagtctgtcattgaagaattgaacaaaatgcacatggttgacaaagatgaaatggttccagatatgttggtactcccacctggaactgatttgcataaccatccgttggttacagatgggaaagtgtttttacaggggagagctagttgtatggtagcagttgcattgtgccctaagccaggctggaaggttattgatgcatgtgcggctccagggaacaaaacagtccaccttgctgcactcatgaatggagaggggagtattatagcttgtgaacttaacaaagagagggccaagacattgcaacatactgtcagaagatctggagcaaacaatattcgaatagttaatggcgactttctggaagtagatagaaatgatccatcatatgctgaggtccatgctattctattggacccctcgtgctctggttctggaatatctacagagagacttgattatttgcttccctcacattctagagatagtcaggatgatgcgggtacaagctcaagggtcatgaaactctccgcttttcagaagaaagctctctcccatgctctatcatttccgtcagtggagagggtggtctacagtacttgctcaatccaccaggcagagaacgaggatgtcataaactctgtcttgcccttagctacatccctcggatttgagctcgctacaccgttccctcagtggcaccgccgtggccttccagttttccaaggatctgaacatttgcttcggacggatcctgaagatggcctggagggcttcttcattgcattgtttgtcaggaaagcaggccctacttcagaagagcctagcgaagatgccacggtagaagtaagaaccaaacaagtgcgcgggaggcgaaatggggtcagggcgttcagctccttgaggctgtccaggatgatcctctggtgaccaaaggcgttctggatttaatttgatgtatcattgctatttttggtagtcaatgtggtaacaggttgatattgtgatccgagaatattgcctagagtgagcatgacattttgtaatgggg

SEQ ID NO: 27405 - DNA, 3080 bp, Zea Mays
ttccacgcccgcctgctcgctaacaagtactatatggtattgccgtgccagcaccaacaaacaactgttgtcgtccactgcttttgcttctgggtctttcgttcgtagatataaaacggagggaacgcagagccgggcgcctgtctggattcattctgcgagagatctgctggggcattgattcgtcatcaggctcagctctgatcagcttcaaccatcatggggagtcaagagtcggagcaggccaaggtgctcccgggaaccgactgcccgcagcagccaccggcgagcaggacctggcagaggaggttcgacgatgaaggcaagaacgtcgccatgttcagcatgaccatgagcgacctggtggaacttgttgcggtctatgatcttctgaggaaatggatggacaactgctaccgtggcgtaccggtcggtgggataggttcaggaagcatagggaggagctacagagggtacttccagcagttccagatattccccgtgaccaacgaagagaaacctgtcctagcaaaccagttctcggcatttgtttcgcgcccgaacgggaacaagtactccacggtgctgtcggcgccaaccgctgaccttctcaagggagtcggcaaagccggcattggatcttgggactggaggttgaaggaggacaggtgcacttaccacgccctgttcccaaggtcatggacggtatatgatggtgaacctgaccctgagatcaagatcacctgccgtcagatatcgcccttcataccgcacaactacagagagagcagcttcccggctgcagttttcacattcacggtgaacaactctgggagctcacctgcagatgtgacgctgctcttcacctgggcaaattcagttggcgggaagtcggaactgacaggaaaccacgtgaattccaaaatgacggagcacgacggcgtccgtggcgttctcctccatcacaggacggcgggagggcagcctccggtgacgttcgcgatcgcgtcccgagagaccgacggtgtccgcgtcagcgtctgcccgtccttcacgatcgcgtcgggcggcccgtccagctccggcgagcccacggcggcggccatgtgggacgagatcaagaagcacggcgcgttcgggcacgccggcgccggcaacggcaacgcggcgagggcggcggcttccaaggccgggtcgtccgtgggcgcggcagtggcggcgtcgacggccgtgccggcgggggcgacgcgggtggtgtccttctcgctggcctgggcgtgccccgaagttaagttccccgccgggagcacgtactacaggaggtacaccaggttctacggcactgatgccgacgcagctgcagagcacctagctcatgatgcccttcttgagcatatgaactgggagtcccagatcgaggagtggcagaagccaatcttgcatgaccaaaggctgcctgaatggtatccagttgctctgttcaacgagctctactacctcaacgctggaggcaccatctggacagacgggcaggctccgaagagggccggcttcgcttcgtcgttgacggccaccgagccgttctccatcgacacgctcctcccagtcgcagcgggcggcagcgcggtggacggcgtcgtgcgcgcggtggcgtcggcgacggagcggtcccactccgcggcggcgttcggcgcggcgctactgcgcggcggcgaggacaacgtggggcagttcctgtacctggaaggcatggagtacaacatgtacaacacctacgacgtgcacttctacgcctccttcgcgctgctgtccctcttcccccggctggagctgagcctgcagcgggacttcgcgcgcgccgtgctcctccacgaccctcgcccccggcgcaccctggacggcaggaccgtggcgcgcaaggtgctgggcgccgtgccgcacgacgtcgggctcaacgacccatgggtggagctgaacgcgtacatgctgcacgacgcggcgcggtggaaggacctcaaccccaagttcgtcctgcaggtgtaccgcgacgccgtggccacgggcgacgccgcgttcgcggaggcggtgtggcccgccgtgtacgtggccatggcgtacatggaccagttcgaccgcgacggcgacgggatggtggagaacgagggggtgcccgaccagacgtacgacatgtggtcggtctccggtgtcagcgcctacacgggcggggtctgggtggcggcgctgcaggcggcggcgggcatggcgcgcgtcgtcggggaccgccccgccgaggcctacttccgcgcgaggcgggacagggcggcgcgcgtgtacgatgccgagctctggaccggcgcctacttccgctacgacaacagcggcggcggcggcgccagcgagtccatcatggcggaccaactggcggggcagtggtacgcgcgggcgtgcgggctggagccggtggtggaggacgccaaggcacggagcgcgctggcgaccgtgctggactacaacgtcatgcgggtcaagggcggcgccatcggggccgtgaacgggatgcgccccgacggcgccgtcgacgcatcgtccacgcagtccaaggaggtgtggcccggggtcacgtacgccgttgcggcggccatggtccacgagggcatgacggaggccgcgttccggacggccaagggcgcccacgacgccgcctggggcaacgacggcttcgggtacgcgttccagacgcccgaggcttggacggaggacggcggctatcggtcgctgcactacatgcggccgctcggcatctgggcgatgcagtgggcgctgtcgccacccgagctccacagggatctcaggacacccgaggcgcgatcctcggaggagccgtcgccggcggacgctgccctcgggcaggcgcagttcgacaaggtggcgagcatgttgaggctgccggaggagcagcagcccaagggatacctttgggccatctacaacctcgttaggcaaattgtgctccccgcatgaggattctcttgctccaagcagccgcactcatgaatgcaaattgagcccgttattatata

SEQ ID NO: 27406 - DNA, 2314 bp, Zea Mays
ctttcctcaaaaacctcgggcttcccctggcttccatgcagcagtccccccttcgtgtcgcactcgcacagtcgcactccataaggcaaggaggaaaacagagagacgaccaccgctccgcgccggccggccattccatccggcaatggcctccgccgccggtgctgcgttcgccgccatcaccctcctcatcctcgtacccctcaccgccgcttcggactccgaccacaagtaccaagcagcggagcctgtgacgctctgggtgaacaaggttggtccgtacaacaatccgcaggagacatacaactactacagcctcccattttgccatgcgtcagaaaaccatgtgcataagtggggaggactcggcgaggtccttggtgggaatgagctcattgacagccagatcgacataaagtttggaaagaatgttgataaggccacaatttgttcgctagacctcgatcttgtcaaggctaagcaattgtcggatgcgattgagaactcatattggtttgaatttttcattggttttgttggagaggcagacagaaacaatgataacaaatatttcctattcacgcacaagaatattgtcatcagatacaatggcaatcagattatccatgttaatcttactcaagaaagcccaaagcttattgatgtgaataaggcattggatatgacatattctgtcaaatgggaaccaacaaacataacatttgctcaccgttttgatgtgtatctggactatcctttctttgaacaccagattcattggttctcaattttcaattctttcatgatggttatctttctcactggactagtgtcaatgatactgatgcggactctaagaaatgattatgcaaagtatgcccgtgatgatgatgatattgaaactctggaacgagatgtcaatgaagaatctggatggaagcttgtacatggtgatgttttccggcctccttgcaatctagttcttctttcagctcttgttggtattggtacacagttggcagcactgattctactagtgattttgttggcaatcattggaatgctgtacattgggcgaggagctattgtcacaacattcattgtttgctatgctcttacttcattcatctctggatatgtcagtggtgcattatactcacgtcatggagggaaaaactggatcaaggcaatggccatgacagcatcacttttcccatttatgtgctttggaattggcctggtgcttaacactattgctattttctatggatcgttagctgccataccatttggtacgatggtggttgttttcatcctgtgggccttcatctctttccctcttgcacttttgggaactgttgttggtagaaattggagtggtgctccaaacaatccctgtagggtgaagactattcctcgccctattcctgagaagaaatggtacctcacaccatctgtcattgcgcttatgggaggactgcttccttttggtagtatctttattgagatgtactttgtcttcacatcgttctggaactataaggtctactatgtttatgggttcatgttgctggtctttctgatactcatcattgtcaccatatgtgtaacaattgtcggtacatatttcttgctaaatgcggagaactaccactggcaatggacttcattcttctctgctgcttccactgcggtgtatgtttacctctactccatatattattaccacatgaagaccaagatgtctggattcttccagaccagcttctatttcggctacactctaatgttctgcctaggcttaggaacactatgcggtgccgtcgggtatcttggatcgacattgtttgtgaggaggatctacaggaacataaagtgtgactaagtgaagataatatcgccccattttgggtcagcgcagagaaaatgtatggcagagccttatttgattgagcgatcactgattctaaaaccaagaacgcaggtcattttgtgaaatatgatcgttgcttggcgccgagctgaaagccatgtttttctattcttgtcctcgtttctctctgatttcttctggacttggacaggcaacaaattttcatgttgaattagttatatatatagcggtggttgtagttgttgagtagttctgtagtatataccacaattgttatccttggccccaatgatacctcagattgatgggtataaactgtaacatttacattacctgatgtttgacgatgaacacagttccaaataatcatgttcggtactggaggatcgagatttttgagaggcaacatcaaagaaaaaa

SEQ ID NO: 27407 - DNA, 2071 bp, Zea Mays
ctagtccgcaggcaaccgagagcccgagaccgcccaggtgcccaccactccaccagccaaccctagagcctctccagtctccactgctcggccgccgcctgccgcagcccgccgtccactggtcccgcctcccggcgtccgctccacgcctccactgctcccggcgtccgctccattgctaccatcgtccggcgttctgctcctgcgccctccctttgattcgttgccagttgtagtgtccgggcagatttgagctgtggcagcaagcaaggattgacgaagcgtgcgttcccatcgcaccaccatgggctacacagagatcgacatccacccctctgggagcggcaagatgtgatagatattagtatgaaagataaaaactagaatgctatgcctgtcagaggagctttcttcagtttcagaacacacctctccatctttcggtgcttggtggatcaccgtctaaacgatccaccaccagaaccgcccaaccccaagataggcagctccatctcagtcgttgtacccgttcaatggcgagctggtggcagcgatgtaggagatgatccatgccgaggtgcacaagtacatgttagtggacggcacctgccaaagatacaccgtttctactggtacacattttattttttatggtgagaattaattttgtagcttgcgcaaaaccaaaggttgagtgatttgtcaaggcagaaatcagtataatgataggtgtgcttgagcttttaatagctggtttatttgaacttttatctttttatgatcatgatatattgagacataaatatattacatgtacctttgcagtttttcagttggagaaaacatttaagacaacattttcatcgtttgttctccatatggggcttgtttcacgccacttgaaggaagaagggaatggtggtgttaagttcggacaatacatctacacatcttggagcatcggcatcaatgttctcaatcttctcaaatttcaaattatactggtcattactttgaccattagaataaaatccctataaaacgtggccatgcaatcactggttgtaaactgatgggcagaatgttgtaggatggattggctcaagaactaatatagcttacttatgacaatgtagtaattcatgaagttattgttccttatgttcatggagtttgttctgctaggtttttatgcttttaatttctatttccttaacgaaacctcaggcaccttaaagacagcttggatgattggtttcatgaacagctagagaacttggatgatgattatcttgtgtttgattgccctaatatattctcaaatcatcttttcatgctttagttgtttcttaatagttgcacagtttcatctcactcatattcttgccacttacatgtatgtgacaaaacagacaatccgtcttttttattgcttatggcgttgtgcattatacatgtccaccaattatatacaaataccatttgtgggttacctctggtgtgtttaggtgcgagctgcaatcaaagttaaggcattagtcatcatttgcttcacctcttctggacaggctgcaaggtaattctgacataatgaggaagtccctcttcgtggtcggagaaattgggggcaatgactacaacctacctcttcactagagtgccatttgaaaagggtgttctggacaaagaaagcttgtaccttaaaacaagaggatacaagaagctggagtggttgtctaaaggcttttgaactgcttgaagcattagtgtagctttggtgattttgtgactgatcagctctggagcagctagagtgatgtagttgtgggcttttgaacaatagctggagtgatatgaaacattagtgatgtggttgtgggcttttgaactgcttcaagctggagtgatgtcgctgtgttgcttttgtgactgatcatctctggagcttttgtgaatgatctaactagctatatgtaaatgatctagttgtgaatggtattataattgtgatgattttgtgaatatataattgtggtgcttttgtgtttatgtgatggatctatgactggta

SEQ ID NO: 27408 - DNA, 2305 bp, Zea Mays
gtgacaaacaattaaatatcccgcattccttggcgaaggagggaggagtagccgcccggcgatgttcacctgccgctgtgccgtcgtcgttgtcgtcgccctcgccgtgcttctactgccggccgcggcgacccagttggtttactgcgacgattccacctatgccgacaacagcacgttccaggcgaacctgaatctccttagcgcggcgctccccgccaacgcctccgcctcgccggcagggttcgccactggcgcagtcggtacggcgccggaacaggtcaatgggatggcgctctgccgcggcgatacgaacgcttcctcctgttcctcctgcgtcgcggccgcgttccggtacgcgcaggcgcagcagggctgccccctcacgaagggcgccaccgtctacctggacgattgtacccttcgcttcgccggcatccgattcctcgacttccttagagaggaccagtggctcgtcccagaattgtcccgcgattgaacctgcctctgggagcgtcaacgccacagatgcctggttcggcgccgccgtcgcggggatcttcacggccctggtcgaccgcgcagcggcggcgagcaacgcgacgaggaagtacttcgccacggcggagatggatttcgaccctaagctctacggcctcgcgcagtgcgcgccggatctgacgccggcgcagtgccagggctgccttggagacctccagtcgagggtgacggcgcagttcctgagcggacggcccctcggcaacaacgctttcatggtgtggtgctccctgaggtatagtgtgtcgccgttctacgctggccgggcgatgctacagcttccggcgccgccggcacctccaccaacgtccacgcccacgcttcattcttcagggaggaaagtgaatgcagcaggaatctctgcaggcatagcctgtgttgttgtgttgatgttgattctttcggtctttttctttattcgcttcaggctaaggattaaagtgaagaaaaatgatcactcactaaagaagattgggagagctcaatgcacgatctttgatttattgacactggaagaggcgactgaacatttcgcagagaaaaataagcttggaaaaggtggtttcggtattgtgtacaaggggatactgtctgacgggcaagagatagcagtcaagaaacttttaggaagagccgggagtgggttggatcagctacaaaatgaggtgcaagtactggcagagcttcagcacaaaaatcttgttgggttacagggtttttgctcgcatcataatgatacactgctagtttatgaatacatcaagaacgggagccttgacactattctatttgatgatagggaaggaaatgcacttaactgggagcaacagtacaacatcatctttggaattgccaaggggattttgtatctccatgaggactcaagcatgaggatcatccatcgggacctgaaggcaaataacattcttcttgacgacaacatggaaccgaaaattgcagatttcgggttggcaaggcttctaggagaaggccacacacatactcagacaggcagagttgttgggacattcggttatatggcgccagagtatgcatcacatggtagtgtgtcgcctaagattgacatctttagcttcggcgtcttgatccttgagatcgtgaccaggagaagcaactgcagctctgatgaccacagcactgtgaatctcctaagtgatgtctgggatcactggaagaaagggacgatgccacaaatgcttcaccggtcactggatgagtttgctcgaagccaagcgctgcgatgcatccacattggtctgctgtgcgtccagccggaacctgacgataggcctgacatatcagccgtagtgttcatgttaaccagggatagcatagagctccagccgccggggcagcctgcgttcttcttcggtagagaatcaccttcagctttacgattagatggtcaaagcagctatgtatatcaccgtgatggtttcaaattgggacagggcgtctcggtgaatggggttacactcagtgaactgtatcctagataggatcaaagtctggatactgagcacatggaatacagttaacatgttgaactcgataggtttctttgatgattagggtcttgctaatcccctctaacctgtctccatcctttagaaatgaagtaatcgatgtagatttactccgtttcgttttagttgtcgctggatagtgcaaaattgaactatctagcgacaactaaaaagaaacgaaggaagtacatatctaattg

SEQ ID NO: 27409 - DNA, 480 bp, Zea Mays
caaagaaagacgatgccgtatatatctgtccattcatcgtccaggtcactaggggtgtgcagtgcaggccatgcacgaggagcggtttgtccccatgccaatgcgatagggatcaacccgggagtgatgatgtgtgtacaccctgtcgcacgcacttgtgtcatgtcattcgtgtgtgtgcagctgcggttttttccttccttccttctttccgacgaaaaaaccgcgcgcgtacattgttttcaattacacatctcgtcaagtctaaatcaatccatgaaatcaggcttgtaattaattaattaatatgtaagaatattcactccacatccgaactaatgtgatttcaggggataacatgaacaacaatgtttttttttttttttgcatcaaatagcctcagcatgtttcattcgtgcaaacgaaagaacaaaattaaaccgaagtagaaaagggtacataagggctagtctgggaacc

SEQ ID NO: 27410 - DNA, 2974 bp, Zea Mays
cttcctttcccaactcggtcgacgcgttcgccacggctgcgcagtcctcctcctcgcctccgatcccctcccttcgacgatgcgagcacacccgctcatcctcttcgtacctgcaccgccacctcatcctcttcctcgccgcgccgacacccaccgcgctctctccctcccgcggcgacgcccttcgccaacgagaaccgcacgccgtcgtctcccacgggcactgtcgcacgctgggccacgctgcagtcggtggcgccgccacaccttcttcctccatgtgccgtcgccgccctattcttcttcgagatgcagccgctagcgctgccctcctcccagctccccttcatggccgcgtgcaggtggaccgctccccaccccgtcgccttcctcctcgtactgcccccaagaacgccctagggactatgtgccagtgttagtttttggtaccagtctacaggtctttcatttctacattcaaaggtgagaatcaatcatgttcggctccctttaaaaaagtaatgtttcccaatccttcatagtaaaactaaacacacattgtaaagacatttgtcgtacgagatcttttatagaggtgtgttttaacccaaaggcaggctgtggagatcaattccagatattgccttcttgttgtgtctcagttgattttttttagcattgaacgtaacttacagtttgacataacaagcggtgaatgtaacactacagtttaactcaacaagccattggctgtagctcacaatcagcttggctgaactgccaaaaaaaatacaagcagtccattacagttcaacttaacaagagcagttctgttggtaaagccgatgcaaataagtaccaattgttagttaggaagggaaaagtgtcagcagtcaatggctgattaaaaaactaaatgtctttgaatttgttgggccgtgtgcctagtgcctggcctattaactggcttgttcgctgcggctttaatccgactgcgactgcggcttctacagtattttgtctctaggaattgcagctgcaatagtattttgcagctgcaacagtgctcccgcatgggcagccgaacaagctaaacatgtacatatatacttattataccagtgaggtgtgtgtagagtagtgtactctgtactcttccagaaaactttacatggtaccggaaccgggaccagcggcgacggtgtagtggtgaggaggcagaggagtgccttcggcctcgacggaagaaggccgccgatggagaagaagaccagctgggagcgtggcgcggcgtcgcggtcgtgcacgaggaggaggagcctgcacttgccggagggagaagaagcatgtagcacggtgcggtgctgcagtcgtgcgtgagtaggttcttattattgttttctatcctgctggatatgtagtcatgacagttaaattatgtacaactatgattacaaacgggaatacaagctaggagttgagaccacaatccttatgaaaagttacactgtaagtatgtcgtcctgcttgcatttcttccatgttccttttctcactgtaagcttagtttttgtgatcagcttccagatagaagagttattaaagtagacactaaacgattccaacctcctgaatctctttttactcctgtaacacttccatttatatttatacataatggtattgtcaacagtacacatagtttccatcagtttgttaatagtgcacctttagattgaatgagcttcttgcagagcaccaaggattaggcattgaaatgtgtggataaaaatattagaggaccacacatcattattatgcaacattgtctatgcacatgaacataattgtatcggtagtaagccgccagcatgtttgaaagttaaaaatgtgaattaagaacgaattatcgtatcctgctatacttatgcaacctaccaagaattagggcattgtagaaaccatataaagtattgagatcaatttgaatttgtctgcctcatgattttttgatacctgacctttatgaaggtagaggacaacattaaggatgatcatagactaccaacattcttcttcagattaaatgttaaattcagtaatttaatttgtttcagtaatacaagattagaccatccctgcacatctgcctatctgcctggcaaaatattatcgtcgcttccaagattgagaatatggctgcgtttggaaagccttagattctagcattggcagatggcggaggttctaataagtaaccttatgattggaaattgcagtgatcggttgtgtgtacgtgtctcccgtctgtgaaaaatttatgatcccgaggatgagtataagcttttccatgctcatatggtcctcatcgacgaggaggctggcagtgctcatgctcaaatataccctccactcactgacgttttcaaacctctgataaaggagggcaatgtctacaatgtctcctacattcagatcaagaaagctaataggatgtacaagcatgttgacaacgatatcatgatcggtttcacaaaatggatcctatgctgcctcaacaaacccgcggtttgaacacgtgacagatgacggcttagcttctgtggatggacatcttggtcgcttttgtagatggaatgtttggttggcttttgtagacagaattaggctgcacttgtgattgtgtaacgcttatgagcatggttgtgtggactgtgtcggccaaagtatacctcccaatgccttgtatatatcacatgcttagctgtctatccccaactaggtcgcctgataatagacttcgatcatgtcatgctattctataacaattttcgctgtaacttgcctaatcgtcatactatggtacacgcttaaatttggtgctgcaactttattgtggattataaaagagagaaaaatacagcataaagttataatgtcaaattgccacagctcactgttaagacttatttga

SEQ ID NO: 27411 - DNA, 718 bp, Zea Mays
cccggacccagtggctcagggtgcggcgtggtaggtagcagcagcagcaggtttgagcctgcaagacgacgaccagacccatgatgccaagtctcccaacaagggagacctggactggaggaggaggacctacctacccggcctccagctctctcgtctcttcctcctcctcctcgaagctccgatccgatcccccaatgtctgacagcagtccagctcccggcgcctactactccggccctcccgccgcgccgccgcccgagtctaagcccgttgacggcggccaggtcaacgccgatgttcctggctactactcctccgtccctgctgcgaaatctggcgccggcggccagggcagctccgctgctcctaaggaatcgggcttcttcgccagctgttgtgggtgcttctctggcggcgaaaccgcgagatagatagattcagtgttggaccgaggaccatggatggatggatggaacatgcatgcccagtgattgtttgcgccgatgaaagttcaatttgtccggatttattttctctgaaatagtatatgttttttttctccatcggtgagccggtgatcttgtcaatttgtacaataatcattatatgcaaccaactgtgctttaatttgctctgatatcaaaatcaaagagtctctcatatagagtttaccttatgatgaatggaagaagaagaaaaaaaacattacgaaaag

SEQ ID NO: 27412 - DNA, 4129 bp, Zea Mays
acggccagcaggtaccctgacgatcaatacgacagattatggacacctatgattattgacgccatcgactggctggtgctatccacgacggaaaaggtgcggaacatatatgatgacctcttcgaggtgccgtcgaaggtgatgcagacggcgatcacgccgcgtgacgctaccagcagcatcaacttctattggaactccaagggctcgtcgcttgggtacataccggtcttccacttctccgaggtgctgcaggcgggcgccggcgttgttcgccagttcaacatcaacatcaacggcaagcggttcacctcccatgattattacacaccacggcacctcgaaagtggctacgtatacggtaccagaccttacaccaaccagatccggtataacgtctccatcgttaagacagacacgtcaacgctcccgcctatcatcaacgccgacgagattttcatcgtcatctctacgaccaacgttggcacggactcggaggacgtctctgctatgaaggctatcaaggcgaagtatcaggtgaagaagaactggatgggagacccgtgcgttgctgggacttttaggtgggatggactgacgtgcagctatgccatttctgatcctccaaaaattactgccctaaacatgtccttcagtggtctgaccggtgacatatcatctgctttcgcaaatctcaaggctgtccaatccttctatgccgataatccagacctttgcaccaacgccggggattcatgtcagacggcgccgcaaggaaagagcaagctagtcatctactacgtcgctgttcctatggctctgatcgtggtggcgttggcagtactgctgtgttgtcttctgcggcggcgaaagacgcgagggctagcggacgtctctgtgaagccccgggacaagactccgacgagccttgcttcaatggcggccgacgaacacagacttagctcgctgcggcttgagaaccgccggttcacatacgaggacctagagatgatcaccgacagcttcaagcgtgtcattggccggggcggctttggatacgtctacgagggcttcttggaggatggcactcaggtggcggtgaagatgaggtctcagtcgtccaatcagggtgccaaggagttcctcacggaggcacagatcttgacacggatccatcacaagaaccttgtctccatggtcggctactgcaaagatggggtgtacatggcgcttgtctacgagtacatgtcagaaggatccctgcaggagcacattgcaggaaaacgcttgacttgggggcagaggcttcgaatcgcattggaatcagcgcaagggctagagtatctgcacaggggctgcaacccgcctctgattcacagggacgtgaagaccagcaacatcctactgaacgcgaaactggaggccaaggttgctgatttcggcatgtcaaaggctctagaccgcgacacctatgcgtccacgaacactcttgttggcacaccaggatacgtcgacccagagtaccacctggcgcgcggcgacatcgaggtcgtggtggacgcgtccatgggaggcaaccacgacgtcaacagcgtgtggaaagccgcggaggtcgcgctccagtgcaccgagcaggcgtcggcgcagcgccccaccatgggcgacgtggtggcgcagctcctggagtgcctcgacctcgagaagggccgctccgccaacgaaagtttctgcgacggagacgacagcggctccgcgaccgcgagcttgagccacagcagcgcatttgtgacggggcgtatttttgggacggtgccaatggtggagacaggccctgccacgagacgcgcgctcgtgtgtgtctcactgtctcccctgtcccctctcccgcgtgctcgtctaccttcggctcccccatgggatgagagcgccttcctcgccatggccgcctcccacctgccccccgcagccaccctcgtcaagaagtacccaactctcctccacccgttcggcgccaaaccacacgcccagaggctgatcttcaggtgccgcgcgaccagcagcgagggtgcggacgatggctgggcgtcctttgtggacgagctcaagaggtcgctgcaggtggacccgtccgacgcggtgattagcaacgccggcgcgggtctcacatcaaataacgacctcgtcaccgcgctgccactggaaccctccgctggtccggctgcgggagacgcgaccactgccgctgccggcgcggtgagcgagctcctgggcgtggacgcgtcaggcgcggtggccacccccgaccgcctcctgagctccctgctgcacctggacgcgtccaacccggtggcgagcgtggcgggcggcgcgctgtctcgcctggacgcgctcacgtcgggactgtcggacgcgcagcggtgggcgctgttcgggttcctggccgcgacgtggctgtacctgaccgcgcggcccggggtgctgagcggcgccgtggacatgtacgtgctggcgccgctgcagctggcgctggacagcgtgctgggccggcggagcctcaagatgagcgacttcgtcgtcggcgagcgcatcggggagggctccttcggggtggtgtatgccggcgccgtggtgccgaagaacggcgccgtcgtggaggagcggtccggcaaggccaagacgagcctccagaacgacgacaggtacaaggagaaggtcatactcaagaagatcaaggtcatgacggtgggggcgaaggagtgtggggactacgaggagtggttcaactaccgcgtgtcgagagcggcgccggagtcgtgcgccgacttcctcgggagcttcgtcgccgacaagaacaaggcggagttcgtcaagggcggcaagtggctcgtctggaagtttgagggcgacaggacgctggccaattacctgagcgagcgcggcttcccgtccaacctggagcgtctcatgttcgggcgcgtgctgcagggcctgggcccgctggagcgcgaggcgctggtggtgaagcaggtgatgcggcagctgatcacgtcgctgaagcgcatccacgccacgggcatcgtgcaccgcgacatcaagccgtccaacctcgtcgtgacccgccgcgggcaggtgaagctcatcgacttcggagccgccaccgacctccgcatcggcaagaactacgtgcccgaccgcgcgctgctcgacccggactactgcccgcccgagctctacgtcctccccgaggagacgcccgagcccccgccggagcccatcgccgccatcctctccccgatcctctggcagctgaacagcccggacctgttcgacatgtactcggcggggatagtgctgatgcagatggccataccgacgctgcggacgcagtcggggctcaagaacttcaacgccgagctcaggtccgccggctacgacctcaacaggtggcggcagagcgcgcggcggaggcccgacctgcagatcctggacctcgactccggccgaggctgggacctcgccaccaagctcatctcggagaggggcgccaacggcggtggccgcctgtctgccgcggccgcgttgcgccacccgtattttctcctgggtggcgaccaggccgcggcggtgctgtccaagttctcgctcagtaaatagcatccatccatggcccatggctgggtacctacgacctacgggatatatacacatcggcttattggaatcctccgatcgattcaccatccttgtatattgcgcattattgaatccttgggcataccataccggcagtgggaggcatcccaaattcaaaagggagtcatctggtaactgatgttacaacttttctgtatgggaatgctgtgaacaatgtggtgcagagtttcacacactaactaaccttacattatgctagacagagatcctacttcctttgcttcagttcctcgaatctatgcagatgcagacactcgcagagagagctcatcaactggctgcaaaattctgacctgctccttctttcagccaatcagatgtttggccatgctcgttctgatcctatactgacagacgaatccggccatggatcgcctctactgtcactggcagtacggatcgaacttcttctgga

SEQ ID NO: 27413 - DNA, 1060 bp, Zea Mays
aaccctaaaaacatcatcggtctcctattgagtcttttgactgttcgtgctgaaacggagacgccggttagtgctgtttcaattagaaggattccaagggttccttcagacatgcctttgtatgatatactcaatgagtttcagaaaggaagtagtcatatggctgctgttgtgaaggctaaacctaaaactgaaccaccgcctgacagaactgaaccaaatagggaagcagttgggccagcacaattgactgttaccttgttatctaatgctgaagaaagtgcagacaatgtggttgtggatatcgaaagaccacataacaggcagattaatgggatcccagcatctaacgcagtgcctaggtcatcagaggatattgaggatggtgaggtcgttggaatcatcacacttgaggatgtatttgaagaactcctacaggaggaaattgtggatgagactgatgaatatgttgatgtccataaaaggatccgagtagctgctgctgctgctgcatcatcggttgcaagggctccatccgttaggagattaacgggccaaaaggctgcaaaccttcagggagcacagaatcgccaaggacagcagcctcctggaattctcaagaaacctactgagggtgattcaaactcatcaaaacaagtgaaccttgtcgaacctcttcttgaaaagaggaggtaactctaaaaacgtagccgataaaacgcatggaatcaagccggaagagcctatggttcttgctattataacaagaggtaaatatagatgaactcgttgttgtaaattccaacaggagcttttggtgtcatggacattagtcatgaattctctctccccctctccccttctcccctctttggttatggactgcgaaagtagaatggccactcttgaatttatttatcaccgctcaccgcagtagcaactgcattatatatatgcttcaaatccctagattcctagggtttatagctatgcataaggcctagtttaggaaccctattttttccagggatttttattttctcaagaaaaaataaactaa

SEQ ID NO: 27414 - DNA, 3154 bp, Zea Mays
cgtttgatgatggctctgtctgtaaagtcaatagggcagatcctaagtgcttaaagccagcagctggcccaattcatccagatacagcttgtcctttttatccaggacagcgtgtcaaggcatcatcatcatctgttttcaaaacatgcagatggcttaacggattttggagagcaagtcgtcttgaaggtactatcacaaaagtggaaagtgttgctgttttagtctattggattgcatctgcacactttgctacagatcagcaatctgttcctctagaggagcagaacccagaggaccttactcttttgtctcgtttctcatatacaaactggcaattaactgactggtgtctttctcagcgatacacttcatgtactaacgataccatgattgattctgataagcatacatggcagatatgtacatgctcagaaaactcagttccactgtctggtattccagaatctcaagctgatgctcagattgatacagatacaggtcacaggcagacagatgttgattctactgcagatgtattgagtatgtcggatggagataattcatgcatagccaaagaatcagaaacaggaactagtgcatcaagcatctcaaatgagggtccacaggacaatgcaacatctagaaaaaagtttaggaaagtattttttaaaaaagacaaaagaacaaaaaaaagagatgacaactttgagcgagctctactcattgcgaatacttgtaccaaagtcgatgtaatctggcaggatgggacaaaggaatgtggagtagccgcaacagcattgatccctatccacagtccaaatgaacatgaattcttcccggagcagtatgttgtggataaagtcacaaatgatgttggtgttgatgattcttctgaaccaaggcgtgtgggtcttgttagaggtgttaatgctaaggaccgaacagcaactgtgtcatggtttaagcctcctctacatccagaggagccaaaggagatcgcatgtaacgaaattgtgagtgtatatgaactggatgtccatccagattatgattattgctatggagatattgttgtccgcttgccgcctgttaaaccggtaattgagtcaaccaatagcaaggaacaaatggaactggataagacgttagattcctcggaaggatttgctgcttcatattctgcaccccctgatactagtgcagacgaacagctttcacagaaggaatcctgcttgcagtttacaagcctctcttgggctggaaatatagttggctttcaagacggtgagattgaagtcatttggggtgatggatcgatttctaagatgatggtgcctcactagatgatggaacagcctctgatggttctagctgggagactgttgatgacaacgaaatggatgtacttcatgattctgcaaagggtgattcgcaaaatgtacctgagaatagcattggaagggaaaatggttcattcagctcccaggatggaagttctgttgcaactggtcccctttcagttgcttttgagtttgtgacccgactggcgagtgatctctttgctcgaggtagaaggcatttagatggatcatcagatgctatggatgaagttgagtctcactggtctaatgagatttcagaaattggtgatgacattgataagtgtaataagaatcatgtggaatcaccagagcatgctgcagtcatagaaaatgattcttctgtcgagaagtctgtagatgtggttatggctgataatcctgtacattctgaatgtttcaaacactttgatgttctgcaatgtcctctagaccaccactaccttgaaaacacaacccaggtggaaaaaagtgggtcaaaaaggtacaacaggaatggagcatacttgagaagaacctaccagactatatttatgtcagggtatttgaggatcgcatggatctcttgagagccgtgattgttggagcaagtggaacaccctaccaagatggccttttcttctttgatttccaccttccacttgagtatccgctagtccctccgtcagcatactatcattctggtggtttgcgtgtaaatccaaacctgtatgtggacgggaaggtttgcttgagtctcttaaatacctggactggcagagggaacgaagtttgggatccatcatcatcaagtattctccaagtactagtttcacttcagggattggttctcaatgaaaaaccctattttaatgaggctgggtatgagaagcaagttggtactgttgaaggggagaagaatgcagtgccgtataatgagaatacgtacctgctgagcgtgaaatccatgctgtatatattgagacggcctcctttgcattttgaggattttgtgaagagccacttccgcaagcgtggtcactacatccttaaagcttgccacgcctatttgcaaggaaatgttgttggcactctcaccgacgacgcgtgcaccaccgacagaagcaaagagcactcgagctctgttggcttcaagcttgtactagcaaagattttaccacggttgattacagccctgaaggacactggagctgactgcgaccaatacgagcacctcgggagaacagaaaccgttacagaaagctgatcattgagtgatttgtacttgattcttttgctttttctctgttttttggggtttcagaaagatggtgacttcaccaccaggctgttttcctataaatgtacattcaaagtttgttgtttcagtcaaacatttggaaaatttggcccaaatgatttagggggggggggggggggggtttgaagtcactagagataatagttagttagctaaaaattgttagtgttattagctagctaactattaccaaatttgctaaaagtatctaatatctaaactattagttagactgtttggatgtcttggctaattttagcagctaactaatagttttagtgcatttaaacacctcttattcgttacatggaactgaactacactgtacagctgatgtttggttaaacttgtaccagcgaagagttggcaatactggaaccaggcctagagattcctggaacagagatttgatgtccatgtatttacgggtggtattggtttcacgaatatacactcgcgggggataaaaaac

SEQ ID NO: 27415 - DNA, 2632 bp, Zea Mays
gcttcatggtctcgcccaatttatcggatccatcgccctcgtcacgtgacccctaccgccacctagaaaaagctcccccggccttccacagcttctcccattccactcggtgctttgcccgaggcccggagaagccttatcgcctcctccttgcacgccgaccgatcgccacaatcccccaccgctcgcctgcctggtgcccgccatgccggagatcaagtgcggcgcggccgagaaggtgaagccggcggcgagcccggaggcggagaagcccgcggacatcgctggcaacatctcctaccacgcgcagtacagcccccacttctcaccgttcgcgttcgggccggagcaggccttctacgccaccgccgagagcgtccgcgaccacctcatccagagatggaacgagacgtacttgcatttccacaagacggatccgaagcagacgtactacctgtccatggagtacctgcagggccgcgcgctcaccaacgccgtcggcaacctcggcatcaccggggcatatgcggaggccgtgaagaagttcggctacgagctcgaggccctcgcggggcaggaaaaagatgcagctctagggaatggcggcttgggtaggcttgcatcttgctttttggattcaatggcaacattgaatttgcctgcttggggctatggcctgcgttaccgatatggactgttcaaacaacacattgccaaggagggccaggaagaagttgcagaagattggcttgataaattcagcccttgggagattcccaggcatgatgtggtgttccctgtcagattttttggccatgttgagattttgcctgatggctctcggaaattggtcggaggagaagtcctgaaggctttagcatatgatgtgccaatccctggatacaagacaaaaaatgcaatcagtcttcgtctttgggaagcaaaagctactgctgaagatttcaacttatttcaattcaatgatggtcaatatgagtcagctgcccaacttcatgctagggctcaacagatatgtgccgttctttatcccggtgatgctacagaagaaggaaagcttctaaggctgaagcagcagtttttcctttgcagcgcatcacttcaggtgaatggagtggctgagttgcatagcaacattttgaagcaagaactatttgcagattatgtctctatatggcctaccaaattccaaaacaaaactaatggaatcacgcctcgaagatggctccggttttgtaaccctgagttgagtgaaatagtcacaaaatggctaaagtcagatcagtggacaagtaatcttgatctgctcactggacttcgcaaatttgcagatgatgaaaagcttcatgctgagtgggcagcagccaagttatcttgcaagaagcgcctggccaaacatgtgttggatgtgacaggtgttacgattgatccaactagcctttttgatatacagattaagcgcatacatgagtacaagagacagctcctaaacatattgggagctgtttacagatacaaaaaattaaagggaatgagtgcagaagagaagcagaaggtcacaccgcgcactgtcatgataggagggaaagcgtttgcaacatacactaatgccaaaagaatagtgaaattggtgaatgatgttggtgctgttgtgaacaatgatcccgaagttaacaaatatctgaaggttgtctttatcccaaattacaatgtatcagtggctgaagtgcttattcctggtagcgaattgtcacagcatattagtactgctggtatggaagcaagtggaacaagcaacatgaaattctctctgaatggttgtgttatcattggcacccttgatggagctaatgttgaaataagagaggaggttggagaagataatttcttccttttcggtgccaaagccgatgaagttgctgggctgaggaaggatagagaaaatggtctgttcaaaccagacccacgttttgaagaagccaagcagtttataaggagtggcgcttttggcagctatgactatgaacctctcttggattcccttgaagggaattctggatttgggcgtggtgattatttccttgttggctatgacttcccaagctacatcgatgcacaggatcgggtggatgcagcctacaaggataagaagaagtggaccaagatgtccatcttgaacacagctgggagtggcaaattcagtagcgatcgcaccatcgcccagtatgccaaggagatatgggacatcaaggctagccctgtcgtgtgaacgagggggttgcgattcaacaccaaacgtagtttcttggggtgctataatagtaaggaagaataatgacccacggtgcttgacgcccacttgcgttgtaggcatggaacgggggcacctagcttgttctacagcgctgtctattttgaattggtgcgactttgttgctcttttttcctcccccttatatcttatgaaacaagatccttttgatctgtgctctgaaataaaataattcagttatgatattcgtcgccataatgtgcttgagaaatggatgtcccttcctccaaggtcagcagtgcccaaactccacaagactgtttgatctaagcatattgatat

SEQ ID NO: 27416 - DNA, 90 bp, Zea Mays
ggctacacgcatagtgtcgcttcgtctccagtccaccctcctgataagcaccttcgctccaccaccagcagtatctcaacaccacatgac

SEQ ID NO: 27417 - DNA, 445 bp, Zea Mays
ctcgtcaacgcctccgggctataaaagcaagccctggcgaccaccttcctcctcgaaccggggcaccaaaacgactctgcagagcatcacgtcgacgaccagcgcgggggtgggcgccaccgtgcatggaatcagtgtgcagcgtcgttgtccacctaaatatagtatgggaagaatcggtcgcgccaaccacgcatcctggtgacctcctctgacgggggaattggccggagtgccggcaattgctcaccgaatttcaagaaattgcctcggaccgcccttcatcgtcggcatagcgacctgctacttattccacggtgagttacccttagatcgattcgccttgctctcctcttcgcgtgggtccggatagttctgtaggagtgaagaccttaccgccaggccacctatctcgacgaaagcgccgtcgtgacatcaccctctt

SEQ ID NO: 27418 - DNA, 1457 bp, Zea Mays
atatcggtcagtttgccatcagaacaaggagaaaaaaaggttccggtcttcatcccttccatttccaaaggacgacgctctcaccattcacgaacggcgactgcggatcgatcgtgcgtcgtctcctgcgccggcctctcttcaagtcaggttacacacaagcttcaaattatcgcaaaattcctcttacatatctacatctcataccggaccaggtctcataccggaccagatgttcttggtgtcataactgaaattcatgaactgacacctgtgcatgtccgaagtcaactaacaccaacagtgacaaggaccattatcatagaagatctcagcgacaaaacaatgaagatcactttatgggcagattaggcgataatgttcaatcttcatgacgtgtacgatgcaaatacaaataaaccgattcttgtgctattcgtcgggtgcttaccaaaatttttcaaaggtgtctacctaagtggtggtcctgcctgtagatggtacttcaatccaacaattccagaggcagaaccttatcttaccagccagtctacaaaaagaattgtgttacagcttccccaaaatttacaacatcctccagcgatggaaacgaagccaattgtcgaacataaatccctctatgaacttcttacagttaacccatatgatttcccggaaacaggatttgaatgtactatcacaatagcagaaataccagctgaacacaaatggtggtttccatcttgcacaaaatgcaataaagcaacaatccctcacactacaggttatcactgtgaatcatgcaattgggatggatacaaatttaaatacaagctcaaattcctggcatctgatgaaacagatattgcagaaatgttttgttttgacactgtagcaaggcacatcgttgttgcccaaacgtgttccgcattaattctattgttgctgcacatgggagacaacgttctttaccaatgcaaataggaatttctgatcaacaaggaccatcaacacctcaaaacaaatcaaaaccgatgttattggaagactctccatctacaactttggaaaaattatctactacaactcctacaactgtagtaaggaagcttctatattccgaaactgacaacacgccgaaaacgcactcaatttcttttactcaattatcttttattcattttaagatttagtgagtattgacagttaaaaatacttatatttgttccatgttgacagtgcaaacaagagtaatatcaatagcccagaaaaagatgatggcgataaggaaaccgcacagcttgatacaatacccactaacaaaggaaaaggaccagcagatacaattgaatcgccacctaaaaggttcaaacaagggacgatacgcatcggaaaagaaatggacatcaaatcctccgagaactaaagtttcactcagatcttcgtcgaccttttga

SEQ ID NO: 27419 - DNA, 2346 bp, Zea Mays
cttaattcttcttattaatattgagtgtcaaaaaacttctttcacaatgtcagcataagctttcgaacgtcatcgctcaaatatggtgtgcatgcaactgtattcaaaagaaattgaatcccctcctggagcttccagtgcaacatctattctctcacgaaatttgcaaactcatgggttcgactccaaaaagtctagtgaagtgaaggatcttgtttggaaattttgtgcatggagggacttaatggctcggatgcatgatgaaagcttacgatatgttctgccagaccaagctatagctgcccttgccgttagtcttccaaagggcccaacagaggtgtttgctgtcatagcagaaactgacctaagcatttcaagtatgtacccttccttgtcatcaccgtcacctcttgttgtggctcatgtcaaagaactctgttatctgctggatgacatcactaccagcatggacagcatctttaaaagtttactagagaagtataaagatccaagtggattatgtcgactatcagtttataattataaccttataacacacctaagtttgaagcaaacaagtatgttttccgttgctccaagtggaaagaagttgacagcactgcctaataaaaaggtttcacgggatttattcattaaaaagttttcctgcaagtccccggtatatcacaattgcaggatttatgctagtgatggaagactactttgctactgtgaccgcaaaaaactggaatggtacattcagcgtaatttggcgaaattgattgaaaatagtcctccagcaatcatgcttctctttgaacctaaaggtcgtccagaggatgaagataacgagttctatattcagagcaagaaaaatatttgtgtgggctgtggagaaaagagccattatattagatacagaataataccgtcatgctacaggatgcattttccagaacatttaaagagccatcgttcacatgatattgtacttctttgtgtagactgtcatgaaatagctcattcagcagctgagaaatacaagaggcgaatagcagaagaatttggaatacccctttttgtgcaaaagataatgaactcgggtgatataagtttgattaccaacacatcagtatctgaagataaattgaatggaacaggtgtctccccattgcagctgaggactgctgccatggctcttctacgtcatggatccactatgccattgaagagatgtgaagagctaatgcagattgtgaagtcatactatggtggtagagatgtgactcctgaagatctcgagatggcattacttgttggtatgagccctcatgagcgaaggcgtcttgaaaagaaaaagggatattcgtttagagctcaggctcaaactattattagaaagagcagcagcaataccatctcagaagacagtggacatggatcagaaaattgtcatgccttatctgcgcgatttcctgaggttggaactggtagtaatggtcagcaagagtttgatgagacagggaatcaaaaccagctagagaatttaaccctgagccagggaagctcaagtttgccagtcagcatggaggacaccacttctgatcatgacactgtgacactcgagaccgataccgagcagcaagcaagaggtgcctgtactcctggaaacagtcatgacgacaaggaacaatccatatgtgacaattctagtcaggtcatttccaagaatgctgagaagatatccctgttgggtcatgggcatcatggtaaacaagttgtggaacttttgttttctaatggtggagaggaatttgttaaccagttttgccaaaggtggaggcagatctttgttgaagctgttcacccccgttatttaccttctggctggaatattaaccacagtggacggcgggattttggtgacttcagtgtctacaagccaccaaggaaagatcctcaatctgcaactgcaagggattaggcttacgcgggtgtcatgctgtcgttggtaccctgaggttcaacttactttccagaattggttccattcccttaaacttgatcttgttgtacttgttccattcccttaaacctgatattgttgtacttgtatgtatctcaatctgtgtgtttgttcgagtaccttgaaataccaatttcatctcctatgtatttctttgagatgaactttgcatcagttttgttgagccgtttttttatacgtgaggatttagagtactaacaatttaagtccaagaaaaatcaacagtgaagttcaactcagcagattaaatcttcaaagtgccgtttttaactgggagttgagctcaaattggtttcttc

SEQ ID NO: 27420 - DNA, 1301 bp, Zea Mays
  misc_feature (1301)..(1301): n is a, c, g, or t
ctccatcctgacctccctcgccttggcatctcgcctccttggtcgacggccgcggtcttgttgctcgccgcgatcgatccgacgcctgctcctctctcttcaggggccgccgccgatagtagatccctcaccatggcggcggcggagatctcggcgatgctggaccttctagttgcctccggggagacggagccgccggtacgccgcctccggtcgcccgcggcgcgcccggggctcgaggccctagcgggggccctcgccgccggccagtcggctgacccaggcgccgcacgcaccgttctcgctgccgcccgagccgtcgtgtttcccgtcctccctgcctcagtggagcaagtagacccaacagttgtggagattgtggagagatctttggaattctgtctcttacatctagaaaaatcatcatatgtgtgtgatgactttggcttactgaatgaggttgcctgttttgtggaatctgtgttgcttaaaggtaccctcaataaggtatcctcattggaacccagcattataaatgacatcattgagcagtggacatctgtccaagctgaaactgagcgcatgagcccacaagggaaatatttctgctatctaaaaggcttcaactgctcgaaaagtgaagatgaccttaaacagtttcatttggccttattaccagaatacttgcagcgagattatgttattttagagaattcccaatcatgcagtgcagtatctccaaatgccatggtgccattagcacagcattttgcggttgctcacttatgttgtatgccacgccttcttacactggttcagaagctttgccagtctcccgctttggaaatggttgaagatgtaaacattggcttgaggttgtctttcgcccaaaggattttgaaattagtctgtggtctcactattgagtttcctcctgatgcctctgatgccatgatgttatcctcagtagcgagatgtgctgatagtcttccagccttgtttagactgaggttcaatttctctaatcatgacagagtcttttctgtagatggtgttggcactatcttgctgcagatactggaagaatttttacaggtagtgcaaaatattagtgtttgcaacagtgatatctgttgtacagttaaagcatgcattctttcatccatgctggaaatcttcagtcctaatatatggagatatgaaaaatcgggtgcttgcttggtgcctcctttatcttattctcctcacgttgttcaatttgtgctgcaactttttaaagacaccaaacgatggacaagtcn

SEQ ID NO: 27421 - DNA, 1548 bp, Zea Mays
cctcctcctcctcctcctcctccttcctgccgtcgccgacgactgccccacctgtactctcccctgcgtcctcctcctcggctctgctacacgccttccttgcttcctccctccaggcaggccagctccttcctcctcacgctagctcggtgtcttccttttcccttttccagcgcgcgccggccggccggccggccaaattccaatcccatccaccatcttgttcttgtcttctccgacaattaaccatcaatcccaaaacgtcatattcatcttgtcgaggccataaagtcacaacaaacacgtcgtccatgcatccaccaccgcatccatccatgaagcccggcggcgaggaggaggaggatgtgcaggtgctggtggtgcggtcccaccaccactcggaccagagcagcacgaggagccaccaccaccagcaggtcgtcatcagggcgcggccctactaccggcggtggtcgccgtggctcgtctccggcgccaccgtggcctgcgtcgccatcttcctcgtcaccattgaagatgggggctctcgatgtggctaaggtcgtccatggccggcaaggatggcgtctgatcacctgcatgtggctccacgccggagttgttcacctgctcatcaacatgctgtgcctcctagtcgtgggcatacgcctggagcaagaatttgggttcgtgaggatcggtctggtgtacctcatctctggttttggcgggagcctcatgtctgctctcttcatacagtccagcagcgtctccgtgggggcctccggcgctctcttcggcctcatcggatccatgctctctgagctcatcaccaactggtcactctacgcaaacaaggtggcggcgctgctaactctgcttctggtgatcctctccaacctggcgctgggcctcctcccccgggtggacaacttcgcccacatcggcggcctcgtctccggcttcctcctcggcttcgtcgtcttcgtccgcccgcacttggactggctcacccagcagcagagaagcggcggcggcgggcaagggcaacagcaagctcctccgccggtggcagcggcgaggaaacgcaagcacaggacgtaccagtatgtgctgtggctggccgccgccgcgctgctcgtggccgggctcacggcggccaccgtgctgcttttccgcgggtacgacgccaaccagcactgcccgtggtgccactacctcagctgcgtgcccaccaggaggtggaggtgcgacgggtcgccgaccacgtgcacggccacgacgcaggagaacaacacgctcagcgtcgtctgcgagggcggcagcaaccgcacgtacgtcgtggcggcggcgtcgcaggacaggatcaaggacctctgcaatcagctctgcacctagcactgcatattcttcgtgtacatcgatccatttttactcaccgtcagagtgaggtcctagctttacagcaagagaaagaatttgttcgatttacaggcaaatatgatatttttgaaatgcagcaaacaaccaaagatttaccatttattt

SEQ ID NO: 27422 - DNA, 190 bp, Zea Mays
caacgcgacgcaaacctcatcctctgcaatgtcttccatccgttcgaatcgagcgctgaaatctgcggcaccattcccccaccacgacacatggaggtcgtctatcggtcaacaacaagcggtacatcgaggggaagcaccgccgccgtggacacccgcctcctcctcgtgctcctcgccacgcgcgacg

SEQ ID NO: 27423 - DNA, 3890 bp, Zea Mays
aaaaaacacacggaaccgcaggcaaaccctcgctttctccgatcgaattgctcgtccccgtgcaaccaccaccggttcggccgctccccaccaccagtcctccccgcccccgcccgccggacgatctactaggcctctcgccccgcgcgtgccgatttcccccacctcgagcgccgccctcctcccgcgcccatggcgagcacctgaggatacggtcagtgggctgtttctctgcgagagtcccacgagtccccacagaaacagcccgggggcatcagcgatcgattcggaacgccttggttcggtctgattgccggattggtggtttcgtctcggcctcggcttcctcaactatctagcttggaagccaagtctgggcttgcttcgtgtggattgcatctggggaggcggtagcgtgcacgggtgtgattctcggaccggcttcatgcgggacggcgcgccggctcctcgcgccggcgggggcttcttctcggcgcggtcgctctccaactgcatgaggatcgtgtcgtcgggggcgtccacggccgcctccacgctgcgctcggccggggcatcgctggtcaactcgatggccagccacgaggaggatgcaagtcgtgaccaggtacagtgggctggctttgataaacttgaatgtgggggtggcttgctacggcaagttttgttgctggcttataaatctggtttccaagtgtgggatgtggaacatgctgatgatgtaagacagctagaatccagacacgatggtgctgtttcgtttattcaagtgctgaaggatccaattttcacaacagaatctggagacagatttgcagacacacgaccattgctagctcttgcctgtgaaggaactcacacaggaagtggaaagaaccatgatactaatgttcctgtttttgatggaaccaatggtgctttccatagtataggcggtgaaaaccttcctactgtcttactattttattcactgagaacccatgaatatgtgcatacattgaggttcagatcagctgtttattccataaggtgcagtccgagagtcgtagctatttcacaggctactcagatacattgttttgatgccgcgaccatggagagagaatatactgttcttaccagtcctacggttgcacaagtttcaggctatggcccacttggattgggtcctagatggattgcatattctgggaatccagttccggttccagatactggacgtgttagcccacagcttcttagtctatctccctctgttccacctcctggttcaaatggtagtgtggtggcatattatgcaaaagaatcaagcaagcaactggcagctggcattgcaacacttggtgaggttggatataataagctgtccaagtactatgcagatttcattccaaatggtaatggtaccataaagcaaagaagttctgtttacaaagcaaatggtgtaacaaatggccacctcattgacagtgaatatgctggaacggtacagacctcttgtacatattttcatcgttaattctgttatcctggagttggcaataaacttgattaacattgttgctagcattaccatgtcatctctgtatactagtattagtaagaactaaccaaccctaaggctgtcagggaccacggaattcacctggccagtttgctaacaatttgatgatcttgctattcttcctcaggaattggccacggctgatcttctgtctcctgcatttgtatacacgctttacagaaatatatccgtggcagattgtgtacttcattttacatgcctgccattttgttcagttgtttgctttcattttacatccgtggcagaagtgtgaacaatattatccatcgaaactagacgagatagtatagcaggtaaggtgggtaattagttcttcatctggatggaatggaattcaaaagtagagtagcctaatggatgcggatggatggaaattttcttatctccgtgattaagtgttcagtgtatacaaatggttttttgccattacaagttcaattaatatgatcatgctgtattttttattttttttctttacttatctcacatgattttgatattgcaatggcaggtcatagttcgagatattgtctctaaattattgatagttcagttcagggcacacactagtcccatttctgcactttgctttgatccaagtggaactttgctggtgacagcatctgttcatggtcaaaacatgaatgttttccgcattatacctccacatgggacatcagaagctggtcaaattggaacctatgttcatctgtacaaactgcaaagaggcataaccaatgcgatcataaaagacatcagctttagtgatgatagtgactggataatgattagctcttcaagaggaactagccatttgttttcaatctctccatattgtggatcaacaagattccgttacagtgataacaaccctgtagaaaatgattacacagtggattcatcagttaatcatactgctcattggtcccaaaattcagcaacctctttgagtctgagtcagaagactctcttcgtatctggaccccctgtcacattgtctgttgttagtaggataagaaatgggagtaacgtgtttaagggtgctgtccatggtgctgctgcatttgcaactggtgcttccactccaatttctggaagcatcatacagtatgctctccatctctcagctgaacaggattctggattggatttccggacaagccccatttcttatgggccagagagagaaactgatacaaaatttgttattgaagctcttcagaagtgggatgtttgttataaaagaaatagaagagacagtgctgagagttttgcatatagtgattttgagaatggagaaaataataaacttttgctgaaagctatgtggaaagggactagtatctacccatttgactgttctgttgaaaggcaaaagctcagtgctgatgaaaaccgtaatctctatatttctcagagtgagttgcagactcatgttgtgcaaactccactctggtctaaatccaggatacactttcaagttatggagggtgaaactttagaagcagacaatgctgatgtaatttcaggggaagttgaagtagaaaaagtccagacccacaacatagaatcaaggtcaaagaatctcataccagtcttcgactccctccatacatcaaggtttcaacagacaaggttgaacgctcctgataacagcaggtgcgggctgctgcagcgacagaaatctgggatttcagaagatggtagactctctcgcagaagcagctgtagttctttggactgcatgtctgaagggcccaaaagctctgatgacggtgctttcagtaaatatgtagtagatgataacagttctgctgtaattaacaacccaagtgttaaatttcatgccgagcttgtaaataatactgggagcctcaagtcagaggcccagctcggatttgtaaatagcgaggaggatggtggaggtggagagcaactcccagacttgtgatgttgactatgtcaagatggtcgatggtgatggaggagcctctttaatcgctgaagtcttcattgtgcgtgtgtagctgaattctttcatttctccatcctgagttctttacctctcttctatctatagttctattcataggcattcatgaaaattttaccgagagaaaagataggaagggaggtttaattctggccctatgggtgtggaagctttggtgatgttagttcgatatcttacaagttgtaaataacatgcaataatagcacgtaatttgtgaatatttaaatcataatgtgtccaactgaggtacgagacatcttccaccatttcaga

SEQ ID NO: 27424 - DNA, 1219 bp, Zea Mays
cctgtttctagtcactgaagatttctcttgtccattttgctatgtacgatgtggaagcttcaagggtctaggatgccatttaaactcatcacatgatctattccactatgagttttgggttgatatctgaagagtaccaggttgttaatgttagtctgaaggctgatgcttggagaacagagctttttgcggagggcgttgatccaaggcatcaaacattttcttatcgctcaaggtttaagaagcgtagacgatcaaagaacacaatggagaaaatcaggcatgtacactcacatattatggaatcaggttcacctgaagatgaggcaggatctgaggacaactttgtgcaaggggagaatgggacttctgtagcaaatgcttcgattgatcctgctcaatctttacatggcagcaatctttcaccaccaacagtactacagtttgggaagacaaggaagctatctgagagatctgaccctagaaatcggcaactcctgcaaaaacgacagttcttccattctcacagggcgcagccaatgcaactggagcaagtgttctcggaccgtgatagtgaagatgaagttgatgatgatattgctgacttcgaggatagaagaatgcttgatgattttgttgatgttacgaaagatgaaaaacttattatgcatatgtggaattcatttgttcgaaaacaaagagtgttagctgatggtcatataccttgggcctgcgaggcattctcccagttgcatggacgacaacttatacaaaatcctgctctgctgtggggttggcgtttcttcatgattaaactttggaaccataacattttagatgcccgcactatgaacacatgcaatacagtccttcaaattttacaagaagaaagcacaggactaaagtaattttgatgcttctgatgaaaattcaagggaagaagatttctttaccatttccaagaagaaagcatagaattggagtaactttttattgataatttcattcatatctattgtcaattgtattaatggtttttaaaagagacaaatcatgtctaactctcacgctgtaatattctaagtcgtacgtgaatttgatgaatattcattgttgttttacttaagagttatcgtattgagatccttaacatattattttatttttcatctaggttcttaaattataaaataatggattgagattagaaaatatttca

SEQ ID NO: 27425 - DNA, 839 bp, Zea Mays
aaatcttcccgctcgtgctcgtgccaatcccgggtttccagtcacgtttcttctgaactgaacgccgcgttcggtgcgtggccggtggcgacgatgtggcgggacgagagggaggtcgtcgtgcggggccccgcgtgcagctcgtccgcggtcaccggctggttctcccaggacctgagcgacggcaccgcggctgctgcctctaccacctccaccgcgagggcgaggccttctggcgaggtggacgtccacggcttcgccttcaacagctccgtgctctgggaccccgagcgctggggccgctacccgacctccgagcccgacaagtcccaggactccacgaagttcgtccagcaagtggttctggaagatcttagcaaggtgaagggcattccttccgattgttcagaggtcatggtatggcacgtcgatacggccgcgccttctccctcgtctccgcagaacaagaggagatagagagctgaacaccatagaagagaacggacgagcctggaggacggccggagtggtgtacactgtacatgcatggctacaccactgagatgctgattgtcctcctagctagttgcaaagaaggaaaatttttggttttctcaccggaggatggatccacctctgaccccccccccccccccccctccatcataatgtgcgattttctgctattcttttttttccttaaaaatgtgatatatgtatattttcccttttctttttactcaagtgggtttaggtgaatacaaacataataaccccttgaagtgtttctcaaggatgtaatggatagatggcaagctaaaaaagatcaacttaacaat

SEQ ID NO: 27426 - DNA, 835 bp, Zea Mays
catttttgttcttcatatgtctgaattcttgtaaccatattctctgatttcaaaatacatatacatttactctattgatgcataatgttagtgtattttgtagttaggattagagttttccttgcacagactccattaagagggggtccaaatgactacgtgagttttttttaactgacatgactacatgagttgatgatttggtatgttgaagattgaatcctgatcattgaggctggcagattagaagagagggaatcaaatgaagttgtcagatagcacagtcatgctatggtccatggtccatgttgtagtgctagtagattcagccatctagtacgatataaatttatagtagtcgttgacactgatttggatcacagactagtaagagttagtacatctctgatcgacacacaccttgaacacgaggaacatagtggatcgttgaaatcgatcgggggggtcagttaggccgatgttgatcctgttcttcgtctggtatactctcgagcacctccagggaagacctatcggggaggagcacacaaaggttgtcctaggatcagcaaggccacctagaacaccactaaatcttttcggaagatgtgacaaacaataaggtagagaggagagagtgtgtaaaaggtctagtagattgatttttgacgattgaaagttgggatacttaatcggtgataatcaacagggcacccggccgacttcatccccacctggccggctttggtcactcgtcctgaccagcttagagggacggccaggccaatttctgtagggcagcaccgctagggctggaaaataagctcgaggctcg

SEQ ID NO: 27427 - DNA, 2480 bp, Zea Mays
atgcccgacaacacccaacccatgcagtacggtatcgaagaagaagaagtcccatacactgatgaacgcatcacgtcgttatgctcttcagttcagctacttttggagcaaggtggtaattttgtggtgtctgcgcccaacatggcccatttatgccaccgtttcactgtgggctgcttcgtagccacggcacaaatggtcacgcaggcccaacccgaattcatcgatctgggccacggcccagcgccatcaggattcgtgaatcaccgaatcaggagttcaggacaggaatcgtgctgcggatgctccgtccgtgcagtggaggccgcggcatgtcagtttggcttcactaccaagcctctggcctcaagcctgcctcggccttcagcccagccgtgcccagcaccttcggacgccaattcacaacttcgttgttccttccgcagctccgagctccggaatcgagcaaagcacccgagcctgcgccgcgtcaagccgtcaaagctcccccgcttcataccattccctcccccgatccctcgcctcagccctcagctccgcccctcggtttccgaagcgccaccgccgacgtggcctccctcggctccaatggcgttgccctacctggaggccgtgctttgctttatgattttcatgtacatatttgagacatatcttgacatccgtcagcatagagccctcaagctgccaactttgccaaaacccctgctgggagtaattagtgacgaaaagtttgaacgctctagagcttatagcctcgacaaaagctatttccattttgttcatgaggctgtgactattttaatggatactacaatactatactatagagttcttccctggttttggaagaaatctggagagttagttaccagtgttgggctgagtgctgagaatgagataatacacacccttgctttcttagctggttccatggtttggtcgcagattacagacttgccgttctctctctattcaacttttgttatagaggctcgacatggttttaacaagcaaactatatggctcttcattagggatatgatcaaaggaattttactatccatgatattggggccaccaatcgtggctgctatcatctacatagtacagattggaggaccttacctggctatatatctctggggttttatgtttgtattagctctactgatgatgacaatataccccattgtgatagctcctctgttcaacaagttcactcctgtgagtatcttgttctagtgagtagtgatagctccaactagtggtggatctagaaatgatgcaggagggggctacatagtaggaggctagaaatcctacagtagatcagtgtcgggtggggctgatgtctagactctgaactgttttgggctggagactgaagagtcactcttgactgttttgggtcatgccccagcctgtagtcccccagcctggggtgcagatctgcccctggtcccaacatgcttcatctgctatttcttgtttttgcactaaattagcatgagttaagattgaattctgtgattgcactgatgtcaacagcttcctgaaggagtcctcagggaaaaaatagagaagctggcagcttccctcaagtttcctttgaaaaagcttttcgtggtagatgggtctaccagatcaagccacagtaatgcctacatgtatggttttttcaagaacaagcgcatagtactctatgacacattgattcagcagtgtagcaatgaggatgagatagtttctgttatagcacatgaacttggacactggaaactcaatcatactgtctattcctttgtagctgtccagctgcttatgtttcttcaatttggaggatatactctagtaaggagctccaaagatctatttggaagttttggcttcaaggaccagccagtaataattggattgatcattttccagcacaccataatacccatccaacaccttctgagcttttgcctgaaccttgtcagcagagcatttgaatttcaggctgatgcctttgccaagaaccttggatatgcccctcagctccgagcagcccttgttaaactacaggaggagaacttgtctgcgatgaacaccgatccttggtattcggcatatcactactcccacccaccactcgtcgagaggctgcaagctcttgaagattcagacagcaaaaaagaagattagtcgatccttgtatgaggtttacatatggatttttccctgccacatgcacaccgattcagtgcttggatggtgagggttttgacataggagtgttgtcaaagctttagagtgcatctttcggtcaggtgtaacagcctttcggtcattgagacatataagcgaattagctattaaaaaaaacagaactgttgcatctttctgagttgtgcaattgttcacgtgtcacgtcacgtttcgagcagcagagagacgcctctgagcagcactca

SEQ ID NO: 27428 - DNA, 5232 bp, Zea Mays
gttcctcccagcccccgagccgtttccctttcatttcgtctctcctcctcgctcccttttctcttctggcgcccccacccccctggcgattagctcccgcccgcctcccgctccgctcccgctccccaccgcgctcgccgtgctgtctcggcgctgcgcccggcggcgccgtgagggttggagggtgctcgtggccggcagatccggcgtcggcgtcggcgtcggcggacaggctcggaggtgagatcggcggcggggaagggcagagcgcgcgaggtggtcgagggaggaatcggctgcgcgcggaggcggggaggaggtcgagctcgcctggtgctgcatgggggcatgaagcgcggcaccagggacgacgccctcatggggtcccagctcaaacgctcgaacgttgtccgatccgatccgtcggctcagccacagcatatgtctgtgcctggttcagcgtctgcggccgcaccgccgcctcaggctggcgctgctccgccggcgcagccgcagcagccgtccggtgcggcctttaccaaccagaagctgacgacaaatgatgcgctcgtctaccttaaggcagttaaggataagtttcaggacaaacgggagaagtacgaggagttcctcgaggtcatgcgcgacttcaagagcgagaggattgacaccaatggagtgattgtccgtgtcaaaacgctgttcaacgggtaccctgaactgatccttgggttcaacgccttcttgcctaagggctatgcgatcaagctacaagaagagaagaaacctgtcgattttgtggaagctatcaatttcgtgaacaagataaagaatcggtttcagcatgatgaacaagtttacaaggcattcttggacatcctcaacatgtaccgcaaggataataagtctatccaagatgtttaccatgaggttgctatgctgttcaaagaccataaagatttgcttgaagagttccagcacttcctgcctgatacttcagtggctccacaagcagtggcctcaaagggtggtttggttaagcgggaggacaggagctctttagtgcctcctgcaaataagatccttcacaatgataagagggacagagtttacctgtcacatgctgaccgtgattttagtgttgaccgtcctgatgtggagcatgatcgccagagaagacgtcttgataaagacaaagaacggaaggtggaaagggacagaagggattatgagagagaagacaaggatggtgaacatgacagcagagacctggagctaggacagcgtaagcgaaagcctttttcaaggaatatcgaggataatgtaggtgctgagacacaccaaggaggccccagtgagaatcatggaatccacagtgtatctgcttcatcatatgacgataaggatgcgctgaagagtgtatacacacatgagttccatttctgcgagaaggtgaaggaaaagctggagcatgaagcttaccaagagtttttgaaatgtctacacatctatagccaagagattatcacaagaagtgaactgaagaacttggtgaatgatatactccaacattatccagatcttatggaagggtttaacgaattcttggagcattgtgaaaatatagatggatttcttgccggtgtcttcaacaaaaggccaagcacgagggctgttaaaactgaggataaagaaaaggatagagatcgggacagggaggacaaggatagagatcgggaaaaggaaagagaaaaggaacgagaaaggctcgataaaggatcaacattcaattcaaaggaaggttctagtcacaaaccttctatgttctctggcaaagagaagtacaacctatccaaaccaatatcagagcttgatctctcaaactgtcaacgctgcactccgagttaccggcttctacctaaaaattatcccatgcccccagccagcaacaggactgatcttggagcttctgttctgaatgatcactgggtatcagtgacatcaggaagtgaagattattcatttaaacacatgcggaagaatcagtacgaggaaagcttatttagatgcgaggatgacaggtttgagttggatatgctgttggaatcagttaatgcagcgactaagcgtgttgaagagctgatagagaagatgcaggacaactcagtcaaacctgagagcccaatacgcatcgatgaacatttgactccgttgaacctgaggtgcattgagcgactgtacggtgatcatggtctggatgtgatggatgttctacgcaaaaatgctagtgttgcattgccagttattctaactaggctcaaacagaagcaggaggagtggtcaaggtgtcgatcagatttcaacaaagtttgggccgaaatatatgccaaaaattatcacaagtcacttgaccatcgtagtttctatttcaagcagcaagatacgaagaacctgagcacaaagtctctcctgacagagataaaagaaattaatgagaagaaaaggaaggaagatgatgtgctccttgccattgctgctggaaataggcggcctatagttcccaatatgtcattcgagtatatagactcggaaatccatgaagatctacataaaatcattaagtactcctgtgctgaagtctgcaactcttcagatcaattagataaagtgatgagagtatggacaacttttctggagccagttttgggtgttcagcaaaaacatgggtctgaggatcctgatctagttaagaccaagagccgaacaacaaaattgggtcttgcaaatgtgagagaaagcaataccatagctgggattgtctccaagcaaagcaatggcgatgaaagtgaacaagatcgaattgcccgtaaaggtgaagaaccatcaaacgctatactaaatggaagagtgcatggtgctgtctctgcagatgaaacactttccctgatcacacaaaacattgcttctaccgagcgaccagcagaaaatgctgctgctgttaggactgagcaacataaggcgaacttggtacttacgccaggcatgaatgcttctagaagttctcatgatgcagttgaggtggctggtgaaggcaagactggcaatgaaacattgctttctgccgagggaggggagaggttgggaccatctttaaatggcaccagcgagggaattaaagggcgcctaaataatgatggttctgtgccccacacttcaaaagttgaaagagaagagggtgaattgtcgcctaacggagattttgaagaggaccattttgttcctttcgaagatggaacatctaaaggaaaggaagattctacaagcagaccattccatggtaggcctggggaagtggtaccctcttctgccgaggcagctggtgagaatgatgctgatgctgatgacgagggtgaggaaagtgctcagaggtctactgaggacagtgaaaatgcttcagaggcgggtgaagatgcatcgggtagtgaatctggtgatggtgaggaatgctctcgtgaagatcatgatgaggaagaagaggatatggatcacgatgatcaggatgcaaaagctgaaagtgagggtgaggcagaaggaacaactgaaacacatgatgtggaagggggaatatcactaccactttcagaacgctttctgtactcagttaaaccacttgccaagcatgtacctacagctttacatgatcgagagttctcacgtgtattttatggaaacgattcattttatgtgttgttcagactacatcagattttatatgagagactactttcagcaaaaactaattctttcactgctgaaaagaaatggaggaattctaaggatacaaaccctcctgatttatatgcaaagtttatgagcgcgctgtacaacttgcttgatggttcctctgacaacaccaaatttgaggatgactgccgagctattattgggactcaatcatatgtcctctttactttagataaactgatttataaagttgtgaagcagcttcaagctatagcaacagatgaaatggacaataagcttctgcaactatatttatatgaaaaatcaagatctcctgggaggttctttgacctagtttatcatgaaaatgcccgtgttctactccatgatgagagcatataccgatttgaatgttgctcgagtccgacaaggttgtctattcagctgatggaatatggtcacgaaaagccagaagtgactgcagtatcaattgaaccaaatttttcttcgtatctttttagcgagtacttgtgtagtacgccagacaagaaattatctgaaggcgtctaccttggaaggaataagcggaaatattcaaataatgatgaaccttcagattctttgaaggcaatggatggtatcaatgttgtgaatggtcttgaatgcaagatatcctgcaagacctcgaaagtttcatatgtccttgatactgaagatttcttgttccggcttcggaagagaaggaaaattttgcggggcgggaatgtgcccgaccgtttgcagatttcatcaatatctgctgcaaaagtgcagcgcttcaataggttcctatccaaaccataggatcatttggcatacaaatgtatcgaaacctgttgctggggtcccagctgcttggcttgaacaatgattccatcgacgtcgcggagtcccctttcggaataacagatgggaagacatagggtaaatacagcaaagcgaagcgagcatgtaggccacagtagtcagtctgttgttccgaaagatgtgtatatatgtattagcagcatgattgttctgattatctttttactgattttcgatggtaggtctattccatcaagtatttaactaatcatttgttgctgttggtataggtcttttgttcttttagccgtcgttttgcattgaagatatgtagccaaaattaaaaacctgtgtcgaacagttatgtagtcttggctccattaatcaaacggacaccgtaatttcttggagccttttggtgaggttgccagcaacctctcttgtgtatccaattcaattgaagtataggatgtgtgttacttcttgatgttgtgtaaggtggccgaaattagtggacgtgccatccactatttttactattagattagaacatatctataaaatctagagaatgtgtaaaccgtttagtcttgttcgccatattgattatcattttaatgtattggcatggatggatggaaa

SEQ ID NO: 27429 - DNA, 3989 bp, Zea Mays
gtaggtagttgctgctgtgctgttcccccccgtctgtccctgagaggcccgcggcgtctccgcttcgcctcaccacccaccacctcctcctcgccggtacccctcgccggagccagcgagcttccggcgaagaaatccggcgggcacaccacacgggggcggagcaggggggaaggggtccggcgccggaatgggggcaagcggccgggtgctcaacgccgtcgtcgctggtgtcgcgtcgctctagggttagtaggtggcagcagtcgccgatctggatgccatctcaagtcatggatccgaggcgccacctctcccagttcagcaatccaaccgtggctgcgtcctccttctctgaggagcagtttcgccttcccacagagaggcaggtcggattttggaagcaggagtcgctgcatcacattggaagcaagtcagttgcatcttctccaattgaaaagccccaacccattgggacaaaaactgtgggtcgggtagaaccacaaccatacaagctgagagaccagaagactgcatttagccttgagcacaagacttttggtcaagagagacatgttaacctaccaccatctctgtggagagctgatcaagaccctaacctccaatctgatccatctttatttcccgatggaaggaggactagtccaaatgaggcctacaacgagaatgggcttttctcaagctccctatcagaaatttttgacagaaaattgggactgagatccatggatgtgcgtctacgccagccagttcaaaaggttgatctaactcatgtagatgatgagccctttgagttaacagaggaaatcgaggcgcaaataataggaaacatacttcctgatgatgatgacctactatcagatgttcttgatgttgggtacacagcccatgctaacatgggtgatgatgtcgatgatgatatattctacactggaggcgggatggaactggaaaccgatgaaaataaaaaaaatacagaacttaatggagctaatgatggtcttgggttgctaaatggcacaatgaatggtgaacatccatatggggaacacccttcaagaactctttttgtccgaaacattaatagcagcgttgaggattctgaattaaaactcctatttgaaaattatggagaaatcagcaacctttacactgcctgcaaacatcgtggttttgtgatgatatcttactatgacataagatcagcatggaatgccatgagggcacttcaaaacaagccactcagacgtagaaaacttgacatacattactccattccgaaggacaatccttcggagaaggatattaaccaggggatgcttgttgtatttaatgttgacccctctataacaaacaatgatatccatcagatatttagcgaatatggtgacataaaagagattcgcgatgcaccgcaaaagggccatcacaaaattatagaattttatgatgtcagagcagccgaaggtgcagctcgtgctttaaacaggagtgatcttgctggcaagaaaataaaactggagactggccgtctgagtggtgctagacgttcaacacagcacatgtccaaggagttggggcaggaagaatttggtgtatgcaaactgggcagtccaagcacaaatagcccttcattgccttcattgggttcatctaatatagcagcaatgacatcttgtggacgtgaaaatgggagtatgcatggtttgcattctggacttctcacatcaatgagcccgttcagagaggcttcatttctgggtctatcatctaccctaccacagagcctgtcctctcccattggaattgcttctgctgcaactcatagtaaccaggctccccttggtgagctcagccactctcttagtcggatgaatgggcatgtgaattatggttttcaaggcttgggtgctattcatccccattctcttcctgatgttcacaatggagcaaataatggcaccccttacaatctgaacaccatcacacctgttggtgtcaataagaactcaagaacagctgaagcagttgacagcagacatcttcataaagtgggttctggcaatctcaatgggcactcatttgatcgtgccggtgaaggagccatgggattttcaagaagtggaagcggtcataactgtggtcaccagttaatgtggaataattcaaataacttccacggtcatcccaattctcctgtgctgtggcaaaatcccggatcatttgtaaataatgtaccgtctcgccccccagcacaaatgcatggagttccaagagcaccatcacacatgattgagaatgttcttccaatgcatcatcatcatgtgggctctgcgccagcaatcaatccgtcactttgggacaggcggcatggctatgcaggggacttgacagaagcatcaagttttcatcctggcagtgttgggagcatgggatttcctggtagccctcagcttcatggtctggagctaaatagcatattttctcacactggtgggagtcgcatggatccaactgtgtcttcagctcagatcagcgcaccatctcaacagagaggtcctatgttccatggaaggaatcctatggtcccccttccttcatttgattcacctggtgagcggatgagaagccggagaaatgattcaggtgttaaccagtctgataataagcggcagtatgagcttgatgttgaccgcataatgcggggggaagactcacgaactacactgatgataaagaatatcccaaataagtatacctccaagatgctcttggctgctattgatgaaagtcataagggcacttatgattttatttacttgccaattgattttaagaataaatgtaatgtcggctatgctttcatcaacatgaccaatcctcagcatatcattccgttttatcagagttttaatggtaaaaagtgggagaagtttaacagtgagaaggtggcatcacttgcttatgccagaatccaagggaaaacagccctgattgctcatttccagaactctagtttgatgaatgaggacaaacgctgccgccccatacttttccactcagatggtcctaatgcaggagatcaggaacctttccccatgggttcaaacatccgagccaggtctgggagatcccggacttcttcgggtgaagaaaatcaccatgacatccagacagtcttgaccaacggtgacacttcttccaatggagctgacaattcaggtcccaccaaggatactgagtagctgaactgcagcttgctgcatcgctaaccacaaaggcccaaacttaggctgctgcagaagttttgtctctggcgggaagctatatgcaagagggtggtaccggttcgttccccagaatctatgtgcttgttaacctgaaggccgagaaaggcgaaaaggcgcagggagagcctccagattttggtcgctgtaagaattaaccccatgttgtacagctggtcccagtaatttgtgctgaggggagagtgaaggagtcatttgatcagtttttagtggtggtgtgtggagaggaagagtcttgcctgcttttcctttttgaactttcttttgtgccttcacctgtgttacattttgagtcgagggctcctcttaaattgtgtgcagaggggctcgattttgttaccccagaacaaggcgcatgtgcgtcggcgtcgtcttctgccaccgtatctatcgaccttatgtacatcttcatctatatatagtatgagttttgatgtcatctatttcttggatgtctcacaaggttatttatttgtatctacgtgtctgttatgcttgtggtgtgtaaagcctctgtgaatcttatgcttggttgcttactatgtgagcatgaatgcaagctgtgagcgtgtaatccttgttcaaatccagagtataccaacaatagctaattgtttgtacattgctatggtttctatatgtagatcttgcttaaatggg

SEQ ID NO: 27430 - DNA, 906 bp, Zea Mays
atcatattaagttgcatgcaccaaccagtcgaacccaaaagattaagctgataggagaaggtggacaattcacttatattatattccaacatgttgatgtccagatgtggtcaaagcagcctgtttggatgttgtagtttagaaaaatgtggtatcaagaaactagagttttaggatcagcgagatagtatcatatggtacaaaaagaggtctggaatgcattttctagaatctggacaacaaagcaccaccttttaggcaatactctgggtttaaaactaagagatctgttaaggagcatcttctagttttcaatcccccctctgatactttgtatcctacacaatttaaaataagacctattattttgagactatgttgatgatattattgcattgatgtcacaggttagcaacaatgatcatcaaagtcaaggacctgttaaggatacaatgagtgttgaattggctgagcaacaaattttgcttctcgcaaggcaacaagcacaacgagaagaggaattggctcagtcacagaggcatatcttagcacttcaacaagaaattgaagagctcgagcgtgaaaatcgtctccatgatcaacaggaagcaatgttgaaaaccgagcttcgcaatatggagagatcacaaaagcgagaaggaatagatatgacatatctcaaaaatgtgattctaaaacttcttgaaacaggggaagtgggagcgttgttgcctgtggttgggacgttactacagtttagtcctgacgagtggcggtgaggatgcggaacatttcttttaaaaaatatttatgtattcagtttgtgaaaggaaaatcttgttatggcaaagcggcaagctacgactacgactactgtgcccatgatgttggaaaatcagaaaatgc

SEQ ID NO: 27431 - DNA, 3441 bp, Zea Mays
gatttttttggactttatatattgtcagttgtcacacaagtgggggcctttcaatagttttgctggtttatattccttccgcttccggcctttcaatgcagcgagcgcacgcagcgcgggagaaggcgaagcgcgagagcagaggcgcaacgcggcgccggcatggactcgggcagcaagagctggagcatcgatagctacctcaacgagcacttcgacatccccgccaagaacccgcccagcgaggcccgcctccgctggcgccgcgccgtcggcctcgtcgtccgcaaccgccgccgccgcttccgcatgttctcaggcctccacgccctcgacgacgcccagcgccgcaacatcctggtataagacgataccacctatctcctgagcttatcgaagaaggattttgtatcagtccagatgaactggcagcaattactggaatccgtgaagactctacgatcctcaagtcacatggtggaatcagtggaatatctaggaaaatcaaggcatcattggatgatggcatcaaggaaactgaaatagcaaccagacagaagctgtatggcagcaacaagcacaccgagaaacctcctagaagcttctggacgtttgtctgggatgcgttgcatgacctgacgttgattattctaatcgtttgtgccgttgtttctctaatggttggccttgccactgagggatggccgaagggcatctatgacggccttggcataataaccagcattttgttggtggtgctggtcacagcatccagtgattacaaacagtcacggaagttcatggagctggactacgagaaaaagaagatatacgcccttgtcactagagataggaaaaccaaaagggtactgattcatgatctggttgtgggtgacatcttgcatctttcagtaggcgatgtggttcctgcagatggcctgttcatctctggctactgcctagtcatagatgaatctagcttatcaggcgagagcgaaccagttgatgtttctgaagaaaagcctttcgttcatgctggaagtaaggtggtagatgggactgccaagatgcttgtgactgctgttggtatgcgtactgaatggggcaaagtcatggatactctgagtgctgatggagtggatgaaacccctttacaagttaagctcaatggtgtggccacgatcattggacagatcgggctggcgtttgctatcctcacatttctagtgctcctagtgaggttcctggtggacaaaggaatgcatgttgggttgtcaaattggtcagcaaatgatgcgctgacaatagtgaactactttgctattgcagtgacaatcatcgttgtcgcagtgcccgagggtctaccactggctgtgactcttagcctcgcgtttgccatgcagaagttgatgaatgacaaagcgctagtgagacatctcgctgcgtgtgagaccatgggttcagcaagttgtatttgcactgataagactggaactttgacgactaaccacatgatcgttgacaaggtttggatgggcgatgtatccaagtctgtcaacagtgatacaaatatgaacgagctgaaggatgctactgcagaaagtgctgtggacttacttgttcagggaatatttgtgaacactgctgctgagatcgtgaagggagatgatggcagaagatctatcttaggcacaccaactgaagcagcgttgttggagtttggcttgggcttgcaaggagatctatacggtgagtacaataagatggcaagagtcaaaatagagcccttcaactcagttaagaaaaagatgtctgtggtaatacagttacctaatggaggcctccggtccttctgcaaaggtgcatcagaacttattctagggcagtgtgacagcttcctcaacagtgaaggaaatttagcaccactgtcagaaatgcaaaagcagaatgtcttagatataataaactcgtttggatctgaggcgttaagaacgctctgtatcgcgtttaaggatctgggtgaaattcctgacgaccaaacaataccagaggatggttacacactaatagcgctttttggcataaaggatccagtccgtcccggtgtgagggatgcagtgatgacctgcatggctgctggaattaaagttacaatggtgactggagacaacatcaatactgctaaagccattgccaaggaatgtgggatattaaccgaggatggaatcgcaatagaaggaagagagcttcacgataagagcatggatgaactgaaggagatcctgcctaaaattcaggtaatggcccggtccttgccgatggacaaatataaactggtgacaagcctaaaaagtatgtatcaagaggtggtggcagttactggtgatggaaccaatgatgccccagcattgagtgagtcagacataggtctggccatgggaattgccggcactgaggtcgcaaaagaaaatgccgatgttataataatggatgataatttcagtaccattgtaaatgttgctagatggggtcgtgcggtttacttgaacattcagaagtttgtgcagttccagcttacagttaatatagtggctctgatagtgaatttcatctcagcgtgtatcataggtactgcaccacttactgccgtccagttgctatgggtgaacatgatcatggatacattaggagccttggccttagcgacagagccgcctaacgatgaaatgatgaatagaccaccagtgagacgggggcatggttttatcactcaggtcatgtggagaaatattcttgggcaggctttatatcagctccttgtgcttggtactctcatgtttaatgggaagaggatccttaacatcgaaggcccaaatgctgatagaactatcaataccctcatattcaactcttttgtgttttgccaggttttcaacgagataaatagcagggaaatggaaaagatcaacgtgttcagagggatactgaaaaactgggtctttatcggtatattgacaacaaccatcatattccaagtaatcatagtagagtttcttggaacctttgcaaacaccgtaccattgagttgggagctatggttgctcagcgctattcttggctcggtcagtttggttatctctgttatcctcaagtgcattcccgtcgaatctaggaaaacggatattaagccccatggctatgagttgattcctgaagccccagaaacagtttaggccgattattcctgtcccacatgaattggatgagattagagaaaattataaaggattttgatttatttggaattgagagggaattaagtttggcttgtacataatttaaattaaacgacgcttattctaggatggcgtatctatgtcatgtgtgcacacaacaccaagctagtgagtagtgatggtgcctttgcgtgcgatattctcg

SEQ ID NO: 27432 - DNA, 358 bp, Zea Mays
gacaatgttgacgcaccttatgagttgagcagatcttcggcaaatggaatgacagggaagatgcgttgagagtgggggtgggttgagaaaaactggtccatccttttaataggagtcacaacgatacccatggggaagatgttgggtggaaggttgggccgaattaggaatgcgcgcatggatgggggtgcggataggggcatggtgcatgcgcaagttacctactatggaagggggccgcctactatggaagctccacctgtggcacactaacgatgtgtaaggattgaaggtcgcctccatctatggaaggagacgctgaggttggaaggaggcgtgcttcggaggctgggtccat

SEQ ID NO: 27433 - DNA, 4496 bp, Zea Mays
ttaccctccactttccatgactatctcatcattctgaaggtggtggaaaatgggaatcttacggaacgcaggaagtggttccctgacattgaacctttattcaagcttctcagctatgaaaatgtgcctccatacttgaagggggctttgcgaaattcaataactgcatttataaaagtgtcacccatactaaaggatgcaatttggaattatcttgagcaatatgatcttccggtggttacagctccattaggtcaccatacagcaacacaggtctatgatatgaggtttgagttgaatgaagtagaagcgagaagggagagttacccctcgaccatatctttcctcaaattgatcaatgcacttattgtggaagaaagaaacataagtgacaaaggccggaggttcatgggtatctttaagtttgtttatgaggatgtctttggtccttttcctcaaagagcttatgctgaccccctggaaaaatgggagcttgctcttgcttgcttggagcattttcgcatggttttgagcatgtatgatataaaggatgatgatatttatgcttctgtgaacacattagctccttcctctcttgagagacaactccctctgctagaactactcaaagatttcatgagtgggaaagttgctttccggaatattatgaacatcatattagtgggtgttgactctattatcaatgagcgaactacccaaacatacggtatcattttggagagaactgtccttctatctcttgaaatatttattcttgtcatggagagagatcttgctcttgctgatgtttttcggccgctctaccagccattggatgttatattggctcaaagtcatagacagattgtagcattgctagagtttgtacgatatgattatcttccccaaattcaacagtgttctatcaaaattatgggcatcctaagttctagaatagttggtttggtacagttgcttttgaaagctgatgttggaaaaatggtaatagaagattatgctgcttgcttggagttccggtttgatgattttcagttgcttgttgacaatatttgtcgtccagctccaaacattacacatttgctcttgggattcgatgtcaatgggtccattgagcaaacagttctaaaaccaaaatctcaatacagttgtttgaagataatcttggacaatcttgaaaaagcgacaaagccggatataaattccttactgcacgaattcagttttcagcatgttggaaccattggagtgacaccgcttccaaaaaggaacagtaaccaatctcttcgaatcagcatgctccatgagagggcatggttgctaaagatgttagcactggcattacatatatccgatatatcatcatctgtatacagggaagcctgcatggctattctttatcatacttttggtcagtgtgctgagaacttccagagcacaagcttgatccattcacatgatgctttgactagcattagcgatgtaccagcaaagaggaacaaggttttggacttgcttgaggttctacagtttagatgtccggatacttcaacgaagtatccacagctgctttccagcttgggaatcgaatcgaagattgaagagatcctaaggaactctgccactttcgaaaatggtggtgtatattattattcagagagaggtgaccgactgattgatcttgatgctttccgtgaaaaacttctccagatttcacaagaattgaactcacaattaaccgagcctgagaaagctggactaaaagaatcagttcatcatttgctcaaatgggcgtggcgatataacaaaaatcttgaagagcaggctgcccaacttcacatgttgactggctggtcacagattgttgaggttgctgtatcaagaaggatgtcattattcgaggactgttctcagctattgtttgaactgcttgatgcttcgttgaatgccacaacatctccagattgttcagtgaaaatggcatatgttttaactaatgtatcgttgacctgtatggcgaaactgcgggatgaaagattcatatgcccagctggtacagattctgatgcggttacttgccttgacattatttcgtcaaagcagctaccaaatgcagcttgtaactcattgttattcaagcttgtgatggcaacattaagaaatgaatcatctgaaatcttgagaagacggcaatatgcattattactgagttattttcagtattgtagcagcattctggactctgatgtccctccatctgttcttcggttcttgctactggaggagcaagatggtgatgatgaggacatcactcttcaaaaggttctcaaggagcacaatgaattagcacatgccaacttttccatcataaggaaggaagctcaagctatcgttgatttggttactaaggatgctttccatggtagtgaagctgggaaagcactttccttttatgttcttgatgcattaattagtattgaccatgaaaagtattttctaaatcaacttcaaagtcgagggatccttagatcatgcctgagtgatgttgcaaactatttgtcaaagggccagtgtttgaatccacaggcacagaggcgggagcagagcctgcgctctccatcattgacctacaaaggtgaagaacaagattgtacgagagatagtggacttcgcaaagcagcatcagtcagtttttaatagcattttaagggagaacatgactggaactaatttgctcacgttggagcagcttagcatggcggtttctattctcagcaaggtttgggcgtatgaggaaaatgaggaatgcagctacattcaagatctattttccttgatgcattctctttttagcgttgactttgggattctaaattttatgcaatcaccaaacatgattgagaatcagaagtcagaattgatagcatttggtctttgcttcagccttgtctcttacctttatgttctcgctacaaggaaaaacatgcgatttcaagtttcatatggccgtaacagtgatcagcagcacccaacactacaaatggtttctgatcttctgaattcagcaacacttgccctagaaagagttggtgaagaaaaatatatgcttttaaacaagatccgtgacttaaatgagttgtccagaaaggaggttgatgagataataaaagtgtgcatgaagcaagattgcatatctcctaacgataacatccgtaaaaggaggtacattgcaatgatagatttgtgttgcatggctggcaaccgagaccaactcattacccttctactccaaataacggaatgtgccgttactattctcctcattcattttcaggacgatgcttctgcaaaaggtctttcttcattttctgatgaactccttcctgtgctggagagactagagcatttgaaagaggacaaagttggacgtagtctgaagttgttccacagatccattactacactaaaggagatgaccatcagaaccataaccatctgaaggccgcagcctgtacaatgtacatgtttattaggatagtacacctcgctagatttgcagatgtaaaacattgttgtgtaagctctcatatatatatatacacacttttgccctgaggcaatgagctgtatgtcatgttttaagagtaaaatgtgatttttgaggggtttccatctaggaacattaacatttaaactgtatttttttggcctataaactttcactggagatattactttttttgttttgcccttagatgtctataggacacaaagcagggagaaaaggatatctataggatggccaagattcgtgaaaggaagacaagggatgtcaaccaagtcaaatgcatcaaggacgaagcaaaccaactattagtgaagagtgaagagatcaagaacagatggaaggagtacttcaacaaattgttcaatggagggaatgagagtgctacaatagaattggacgaaccattcgatgacaacaacaggggttttgtacgaaggatacaagaatatgaagttaaggaggcgctaaaaaggatgaaggtaggaaaggcgatgggccctgatggtatccctatcgaggtatggagatgtcttggagacatagtgatagtatggctgactaagcttttcaacaccatctttcgggcaaacagaatgcccgacgagtggcggcggagtacattagtaccaatcttcaagaacaaaggagatgttcaaagttgtactaattaccgtggaattaagctcatgagccatacaatgaagctatgggagagagtcattgaacaccgcctgcgaaagatgacgagcgtgacccaaaatcagtttggtttcatgcccgggagatcaactatggaggccattttcttactaagacaacttatggagagattcagagaacaaaagaaagacctgcatatggtcttcatagacttggagaaggcttatgacaaagtacctaggagtgtaat

SEQ ID NO: 27434 - DNA, 2401 bp, Zea Mays
cagccagtacgcaccgaggcggggcaactgctccacactccacagaccacagtcgccgccggctcatctcctccgtgcccggcacacgaactccggcgccgccgacccacaatggaatcccccgacggcagtcatggcacgaatactcggcccactctgcagcggcccaacaaagtgaggaaacaccaagacccatacaacgcgacgtcgcgatcccattgcccatccccagatctcaacccgaacctcccagccgcgccgccctgatggcctacaccacctcgccgtcgacatcgacgtcgacggcagcggcggtggcctgggccttcgctgccgccacctgcgtgaaactcctcctcgtccccacctaccgttccaccgacttcgacgttcaccggtactggctcgccctcacgcacgcgctccccgtgcggcagtggtacaccgacacctcctctcagtggacgctcgattacccgcccttcttcgcttacttctcccgcctcctctccctccctgcgccgctcgtcgacgccaccctcgtttcaatccccgtgcgtgacgcgacgcccttcgcgcatctcatctacctccgcctcactgttgctttctccgacctcctcctcctcggatccgtcctcttactggcgagggacgcgcagcggaaacagcggccgttcctcgctctcgctcttgtcgtatggtcgccggcgctgttagctgtcgaccacgtccactttcagtacaatggattcctcattgggttgctgctgctttcgctgcacttcctcgagcaggggtgggatcttattgggggagtcgtgttcgcatgcttgctgtgctcgaagcacctgttcctcgtggcagcgccggtgtactttatgtatttgttccggcattattgctgtggccggggtgtcgtgaaggggctgggaaggctcgtgctcatgggttctggagtggctgctgtttttgccgcagcatttgtgcccttcgtgtactatggtcagatgcaacaactaattagccgattgtttccctttgggcgaggcctatgccatgcttactgggcgccaaacttttgggtattctatattatacttgacaagattcttgcatttcttcttagaagactaggctttaatattgccatacctgaagcttcgtttactgggggacttgttggtgattcgtctccttttgctgttcttccaaaggtcaccccaattgctacattcttattggtcattcttgccatggctccttgccttatcaaagcattctctaatcctcaaccaaagcatattattagatgggtctcgtatgcatgcacatgtgggtttatgtttggatggcatgtacatgagaaggcatcacttcatttcactatcccacttgccctaatcgccatggatagcttgaacgatgccaggcattactttttgttgtccatagttcatgctactctctattcccgttgctgtttgagaaccaagagtacctgataaaggtgctgctgctgctgacctacgctgccctcatgtgggtaggctttacggtccattttgctgcaaagtctgacctggaaggaaagaaaataagtcggtcaggcagcacagtgaagaagaatggcatcattggatggattggtttaagctatcttttgggaattgcaggcatagaattatggtctcaagtatttcaccatcatgtattcggcgataggctccccttcctacctcttataatggtgtcattctattgtggccttggaatgatgtactcctgggtgtggcagcttgtacatatagtccgacacacatgatttgattaccggtcatcagtggaagcattctcttgcctttcttgggttgaggctaatcgcgatgacaatgctgcctggaccgatgcagcggccaacacagtcatgtctgggcacagcattttctttttagctgtcgaagtcattgtctgtgtgcaagaaatttttagagatgtgtgaccgtgttatgatgtaattaatgtcagtttatataagtaacagaaaatctgcttgtatcaacccgcgcttcatgcgtgccgctcttttccccatctcaataacatctggcttctgcatcgagtaactgagtgtgtgtatgatatatgaacgattctattttctaggaaggaaagacatcaaatgtgatgtataatctgcttgttatctttctgcgtacatgcctattacgtctggcagatgatgcgaatatatcaacgattctattttcgactcgcctgctgatgatgctgatggcgcacgacaaatggggctcgtagttgcggccagccagcaagtttagaattgactgaattgaaatggaaaggaaaaccagggacgccgggacagaaaggaattggg

SEQ ID NO: 27435 - DNA, 750 bp, Zea Mays
  misc_feature (750)..(750): n is a, c, g, or t
aacaaatccaactcgccgcacgcgactgagatgagcgcgccgccgcacgtttcttacaccgcgctcccgccaccacctcctgctcccactgccacctccttctcgcagctcccgcctctgcccgacgtcgtcggtggatgccgcgtcaaggctggcgctaaaccacctgggcccggcgcaaatccaccagatccattcgcagctcttattgtccctactcttgtgagagtcgcgaggacgagctttccccctcttgagatccgatgtctaatccatttttcaagagtcacttatttgtcagctggatgggaaggatcagcaacagattcaatggttctcagatctgcaatgaccaattctataggaaagttctaactagtagatggtggttatgccaatacagcttcctttcttgcgccttatcgtggggttaggtaccacttgaaagagtttcttggaatgaaaaaagatgcatgatcattgctgaaccaacgatatgggacaacattatcactacatttcttagagctaagaagttccgcaagaagtcttttcctctcaaccactacaaaattctgatgaaggagagaaatttaaaaccatagaagtggaagatgaagatactaatgaaccacaagtagatgcgagaatagaacaagatgaagatatagtaattgttgaaagggttgaacagaggttacctaaaaggtcagatgcaccaattgtcaatcaagagaaggagacaaagan

SEQ ID NO: 27436 - DNA, 2487 bp, Zea Mays
ctaggtcgtcaccaccgatcttatgcttccatctctgaggctgccgccagccaccggccagcgtcgttcgctttgtagcagtccagctctgcgcccggcgccgcagccccgcatcgcgcacaggcacaacttctacggtcctgccgctgatcgccgcacgtggccgcgccgccgcctccctcacccgagctcgaccgcgcttctccagctcgccgcctcgacggtcgctgcctcgacacctcccccgcgtgggcatcagccgggagcagagagccctggtccctggaggcgcgtcgcgttacggcgggggcgcggcctccccagccccccttggtgatcggtcctcccccggcagactcgcctcctcggtcttgcgctcctgcgcggctgcgcgcccagcgccgtgcccggtggcggcggcgaccggcgacggtcagcccccgacagtcaggacttccgactccggacctccccctcagccccctctgtccgttccagtcccagctcgagcttgaaggttgaaacaacaagcaagatattttgaaatagcccccgccacgaaattcttcagccatcgtggaggggttcagttcaggggaggactcgactcaggaaacaggagcacgagcggagcagaaggcagtcatggcggatgaggtggagcttgctgcggaccagcacgtccgctacatcgtcacggtggagaagaagaaggactcctttgagtcgctggtgatggagcacatccgcctcaacggcgcctactggggcctcaccacgctcgacctcctccacaagctccatgccgtagatgccgccgaggtcgtcgactggatcatgtcctgctaccaccccgaatctggtggatttggagggaacgttgggcatgacccgcatgtcctctacacgcttagcgccgtgcaggtcctctgccttttcgatcggctcgatgtccttgacgtcgacaaggttgctgattatgtcgccggactgcaaaacaaggatggatcattttctggcgatatttggggtgaagttgacactaggttctcgtatattgccttatgtaccttatcattactgcaccgtctgcataagattgatgtgcaaaaagctgtggatttcgttgttagctgtaagaacttggatggcggatttggagctatgccaggaggggagtctcatgctggacaaatattttgttgtgtcggcgcgctcgcaatcaccgggtccctgcatcacattgatagagacctcctcggatggtggctctgtgagcgccagtgtaaagacggaggacttaatgggcggcctgagaaactagctgatgtttgctactcgtggtgggtgctatcgagcctagtcatgattgacagagtgcattggattgacaaggaaaagctaacgaaattcatactgaactgtcaggacaaagagaacggcggcatttcagatagaccagataatgcagtcgatatctatcacacgtactttggaattgcagggctttcattaatggagtaccccggggtgaagcctttggatcctgcctatgcactaccattgcacgttgtcaatcggattttcttgaaaaaatagaacattccattcgatctgcggcgcagagatatgctgagatggcgctgtcagatgtggacgctacttcacagaaccacgattcgacggagaaatagctgagggggaatcaattacaggaacatgttgggataccataatcttggacttgtattctcgcattggctgtggccgcttagtcgatgtttttttgtcatttggcacttgccctgttgaatgcttggtgcatgctgtgttttgctagttgatctgattctcttgtttaagtcgtaacattgtgtgtcctgatgacgacgacattagtcaggagctatctataaacagtatgtcttttttgtttgctttttttacaaatgataaacaaacttagccacgccatctgtctgtcacggaaccttcaatggttcggcatgccatcaaggatgccaaatgctttcaacgtattcttgtgcagaacctttggctccacaaccttctctacagcagaaaaaaaggtcaagcgcaaacaacaaattcatagcaagaatcttctggctcagatcgacatgccttggtaaaacatttaactaaacaacacttggtagctctcaaatgatcacatccgttacagctcaatacacctaagtagcacaggaattcaggtttaaacctacagtagagctacaaatttacctccctactcaaagcttctgacttatactactacataagaggatcatttccatggcatgatgctggacaggaacggcggctggtcgttgctactgctagcagccatgccttgatgcagcggcggtggtgggcttccggcgccaccggatgactcgctcaatgtacctcctcttgaaggagggctgctgctgttgggtcccatcctggttgttgtcggag

SEQ ID NO: 27437 - DNA, 2451 bp, Zea Mays
atggctcagtccacccctgatcccccggctttagtggcgatgacgttggcggagctagaggcagccatcgccgccctgcccggcaagtggggtgccctgcgggaggcgttcgatcgcctcgccgcctgctcaccctcgccgctccccttcgcctgggaggacctcgacggctacatctcctcgctccagtcgtcagtcgcgctgcggtttcgccaggtccgcgcactcgaggccgccggcgctgtacctgctgctgccgcgtcgttggtaactcgcggagatggaaagggagaaaaccaggagttggaggaggatgatgaattagatgaggatgtcgcggtggaagtggaggagaaggtcgcggtggaagtggaggaggaggccgatgaggagatacaggaagccgacagcgataagatttgcaatgatgaaaaggatgggaaggaggcgagagaggtggaagtggagaaggaggtggcggagttggagaaggccgatgaggatatgcaggaagccaacagcgacaagttttgcaatgatgaaaaggacgggaacgagacaagagaggtggaagtggaggacgaggtggcagaactggagaagaaggccgatttggagatgcaagaagttgactacgataaaatttgcaatgatgaaaaggacgagaaggggggcaaagaagaggtggtggaggaagagggagttgaggaggcatccaacatcaagattggcaatgagattaagtatgagaaggagtcaagggaggaggagcaggccagtaaggtgaatgagcaagatcctgacaaggagatgcaggtggttgataaggacaagctgaataccaaaggtgcttttaaggcttctcaggacaaggagaaggatcaggataccaacatggatgagacagtgaccaagatggcgtcttcagtgcagcacaaggagggggaggaggcttgcgacaggaagcagaaggaagcacagaaacaggaccttcatgagaaggtggaaggtaccaaaaatgctaaggaccagggtaatcgagctcttccacgcagatctgatgattgcactgtagcatgtgcatacatggatgccaagaggttggtcaagctcgtatgcaccaacactgacctcaaatcagagcttcatgctgcatttcgctgtgctccagatgctgcagcagtcgctctccacgtagttgagttattcctacacaacaagacatttgttaggaccaacaaggtctgggcaaactgtgttgagctagttcaaatggtacctgtatttgttaccaagccttctgcagacacgactgagcaggccaagcggatggctaaggattggaaggagatgattgacagtccagagagttgctatgttcttggcagcctagcctcgtggggcctcctttactttcttatctcctataacattgtaactgagtttgacatgaaggagatcttccgtctctttggtaacatccctttcaaacagaagaagaaatctgccatgctcttaaaaggtcttgggctcagcaatagaatcccagagttaatggactatttgatcggaaacggacaacaaatggatgttttatgtttggcacgtgttcttaacatggtggacaagtatcctccactttctcttctgaagggatatgtcgaaaaggcaaaacaaactgctatggaaatatctcaaaagaatatgacacgccaattgagggtagttataataaaggagcttgatgatctaagaagggctcattttttggttaagaaggaaatcacgaacaccaacctctgcaccagtatcagggaagaaatcaacattttgttagaagcaggagcatcacaaaggacaagaagaccggatgcaagggcaactgagtgggctggcagagaagcccgagaagaaacaaaggaagccccaacaggagcagcaacaggaacaagaaaataagccggaagagaagaaacagaaacaagaagatgggccagaagagaagaaaccgaaacacgaatataagccagaagagaagaaacggaaacaagaagataagtcagaagagaagcagcaacagaaaaagcagaaacatcataaatggctgaggcaacgcactcccatgctacctgcacagggttaccctgcaatgtggaacgcagcaatgaggagcgacttggagcctccaccatatgccgcgacgcatggagtccatcatggttaccaccaccctgtccagccaggctggcctggggttcattgcgcatcgccgttcataggaccctctacaccctggtaccctcctcctcagttctatcccaggtagcagtacctgctgtgttgaggggtgttgctccatcgcccagtataacatggattacgcgcaggagttcagttaggactttggagaaatagagtgttcttttgcaacatggtgtatgtacagttgcc

SEQ ID NO: 27438 - DNA, 477 bp, Zea Mays
aaaccgacccgcctggccacgagtccacgactgttgtatatgcatctcatcagcttggcctccaagtcgggaggaaggccgaaggggcgacccgcggccgccaccgcgaccgctgcgcgaaccctacccgccactccgatcgccaccgctggggttctcgatatatgcttacgacgaaacgaagagagcggagggagccaaggacggcggtgacgctgtcgtgaagaaggctcggggtgggggaatcggcggtggcggaagagatggtgccgaggtcggatgtgggcggcggtgggagcagcaatgcgagtggggtggtggagatcgacgaggacctgcacagcaggcagctcgctgtgtacggaagggagacaatgcggcagctctttgcctcgaacgtgctcatctccggccttaacgggctaggggccgagatcggttgaatgctggattgcaaaatacagctgggactgttgc

SEQ ID NO: 27439 - DNA, 2398 bp, Zea Mays
aagacccggtccagccgaaccaaggttggggaagaccgttcattcgaccagatttgttgagcttttgtggcaactatctgtacatgccctgagagaagtccacaagagaacatttgcagctgatgttgtatcaaatccactacctgcagcactaacagatgtttcttatcttcatgctgcttctttactcccagtaaccaaggcaagaatagctctggagaggcgtaaatttcttaaaaatgcaaacatagctgttcagaggcaaatgacatggtcaaatttggcccatgagatgacagctgagttccgaagtctatgtgctgaagaggcttatttgcaacaagagttagagaaactacaagatatgagaaacaaagcaaaactggaaggcgaactctgggacgaacggctctcaggctcatctgggcagaactctcatttggtttctaaggcaactcgtctttgggaatcaatattggctcgcaaaggccagcacgaggttttagcttctggaccaattgaagatcttatagcacatcgggagcacagataccggatatcaggatcacagttactagcagcaatggatatgagttcaagtgttccacattctgagttactatcatctaaagctggtgaaacttctataattttggagaagcaggaagaattttctcagctattccaagaaaaggaagaagcccttacaaggtcagatgataggaatggacgtactcagcaaactgttgatgtagctgaaattcttcgccgctggacccatgctttacaacgtattcataaacaatctcttcatttggccaaagcgaatgatggagaggggcctgaattactgaggagtgcatccagcggagaggccagtactcattctgattcgttaactgcaacattagctgaacatcgccagcatttagtcagtatacagggtctaattaatcaactcaaggaggctattccagcaatgcagcagtctatagacgaactctcagaagaagtgaatagtgtatctattaactcaatggaccaattgaactcgaggctgccactgccagtacaaattgcagggtttggaacatcagaagaaagcagcagtgaagtttcggagatcaattctaagctctcttctacacacttggataagcctgggggcagtcctgctctaaagctaccaccattatttagtctgactccaagttcttctggaaaaggaatacagacacaaaaacggagtgcattggctcgtcaacgtagccaggacatcacatcagaacagaaaacgcttaccatcccctcaactaaggatcaaatgaatggttcaatgcacgaaaatgatgactattctgctcatgacattagacgttctgttcgtgaagctgctttatctaagccattgaagaatacagagagaccacaagataaaaatagtgatgatggttcggaacacttctttattccgctgtcaattagtgctgcgaagaaggaaatggattcggtggcaaatcgatgtaaccaaagattaggtttgtcacctcagatgaagttcccaaagagcacaagctacaatgcagataccccaatcaacaaaagtccaattctgttaagtgaactcaatggacatgattcgatcagtgccatgagtttccttgacccggctggtggtctggcacatcagtcctttatcactgatgatgctctggatcaagtattctctcctctattgatggaatcttcgttgttccatgatgcagatgaggatctacttgacgcagcctggaggttattgtggcttatgtttgtcttattgactattcggctagttgcttgcgagttgcaaccatgttgagatacagatgcttcatcagaatttgtggggtatatgttgactattgatgcggggagaggtgatattgatgctgttttttccccttctggacaaggctctataggtgccggcgttgtaccaactgtagtggacgcaataggaaagcccaatcttgtatatttagttactatacatcagcagtatttgtgctgtaatactttttcgaattgctgaaatatgtgtttttctgctagttgcgtcctcctgagttttctcagtttcagtgtacgaaattgcaaatcacgaatctaatgaggttaagccaacggggactgtgttcagagttagatcgtatatggttacccaaaacactgtactgttgtacattgtatattgtaccgtttgtaaagtgaagtttgaatataaagatggatgtaggtaaactgctagggatagttttagcaatggtcactagaatagggtttctagggatttttaagggctgctcctatttttgagccttttttgctaaactccagcaacagattcgaaatcgag

SEQ ID NO: 27440 - DNA, 3164 bp, Zea Mays
aagtccaggacgccaaggctctctcctctcagtttttattgggtgaagaggggccggagcggcggagggggataggggggccggagccgagcggcggagtttctggaggtagacgacgcaggagctcgaaaccctaatcctgaggctgcccgcggcggcgatcgcctcctcttccttggacttatcttgcttcaactattaaggcggagtcaccatgaacgaccaaactaatgaaaaatgtccactttgcttgaacaagatggatttgacagataaacaactgaagccatgtaaatgtggatatgagatatgtctttggtgttggcatcgtataattgatgaatctggcgggaggtgccctggatgccgttctgtatataacaaggataagatcttggagacaagcgccaggaaccaaattttaaaggaactttgtgctgataagtccaactatcaaaaagaacaagtcaagtctcataagcaaacatctgcaaaagttcagttgggacagtcagaaccaaaagatccaaatagcattcgtgtgattcaacggaagcttgtctatattgttggtatgccaactgagttcgccagcgagaagttgctgagacagaagagtttccttggacaatatggaaagatagaaaacattatcattgataatgttggagctaaccaacaggttcctgactctggacgtgtatatgttacatttgcaaaagaagtagaagctatcagatgcatacaggcagttgatggttattccttggatggtcgacctttgaaagcaacctttggtgtgacaagatattgtcatatatggctcagcaataaggactgctacaagccaaactgttcgtatgtgcattataaagccccagcagaagaaatttgtacaaaagatgatgtttctgtggtgtgtgcaaggctgcagcactccatgggaatgagtaccaagtgtctccaacatcgttcgggacgtactttgccccctccatgtgactgcagttcaagaaatacaactgccagtggaatctccaaagatatttgcatcaatgatgacagattactacccaatggtgctatcaagtatactagtttaccatcagtcaccactccacgggactcaagcctttcttctggcagtcctccatcgccggcaagtattgttcttcatcaaaggaatgaccatgagagattacacaataatcagcaaaatttgtctgacctcaaacctcaaaggtacataccacctggagggcgtaactgttcaagtgaaatgactacatcagtaaagcatatgcagcctattgagggtgcttggttgcacagctcatcaaatgagcatttgggctccaataacgacaaatctcaagcatcttcacagttaggaaacgataattcaaatcccaagcaaattacttcagcagaaaatggaacatctgacaccgtgcagcaaaagccacagtatgctgatgtagtttctcaaggacaagttgcaccagtgcggcgtcttactgtacttaacaggccgtcaattgcttctagcgatactaggcctaaagcaacaggacaagttgtcaatggtacttcaacaagcttcacaaaacttactttggttcaaaaggcacaagggagctgcattacaattcctagaaaccatccagttccccagatcccagaggaacctgcgcatctgttcgcttcagctagtgttaaatctcatgctggagtagagataatgaatgaatgctcagatatcaaagaaaagatagttcttggaggttataagcaactaccagagagcactgtgtcacacagattgactgcatcacagaatatgagcagcggaactcttcccagtaatctttctgcatcttatgccaaaactcaaggatctgctggatcacacaatctttcagatttgaacatgaagcttgtagcaaagaatcgatcacagctggtaaatcaacaaaatgcaccagtttcagtttctaatacaggtatagcaagagcaagtttctgctgcagcactcttaataagaatgcatcgttgtctgatggtgatagctcgcacaataggcgctgggacacaattcggtctggtcatattgtttcctctcattcttcagatagcactatgctatcaagaccagccagtgcagtatcatccactgatgtggcatctctgcatagaaaggaaaggagacaagcttgtcctcctggatttgagaagcctcatctgtactccggttcaggcaaagcttgctctggacattgctctgcacctgatgccctggtacaagattgtggtattccagatcaacaagactttactagcttgactacagattgcctgaaagatgatggagatgtcacacaaaatctaagcatgaacatctcttcaccacccagtttgaccgataccaaccggaactggagtcagagtcacagacagtttccaggcaccctctttggttggtcaaatgaccctcagtattcattttaccctggtggctcgtcacatccacgtcaagaggctgaaaattgggatggaacttccactagttacatggctactgctactgggggatacaaagtattttcccagggaacaacttcagacatgaggggtggtatggcaggcacattgctccaacagccaataatgtcaactcatgatagatggactgatggaagcagcgattctggaaggaactgccctcaggttgacatttcgtaccgcatgtacagcctattctagcaccagggcgagaggtctgcttcctagaccctaacaacagacatgtacaagtcataccttctaacctagtagatgccaagatgatggatggtggcgaaaatggtgtcagggagtgcttcgtgtttgttgctaaagcttgtaaagatcaaacatggaggagcttcatgtacaaagactgcaggggtgggtatttggtttaacatttggtaaacagtcattctttcacgcatttgctttgcctttgcttgggtgaaatgtgaatttgcgctctcggaccgggtaccaggtgggtgccgggcgcttctcgtttccttgtcctctttttttgtttttgcccccacgctttcagtatagcatgttccatacagttcaatgtttttgtgatggaatttattcgtcc

SEQ ID NO: 27441 - DNA, 3465 bp, Zea Mays
ctttggccttttgccgtctgtccctcacccagcagctctagaaaactgtcccggtgacccagacccgtccaagtccccatccatggcacctcgtagctggacgcctggactgctgctgcacaagcacaagcacagctaccaaatccagtcctgggccctactggtaaccaagttgtgttgtgtgtagttgtgtacgtgccctattgcattgcagctctatttgcgttgtctatctatactatatatatatcctccacgatccacacgtctcagcggcagcgctcagaggtcacagcacacagacagcattcattctttcttctccgtcagttccctccactgccttcttggagctgaagctctgcacccttctcctctccccacaattggatcacgccctatctgtccgtccatccggcctcaagattccacggcgctgcgcaaggaccttccatccattgccatgtcgtcaaaccagaacgagagcggcggcggcggcggcgcgggaccgccgctgccgacggcgttcaagagcccgtccacggacggcaagagcggcagccgccggagcacgcggttcaaggacgaggacgagtacgtggaggtcacgctcgacgtccgggacggcggcggcggcggcgacgacgtcgccgtcctggccatcaaggacgacgtccgcgacgacacgcaggacgccgcgtcgctcctggaccgcccggcgcccggcggggcggggggcggcctgtcctccaagctcagggcagcgcgcgcgcgcctcggccgcatcgcgtcggggaagcgcgccgcggtgccgctctcggcgctgctccgccgcgaccccgaccgcgccaggctcgacaggagcgtcgtcaccgcgctcaggggcctccagttcctcaaccaggccgccgtcaccgagggctggcccgaggtcgagaagcgcttccaccgcctcgccgtcgacggcttcctcctccgctcgcgattcggccagtgcatcgggatggtcggatccgaggagtttgcggcgcagatcttcgacgccctggcacggcgaagggggatcacggcaatggtgctcaccaaggatcaggtccgggagttctgggagcagctctctgatccaggattcgatgccaagcttcagaccttctttgacatggttgacaagaatgccgatggtcagatcactgaggaggagctcaaggaggtcctcactctgactgcctctgcgaacaagctgtccaagatcctggagcgtgtggacgagtacacggcgctgatcatggaggagctcgatcctgacagccttggctacatcgagatcgcgaacctggagtcgctgctgctgcagccgccgtcgcaggcgccgacgaggttggtgacgcacagctccaacatcagccagctgatcagccagaggctggcgccagcgcgcgacgacggcccgctccggcgcggcgccagggccgtgctctacttcgcggaggacaactggaagcgcgtctgggtgatggcgctctggctggccatcaacgccggactcttcacctggaagttcctcgcgtaccggcgccaccccacgttcgacgtcatgggctactgcgtctgcgtcgccaagggcggcgccgagaccaccaagttcaacatggcgctcatcctgctccccgtgtgccggaacaccatcacgtggctgcggtcccggaccaggctcggcgccgccgtcccgttcaacgacaacatcaacttccacaaggtggtcgccggcggcgtggcggtcggcgtggcgctgcacgccgtgacgcacctcacgtgcgacttcccgcggctgctgcacgccagcgccgccgcgtacgagcccatgaaggcgtacttcggccagcgccggatccccaactactggtggttcgtcaggggcgtggaggggatcaccggcgtcatcatggtcgtgctcatggccgtcgcctacacgctggcgcacccgtggttccgccgggggaagctcagcgagggcaacccgctgcgccggctcagcggcttcaacatgttctggtactcgcaccacctcttcgtcatcgtctacgtcgccttcgtcgtccacggcgtctgcctctacatcaacaggacgtggtacaaacagacgacatggatgtacctcgccattcccatccttctctacgccggcgagcggcttctccgggcgctgaggtcccatggcctcaccaccgtgaggatcgagaaggttgccctgtaccccgggaatgtcatcgccattcacatgagcaagccgcatgggttcagctacaagagcgggcagtacatctacgtcaactgcggcgaggtctcgcccttcgagtggcacccgttcaccatcacctcggcgcccggcgacgactacctgagcatgcacatccggtgccgcggcgactggacggccagcttcagggcgctcttcgcgcaggtgtgccggccgcccgccgccggccagagcggcctcctgcgggccgacttcgcgtcctccacggcggccggcggcggcgggaagctgccgaagctgctgatcgacgggccctacggcgcccccgcgcaggactaccgcaagtacgacgtgctcctcctcatcggtctcggcatcggcgccaccccgctcatcagcatcgtcaaggacgtgctcaacaacatctcggacaacaaagacgaagagcagccggcggagttcatgacgcggcgcgtgtacttctactggtgcacgcgggaggagggctccttcgagtggttccgcggcgtgatgaacgaggtggcggagcgcgacgcccgcggcgacgtggtggagctccacaaccactgcaccagcgtgtacgaggaaggcgacgcgcggtcggcgctgctggtgatgctgcaagcgctgcaccacgccaagagcggcgtcgacgtggtgtccgggacgcgggtgcgcacgcacttcgcgcggcccaactggcgggacgtcttcaagcgggtggcctgcaaccaccagggccagcgcgtcggcgtcttctactgcggcgaccagaaggtcacgccggagctccgacgcctgtcgcaggacttctcgcacaagaccaccaccaagttcgtcttccacaaggagaacttctgatgtggaccaccacgaagcaggacatgatagtttcattcgtgaagcaagttattcctggtgtgttttagggtaggacaaaaacgcttgacatatgtatatgtggataataacgtatgtagtatctagtaattaagcagcttttgtttttatcttttgcgttttggaaaaaatagataggagtatacagtacagcattgttcattagtgatgttcaaagtatatactgcccgcaagtacaaaatacaaagcaaaaaaatgacttaattttggtggaattgtttgatttccttaacaaacttagcacaaacctaccgtcaacaattttt

SEQ ID NO: 27442 - DNA, 1876 bp, Zea Mays
gttaccataagcaactagcaatgccaattttcaaaagcagagtagcaatagctgtagaggtcgaattaggaattactacagttgatggttttctttggattgttctggtagtgtcacttttcaggttctgatattagccatgtttaagaacatagaagaaggaaaggtctacaatcttgttatgtttgttaagtcaccagaaacaactgacttgacagtttcactaacaagctctaacgggttgcaaaatctggcttcagctacagtaacagtttccggcgaatcaaactggataaaagtggagcaaaagttggttgctaaaggaaccaatagaacctcaaggcttcaaataacaactaacaagaaaggagttgtctggtttgatcaagtatcactcatgcctgaagacacatacaagggacatggctttcgcacagaacttatatccatgattttggatttaaaaccacgattcttgagatttcctggaggctgctttgtagaaggtggctggttaagaaatgcctttaggtggagagaatctattggtccatgggaagagagacctggacacttcggggatgtttggcattactggactgatgatggccttggatactatgaatttcttcagcttgcggaggacctgggtactgaaccaatctgggtattcaacaatggagtcagccacaatgatgaagttgatactgttgctattgctccttttgtaaaggatgtattggacagtatagaatttgcaagggggagtgcaaattcaacatggggctctgttagggctgcaatgggccaccctgaaccattcccagtgaaatatgttgcaataggaaatgaagattgtgggaaaaaattttaccgcggtaactacctcaagttctacaatgctataagacaggcctatccagacattcaaatgatttcaaactgcgatggttcatctacaccacttgatcatcctgctgatttatacgacttccatgtctataatgattctaagactttgttcaacatgaagagcacatttgacagaacatctcgtagtggacccaaggcttttgtaagtgagtacgctgtttggagaggtgatgcaggtagaggaagtcttcttgcttcattggcagaagctgctttccttactggactggagaagaatagtgacattgtttccatggcaagttacgcgccactattcgtaaacgacaatgaccagacgtggaacccagacgcaatcgtcttcaactcctggcagcattacggcactcccagttactggatgcagacgcttttccgcgagtctagtggtgctatgttccatccaacgacaatcagctccagctactcaggttcacttgcagcgtctgcgattacctggcaggactccgagaacagcttcctaagagtaaaggtcataaacttcgggtcagatgctgtgaccctgacaatctccacaagtgggctccaggccagtatcaacgctctgggatcaaccgccactgttctcacatcagcagatgtgatggatgaaaactccttcagcaacccaaccaaggttgtgccggtaaagagcgatctgagcaatgctgcagagcagatgcaggtcacgctggctcctcgctccttcagctcgttcgatctcgccctggctcagtccaagcttgtagcggagatgtgagctaggctggtacactagtatacaatacaacgtgtgaagtgtggtacacaaataccagcaaccacaggggttgccaagctgttgttagcatcttgaacacatggctttgtattgtgtataatgacatgatgctgatactaatctctattatataaagcactagtttctatgttgtcgtgctcccac

SEQ ID NO: 27443 - DNA, 236 bp, Zea Mays
attatatcatggtaacagtaaagaatggctatatgaacgaatgacatattaaaatatggatattagacttatgtatgactttggtagcatattcatatcctgccttgattatttttgtcttgctacttacgcctttacttttcttttgaatgtcatcgaataaggtgatgttgttgtgttgcctgcatttggagctgctgtggaggagatgtacacactaaatgagaagaaagtgc

SEQ ID NO: 27444 - DNA, 2892 bp, Zea Mays
ccccagtccgcactgaccactgccaccaccaaaaactcatggcctctcgcgcacccatccctcctgctccgccccacctccgcctccacgccgcgtccctcttctcgcagcgcctcccactccctcgcgcgcgtgccccgcgatgccgcggcggacggagccgcctcctctcagcgctgccgtcgccgcccccctcgccagcctcgcgctcgcagggcgtctccaccgctccgatcgagcgcgaaccaccgggactcgcgcccacgcccgcgcctacccccgctcagcagccgcaccaggatccagcgatcgccgcggaggtcgctcgcctctccgccgcccgcgagaggctccgcgcggcgcacacgctccacgagaaactccgcgcgctcgacgctgagccccgcgtcgcggcgttcttcggcgaggagtccagccgcggggtgttgggcgtgctcgagccccgcgaggtgctcctgctgaaatgcctcgtcgcggcaggacaggagcacgtgctcggccatgagctcgattggtacggcggcgacggcggccatcacgagcaccaccaccgcaacggggtcagtggtgggagtgccctgcgggatgcgctgtatagcctggccggtttggtcgggaagtggacctcggagggagtggtggctgccaaggagagaagggaggaaatggaggtgctacctagactgctcaagttcctcgacaacgtcgaggagttctacgactgcattggtggcatcatcggtcatacaagaagctatcaaattatggtattggagctcctttcagcctctaaggatcgcatgcaccgacctagcaaagacaagtttgttgatttccatgttcccagtggacttaatttattgaaggataaagaatatgcatctcaagcagctctgtggggaattgagggtctgccagaattaggtgaaatttacccaattggtggtgcgggtgatcgtcttggtttagtggactcagatactggtgagtcccttcctgctgcgttgctcccttactgtgggagatccctgttggaagggctgatacgggatctgcaggctagagagtttctccacttcaagatctttggaggtcaatgtataaccccagttgcaatcatgaccagttctgtgaaggataatcatgaacatataattgcgatatgcgaaagacttgattggtttggtagaggccgtgacaatttccggttgtttgaacagcctttggtacctgtagtaaatgccaaagatggtaaatggttaatcagcaaatcacttttccctgttggtaaacctggtggtcatggtgctatttggaaacttgcatatgatagaggtgtactccaatggttacaaaattgtggcaggaaaggtgcaactgtacgccaagtcagcaatgtggttgctgcaactgatttgaccatgatggcattggcaggaataggccttcgatgcaacaagaaattaggttttgcatcttgtgagcgaagacctggggctactgaaggagtgaatgtccttattgagaaacaaaatcttgaggggctatggtcatatggcatcacttgtatcgagtacactgagtttgaaaagtatggcatcccagaacctacactaaccaacagttcgcaggttagctttccagcaaatacgaacattctctatgttgatctacaagcggtacaggaagttggatctcgcaaaaatgctagttgcttaccagggatggtgctgaatttgaaaaaggcagtatcgtaccccaaccatcttggctttgagttgctgctggaggcaggctagagtgcacaatgcaaaacattgcagatgattttatgaacacttttaactacagatgcagcaaaggaatagaaagtgagcttaacactttcattgtatataatgaaaggaaaagagtcacttcatcagctaaaaggaagctgaaatcagaagacagatcattgcaccagactccggagggttcactccttgatattatgcgtaatgctcatgacctcctttccagttgcggcatagatattcccatggttcaagacaacagtgaatatatgcattctggaccgccgtttctcatatttcttcatcctgctttaggcccattttgggatatcatacgacaaaagttcgtaggtggttctgtttctaaaggttcagagttgcaaatagaggtggctgagtttctatggaaagatgttgagctggatggaagctttattattctagctgacaacgtcatgggttcaaccaagaatagcaaaaatggtgaacagatactgcactatggttccaggtgtgggagatgcagactgcaaagtgttaaaattgttaatgaagggatcaattggacttctcccaataatgtctattggaagcatgatgtagagagatcagaatctgtaaagattattcttcatggaaacgcagaatttgaggcaaaagatgtagtcttgaagggtaaccatgtatttgaagttcctgatggtcatagaatgtgcatcattcaggacagagcaggatttgttgttaaattggatcttatacgtgacgaattgatggacagtggaacctggcattggaagtatgcagttgatggtgtccatgtaaagttgaacatggtagaactataaggggtatcaactatagattcttgattcattgatttgtggccagcttaattttattgaggacacacttgacgttggttgactttagtctagattgtaggcgatgacatgttgtaaagataagggagctttgttttcgtacattaggtctgaactgttcccttcattgaagaggtgatgtactagaatatgtatttttcaaatatatggagaatgcttgttctccgaag

SEQ ID NO: 27445 - DNA, 1934 bp, Zea Mays
gaacaactggaaatgcatgcatgcatgcatatgcatggacggacgcgtggaccggagataccggcggtactgcgagcagatgcgggcgctggcgggcgggttcgaggcggtggccggggagcgcgcggcggcggcgtacacggcgctggcgtcgcgcaccatctcgcggcacttccggagcctccgggacggcgtggtggcgcagctgcaggcggcgcgcagggcgctcggggagaaggacgtggcggtgcccgggatgacgcgcggggacacgcccaggctcagggtgctcgaccagtgcatccgccagcacaaggcgctcacccaggccgccggcatgatggagagccacccgtggcgcccgcagcgcggactccccgagcgcgccgtcaccatcctccgggcgtggctcttcgagcacttcctgcacccgtatccaagcgacgtcgacaagcatatcctggctcgccagacgggcctctcacggagccaggtgtccaactggttcatcaatgcgcgggtcaggctctggaagccaatggtggaggagatgtacgtggaggagatgaaggccgagggccaggacggcgggggccagcagcaggtaggcgtcgccgtcgccaacaaccctaaccctagcagcgccggccacgcctccgaggcggctgaggacgatgggcgcggggacagcggcggcggcgccgtcgtcgaccggaagccgacgcgggcgcagctcctgcacgacgccggctcgctcgcctcggtcgtcaacatcggcggcggatcgcgcgcgggattcggcatcatggaccacctcgacttcgacgcctacggcggccaccatgccggcgccgtgtccctcacgctgggcctgcagcagcacgactcccacgccgacggcggcgccggcggcgtcaacatcgcgttcggcgcgccgccgcccgcgcaccaccacgggtacctgttcgctccgacggcggcggcggcaggccatcagatgggcggcggcgtgcacccgggactacaccaccacgtccagttcagcggcgccggcgccggcatcgacggcgaggcggcgcacgggcaggagcactaccggggcctgcagggcggcggcgggttccacctcctgcgtgacctggccgggtgatcgatctgctccatccacggcccgtgcatccgcggtcggccgcgcgcgagctctagctgcgactccgagtgagctgagcgatggggacgtcgtgccggcgcctagctagctaccgggtgtccgcgccggattcatggcacgcactcgatcgcgcgtgcgctcatccggccacagcggcgctgtgtacgtacgcaccggatttgtttggcttgttgcttgcctggctcgtgccggtctccatcggtctcgatcgccgccggcggcggcttggccgggcccgggtctagctggctagctagctgccctagttatacataatatatgtatttgtagcgtgtacagatcgggtcgcgatcgagcagtttggacgcgcgcaggtgcagctagtactagtagtagctagcccgccggaactgcgtagttgatcaaacacgcattgcatgcaggttaattgcattgtttgtcaatttcttgaaggattcgacgacgtacggcacaatttataccaggcattattgacgattttcctggcagaatattcatcagtccatatgcccatgcatgtttgcgaattgtctatatgtatgtttgtgattggctggtgtgtaagcctctggttagtttgcattatctaaacttttcgtaaacaaaaaaaggtgagagcgtcagctaatgttttttttcataaattgagtggctgaacaatttgaaatgagctataagagtcaggccagtttggatcaactaaagtaagttggtgtccactaataaaaagctctagctg

SEQ ID NO: 27446 - DNA, 4496 bp, Zea Mays
ctcattcccttttctctcgcgctcgcaacggcggcgggcggcggctgcttctccgtctcctacttccccgcaaacttgtctcgtattcctagcgcagccggggaacactcccggcctccgcccgagcggagcggagcgtttcgtccgcgccgctgactccgaggagttcgtttcgccgcgctgtctccctgaatcctaatcgtccttttcgcgtttggctcgactgacgcgttgattcctgcttctttcgttggtctcccattctttttttacaagaactaaaaaaataaaaattctttgggttgggatggcatcacctggccaaatgacagcaagcaatctgttacggactgaaggctttcctggaaatatggtaaaaatatgtggtttaaatcctgcgagaagtcttggatcaagaagattgcggatgactcaacactccttccatcaacagcatctttgttgcccacgtctgcaaagagtaatgactcataatatccgattgttgtcatctcctggggccgtggcatccaaggggtttgacagcccattagttgagaaacctgatactgcatcggatgttaaaattattcacttgtaccgtataccatttcttcaagaaagtgaaaccatggagctgctcaggaaagtgaaggcgaaggtttctgctaatattgttgatatactgacagagcagtgcttcaacattcaattggacaattcactcactcctgagaaacttacaatgcttcattggctcttagcagaaacttatgaacctgagaagttgcagactaggagctttctggaggatgaagtatctagaaattcttgtactgtcattgttgaggttggtccccggatgacattttcaacggcgttctcgaccaatgctgtctcaatctgtaaatctctctcattagtagaagtgacacgattggagagatcaagaagataccttttgtgcctagagcctggtagtgacccacttgatgaaggtcagctcaaagaattcactgcattggttcatgatagaatgacagagtgcatttatcgcaataagctcacatcatttcaatcagatgtagttcctgaacctgtctgcattgttccagtcattgaaaggggagaagaagcattgaaagaaataaatgtgaagatgggacttgcttttgataaacaagatattgactattatacacacctttttagagatgatatcaaacgcaatccaactactgtggaactttttgatattgcacaatccaacagcgaacatagcagacattggttttttaatggaaagcttgtaatagacggagagaccatgccaaccactttgttccagttagtgaagagtcccctaaaagccaacctcaataactctgtcattggttttaaggataactcgagtgcaataaaaggattcccagtaaatcagctacgcccaacaattccggggttcacttcaccattatccattatcatgcgtgagctagatattttattcacagcagaaacccataatttcccatgtgctgttgcaccataccctggagccgagacaggtgcaggtggccgtataagggacacacatgccactggaaagggttcttttgtcgttgcttccactgctgtacagcgtggagatgctgagatggcacagaaattgtatcgcgtagtcagggcatgtgcagaaatgggagagagcaatcctatcatcagcattcatgatcagggcgcaggaggaaattgtaatgttgtgaaggaaataatatatcccaagggagctgaaattgatatccgttcaattgttgttggtgatcatacattgtcggtcttagagatatggggtgctgagtaccaggaacaggatgcactacttgtaaaacttgagagcagaagcctcttagaatcgctttgtgagagggaaagagtttcgatggctgtcattgggaaaattgatggcagtggaaaaattgtgttgattgatagcgctgctgtggagtattccaagctgaatgacctccctcctccaacccctgttgaagaacttgagcttgaaaaggttttaggagatatgcctcagaagaccttcgagtttaggcgtgtttctcaagtcacagagcccttggacattgcacctggggtaacactattagatgctctgaagcgagtattaaggctcccatctgtgtgttcaaaacgtttcttgaccactaaggttgataggtgtgtgacaggtcttgttgcacaacagcagacagttggtcctctccaactcccgcttgctgatgtggctgtgattgcacagacgtacacagacctaacaggtggtgcttgcagcattggagaacaaccaataaaggggttgcttaatcctaaggccatggccagacttgctgttggggaggccttgactaatcttgtttgggctaaggttacatcacttgctgatgtgaaagcaagcgggaactggatgtatgctgcaaagcttgatggtgaaggtgcagatatgtatgatgcagctgttgcattggctgactgtatgattgaacttggtattgcaatagatgggggaaaggacagtctttccatggcagctcaatgtgatggtgaagtcatcaaggctcctggaaatctggttatcagtacatacgtgacatgtcctgatataacattgacagtaacccctgatttgaagcttggtgaggatgggattcttctacatattgatctcgctaaaggaaatcgccgtcttggtggttctgctcttgcacaagcatttgatcaaattggaaatgactgcccggacattgatgatgttctgtacttgaagaaggtatttgaggccattcaagaattgctcagtcaacgtcttatttcagcaggccatgacataagtgatggtggccttattgtttgtgttcttgagatggcatttgctggtaactgtggttttaagcttgacatagacttagaagataggagccttattgaaggactttttgcagaggagcttggcctcattattgaagtacactcgaaatatctcaacattgtgaagcaaaagcttgaaatagcaggcatttctgctaatgttattggagaagttactaactcaccagaaatagaagtttttattgatggcaatctgcatctcaaggaaaaaacttcagatctcagggatctgtgggaggaaacaagcttccagcttgaggagttacaacgtctgaaatcttgtgtaaaacttgagaaagaaggattaaaatgcaggacatcaccatcatggtctctgtcttttaccccaaaattcacagatgggaaactgttgactgcttccttgaaaccaaaggttgccatcattcgtgaggaagggagcaatggggacagggaaatggctgctgcattccacgctgctggatttgaaccatgggatattacaatgtcagacctcttggctgggaagtcttctctcaaggagttccgtgggattgcatttgttggtggtttcagctatgcagatgtgctggattcagcgaaaggctgggctgcatcaatcaggtttaaccaacccctcattcagcaattccaggacttctaccataggccagacacgtttagccttggagtgtgcaatggttgtcagcttatggctcttcttggctgggtgccaggatcaggtgttggaggttctcttggtacaggtggagatatgtcccagccgaggtttattcacaatgaatctggtcgttttgagtgccggtttaccagtgtgtccattggcgattctcctgctattatgttcaaagggatggaaggttccaccttaggtgtttggagtgctcatggtgagggaagagcttttttcccagatgaaaatgttctagctactgttgtgaagtcaaatctggctcctgtgcggtattgtgatgattctaacaatattactgagacctatcccttcaaccctaatggttctccactgggtatagcagccctttgctcacctgacgggaggcacctggctatgatgccgcatccagagcgttgcttcatgatgtggcaatatccatggtatcccaaggaatggcaggttgagaagagtggccccagcccttggctgcgaatgttccagaatgctagagaatggtgttcatagtgcagggaagcttcctgctgcaaggatgtagtcatccaggcaccggctgctacgagtatatggatgattggtggttgtatggcccaattgatgacccctttttggcagaataaatgtgttttgaccatcaatacattatcttgtaataatgtatcgaatttggaattttgaaaatggagaaccgtctggtttccgaagtcggaaggcctcagatatgactccactagtttaaaacatttactagtggaaaagaaatgagtgggttaattaataatgcaaaaggtacattgggaagacactgtacctagggatgaaaacggacggaaacggacgg

SEQ ID NO: 27447 - DNA, 2667 bp, Zea Mays
cttttgcgacagcttgaggacccgcacaggcatcccaaacgtttccacgttcccggatccatcccctactttatatagccttccaaaaacccaaacctccgcgtctctccctcacgaaaacgagaatggagtttctgtaccgcgccgtcgacgagcctcgaagccggtccccgccaccgccagcggcaccagttactcctggttccggatcgactgacggccacggaagcgacggtccggcggagtgcgtgggtaattctgccgtgacgctatggcagtccgatctgcccccaccggagacggcggaagccgacgcctacgaactgcggcggcaagcggagaaggcgaggatcagggagcggatcctcagggaggaagcggagcaattggagctcgagatggtggtgcgtagcgagttaagggagcaaatgctgcaactcttgtggcctacgctagggcggccgacgaggggatcagagacgaaggtggtgctgtcaccgggaacgattaccgccgccaattcgtcgccgccgattctcgcgcttgaggcccaccaaaaagcaaacgcactagcaaatgcgccgaccaagcggaagagccctgatcatgcagccggaacatccacaccatctttggcgccaagcagcaagaagcagaagagcaccttaacctgcacggtgtgtggcatcaccgcaaacagcgagaaggtcatgcaagaccacctcaatgggaagccgcacaagaggaagttggtagcacttccggagctgccaaagccagtgccagagacagagcaggagagggggctcgagacaggggaggaagaggcaatggcgatggagacattgagagattacaaacccaccaagttcatgatggcgacgacagcaggagcgctgaacgaagtgatacagatggacggttacctcctctgtgagctgtgcaatgtgcggacgtctgaccgtgttacaatgatgtgccacatacaagggagcaaacacatctctaatgaccagaagaagcatgaactttccagcaggccatcaggagtggctattgccagtgctgatcctgatgtaaagctggctctggaggattacagtgtggagctgccacccaccgtgcgccgcttggaaggctttctgctctgcgagctgtgtgacgtgaaggccccatcgatgaatggcatgcgtcaacacttgtcagggaagaagcacgagaagaaggcgagtaccagctcatctgatgcctccgtcaacggctccatagccataggtggaaaggaagaagccgaagcacagccgatagacacaaatcacacggttgtcatctctgacgacatggcagcaaaggcgaaagcgctactggcgaataagtcgttgcaaccaaagcacggtgatgacattgggctgcaagaaacgactgtggcagcagcaaaggaacgcgtcgccactggggacgacagtactgcaactcctggaacggaaatgatgaaaggcagtgcaacttctgctggggctcaggtcaacaatgtctgtgattctgactcactggccatggaagtagacggtgtgttgcaccctctgcggcgggtggatggcttcctcgtctgcctgagctgcaatgcaaaggcaccatctgagatcgtcatgcggtctcacctgtctgggaagaagcacaagcgcaagatcacactcgctgctgccggaggaaacaatggcttgtgtgtccttgccaccgccggggctgatggggcccaagaaaacatcggctcaaagcctaccaaaggcaacgtggaggcagaatcggcggcggcacaagcaaaaaccgctgccaacgaagaagcagaatcagccccgtcgttggaagtgtcacaaacgaagaacactgcatccacggcatgcatcattgagccagctgaggatggcgagattgctaaggaagctgaagaagagcaggcagctgcaggcaccaatggtggtgtgatccaagccaaggaaaccgtgagagcagatgacgccacttcccctgtcaagtcaatcaaggcgtccaccgtgatgcagcaggagaatggcaggtcagcatgatcctgcatctctacaccagtacgcactggggcctcggacatggctgcagttgcaatggtggataaggatgtctcaggtgtgacaacgatgtccgtgtgataaaatctaatggtgaagaacttgaacgtagcgttgcatgaaaaacgattggttccgcctctgcctatttcttgtgtgatgtgtagggctacaatctagtcatgaatacttgatgctttgaacgacagtaccttctcgaaatcttaacctttaatttggtcactattttcttgcaaagtatatatgtgattcgaatggacattgctttttttttcatatctacaaaattacttaaatgtttcatctgttacccctgttagagaactgatttctagatgcggcggcggggatacccctgttaggtaaataattagctaacaaaaataagccagagtatgtttagaaacttaggcaatagatgtcttttttttctctttatataatctattagcaaagtcaaatgtctaacgggcagccgggctaacaattagtcaatttgtttgccgaatttgttagccgatctgtttggaggttaatgtgc

SEQ ID NO: 27448 - DNA, 2151 bp, Zea Mays
gccagacggagccgatatccaaccctccatctaaccagtggtaatggtggttttggtcagagtgttggtcgcctgtgccaaattccgctgcccggcggcgaatttactcctctcagcctctacttctcgggttcgagctcaacccggcgggccactgctgcgacaaaggactagcaaggtttcattgcgctcaattgctatgtctaccacacaagcctcagaagcagctgctgacaaaggattgcctctggcagtggacgctaccatgattgatgagtatgcctcccagtcaaagttgctgcaagaatttgttaaaatcccaactattggcaaggcttggatcttcaattccaaggatgacgacatgtccaaagcagtggtttcgattggcaaatcagatcttttggccaataagaggagacaattccttttgaatactcacatttcaaagagtccctcaaagtctgtcgattttcagtggtcccccttccctactgaaataagtggagtgtcagcaatagttccatctccatctggagaaaaacttcttctagtacgcaattctgaagatgattcccctacaaaactagagatttggggcccatgtcagttagagaatgagatacatattgcaaaatctgttcatggatcactctatactgatgaatggtttgaagggatatcatggaaccaggaagagactttcatagcttatgttgccgaggagcctcctcaaccaaagccagtgtttaatgattatggattcaagaaggaaggtttatcagaaaaggactgcaagagctggaagggacaaggggattgggaggagacctggggagaaacctattccaagaaaaggattcctgcactgttcgtcatcaacatctccagtggtgaagttcgacctgtcaagcaaatacctagatcattaagtgttggccaagtgatttgggctccatcatcttcatatagcttggtttttgttgcatggtcatctgacaatgggttccaagggacaccaaggaagcttggtattaaatactgctacaacagaccatgtgctctgtatgctgctcctgatcctttcggacaagaagctgagaaatcattaactgagggcaataagggtgaaactacaactatgatcaaattaacagcaaacctgagcagtgcctttttcccacggttcagtccggatgggaagtatcttgtcttcatctcagcgaagagtgctgtagatagtggggcacacaatgctacaaattcattgcatagaatcgaatggtgtacagatggaaaactggatgggagccttggagttgctgacgtggtgcccattgtgctgtgccccaaagataactgttttcctgggctatactgctttggcttgcttagggatccatggcttaccgatggacaaactatgattatatcttctgtctggggaagtagggaagtaatactttctgtaaatgttgtgagctgtgaactttcaagagtgagtccccaggactcagattattcatggaatgttcttgcagttgataagaacaacattcttgcagtttccagcagccttattacactccctcagatgtactatgggattaaggtttctcagactgaaagcaattgggagtggcagggagtttcaactcctttcccaaagccatctgataagatcagctccgtactagcagagcataagttcagcatactcaaaatcccaattagcaacccttctgacgaacttgccaatggggctaagcttccttttgaggctatttttgtgtcgcataaggattctgcaagtaatccaacaatcgttgttcttcatggtggaccacactcagtttatccatcaagttattccaaatccttggcttttcttttttcgcagggatataatcttcttgttgtgaactacaggggttcattaggctttggggaagaagcactgcaatcccttcctggcaatattggttctcaggatgtcaatgatgtattgacggcattggaccttgttataaagagaggactaatagatccatccagagttgccgtagttggaggttcacatggaggtttcctgacaacacatttgattggccaggccaggatatgaagagctcaatggcatagacaattagg

SEQ ID NO: 27449 - DNA, 2508 bp, Zea Mays
gaacagacaggggcgatcagaaaagacaagcagcgtcgtcacaacacaattcagaaatcgtcaagtcctatcgtgctcgccgaaagaccgccgcctcgaacggctcgacacgacgaccttcgctctctccgccaccgaatccaccacaaaaaccaccatatccacttgttggccggccggtcaagaagaccaaggacaagggagaaacgaggggtttagttgggcgcgcgggcgatctcttcagtaaggcgttgtgtggtggtggtgtttggacggagcggagatgtcgtcggcgatggtggagcgggcaaccagcgatatgctcatcggcccggactgggcgatgaacttggagatctgtgacatcctcaaccgcgaacccggttgctggagacgatgataaaaaattgtggggacgttgtgcatatggttgttgctgagagagacatacttcatgagatggtcaagatagtaaagaaaaggcatgattatcatgttaaagagaagattctcacgctgatagatacttggcaagaagtttttggtggtgcacgtgcaagatatccacaatattatgcagcatatgaggagctcttgcgtgctggagtggtatttcctcaaagattgaatggttctgtgccaatcatcactcctccacagactcagcctctccaaaactatccctcatctttacacatttcacagcaggaggaacttgaattaccagtttcagatttccctgcattaagccttacagaaattcagaacgcacgtggcatcatggatgttctttcagagatgctggatgctttagatccaggtaacagagaggggcttagacaggatgtcattgcagaccttgtggatcaatgccgttcttacaagcaaagagtagtgcagcttgtcaacagtacctcgaacgaggagttgctcaaccagggtctttctttgaatgatgatatgcagcgtgttctggcaaaacatgatgctattgatgcaggtctagcagttcgagtggagaagccgaaatctctgcagtcccaaattggaagttcttcaacaagaaagccagataccatggaagaaacaattcagaggccttcagcaagtacaactgccaccagtcagtctccctttgggattttagcacttcctgcacctccatccagtagttcaaaagcacctgcaatacctgcttctagtatcgacctacttagtggagatgattatgtcaaacccgaacctgcaaactccctagcacttgttcctgtcactgaatattcagctgcagacaagaatgtcttagcttttgctgatatgtttgaacaaaatacagccaacaatagcaaccataaccttccatattcttttctatcttcgacttcaaattctactatctctacatcacaaacatatcatgcaccggtgcgacctgtattgcctcagcattcagctgcttatccaaatggggccagatccaatgccattgtaccttatgatcagcaggcccaatcgaactctacaggttcgcggaatgggcaaacagcctatggaggaaatcaccaaaagcaagcactaaattatggcacaggtgatcaaaatggagacattccaccagcaccatggggaactaagagatccactaacccatttgacgacgatcagcttggtggaatggcagtgcaaccaaaaggcatgcaaccccaaccagtgcaacccagtcagcatgggaacaaattcatgtcagcaccaccaatgccgaggggacagccaggaagaatgcagttgcaacaggtgcctggtgctcagcttggcgctctacaaccaacacaggctacactgaacatgcagtacaggggcatgcatccatcgatgcaaatgaatcatggaatgggcatgtattcccaaccaacgttcggaggatattatggaatgaaccaaacacagctttacggcgttcatatgtctggttatggatatggtcagcaatctgggggctactatattccgaatgctgcatatgcctatactagtgcaaacgaacttgcccagaggatgaatgacctttcagttcaaaacggtgatccaaatggagccgcagcaaataagcagagcagacctgaggatgcactctttggtgatctcttgagcatcgccaagatgaagcaaaacaaacctgcagctggcaaggttggcggctaagtttgagtaaagaaggtacataattttatcttaattgccagcagcagaaacctttcctgacagcgcatataattattttgccacgttctatgcaatgccagatggcttctcgatgtaagctcatttggtagaaattcatattgggaactggagattaggatgcttgtggggagcctcatagcaaatatgtctataactctactatatatgaaattcttgagttctcagtagcaatatgtattgtcataatttccctctgcaaatattaaggcagaatcagagattcctgttctccctagccatata

SEQ ID NO: 27450 - DNA, 4892 bp, Zea Mays
ctccgatcgatcgaagcttcggcttccaacacaggccggtgcgaaaacgcccatcaaacccctcccaaaacccagcgtaccgttgccgcgcgccgattcgaacccgccggctgggggaggagccgccgacgccgtctcggcccgcgggggcgaagccctagagatgtcggcgtccgtcgacgccgcgtcggcagtagcggtgccggcggtgccccccgcggtggaggaggccggcggcgcggtggagcaggccaggacgctcatcgcagcgctcaacctgctctctcgcaacctaccgctgccccctgatgtcatgcgcgccgtctcgtccatctaccacgacgggggtgccggcgacagggcgggggaggaggagaagggaggggacgaggagatgccggccgcggatggggcggccgaggggaactgctcggtgtacgccgctggcggcgcgaccgaggggaccaccttgattgaagagcttgaagatgcaatattgaagaatcaaagaacgcccataacctactcagaattggcagcaatacgagaagggcggttcaatgcatccattcagcatcgactagctgaacttgaaggattaccttctactaggggtgaagacttgcaaatgaaatgtttgcttgaattgtatgggctaaagttgttagacttacagaagaaagttcggtcagatatcagtgctgagtattggctacaaaagaaatgtgcatatcctgagaggcaactcttcgattgggggatgatgcggatacggcatcctttttccatgtatggaataggagatagcttttcagtggatgttgatgatgttcaccgcagaaagagattcacagagaggatgtcaagacttgaggaggaaggaaaaaatcaggcagatatcaggaagaggaagttctttgcagaaattctcaatgcttctagagaacaccaggtgcaattagggactactttcaaacaaagaaagcagcggaatgatggcgttatggcatggcatgttcgggcacgccaacgtattacacggcaagaaaaaagcagaattaatcttctgaaaactggtgatcaagaagcatatatgaggatggttgaagagagcaagaatgaacgcttgaaaatgctccttgataaaacaaatgagcttcttgaaggaattggaaaagctgtacagcgacaaaaagatgctgaacatgttagtaagccagaaggagggagtgaagtgccaaaagggtcagaatctgaggattgttctcaaatttcgggcatcaagagtgaatcagctgaggagtctccttcagatgacgatggagacctccctggccctgcagatgaaagtaaattcaatgcaggacgtagacttgattttactgttcattctattgaagaaaaggtaacagaacaaccatctgctctcgaaggtggtgaattgagaccatatcagctagaaggtctccaatggatgctttctctatttaacaacaatttgaatggcattctggctgatgaaatgggtttggggaagacaattcaaaccatagctttgatcgcttatctgttggaaaagaaggaggttgcaggaccacacttaataattgctccaaaagcagtattaccaaattggtctaatgaattcaaaacttgggctcccagcattgggacaattctttatgatggccgtccagaggaaaggaggctgttaagggataagaattttgacggagagcaatttaatgttttgctcacacattatgacctgatactgaaagataagaagttcctaaagaaggttcactggcattatttgattgttgatgaaggacatcgtctgaaaaatcatgaatgcgctcttgctcgaacactggtttctgggtaataccgtttattcatatttttactgtcttcaggcttggaatgacatgtatccacttaattatatgatgctctgattgccatgtctttttggcggtggacatattggtctataaccatttgaaataccagccattgaaatatgaagaccttcaatcttcacactcattactactaggtgtcagaacattgttgttagagtggacgcagtaaccagttcaacccaaaagcttaagctgatgggagaaggtagtcaatccacttatacacttcaacactctcactcacgtgcaaccagagagaaagacgcaaatgtggaaataaataggtggagacataaataaagcctttgctaggatttgaactcgaggcctctggcttcgataccatgttaggcgccgttcggttgttacggtttggtgggttggaacgattcctaaccgggttgcttctctaatttatataaactttgattagctggaacgattccgggtgcaatccggcaccaacgaacaagaccttaaagtggacgcataaccagttcaactcaaaagcttaagcagatgggagaaggtagtcaatccacttatacatttcaacaattgtgtatcctctttaacaatcattaaactactcttgtgatcttgtttccacatgttttgctcatatgtagtcgtagtgacaatgggcctacacctatagcatttcacagatggatcttgaatggcctgtcttggcagatacatgatccgccggagactacttttaacaggcactcctatccaaaacagcctgcaagagctctggtctttgcttaacttcatcctgcccaatatttttaattcatcccagaattttgaggaatggtttaatgcaccatttgcatgtgatgtcagtcttaatgatgaggaacaactactaatcatacatcgtttgcatcaagttttgcgtccattcttgctgaggaggaagaaagatgaagtagagaaatatctccctgtgaaaacacaagtaattctcaagtgtgacatgtctgcttggcaaaaagcatactacgaacaagtcacaagcagggaaaaggttgcgctaggatatgggatcagaaagaaggctctgcaaaatctgtcaatgcaacttaggaagtgttgcaatcatccctacctattcgtagagcattataacatgtaccagcgggaggaaatagttagagcatccggaaagtttgaattgcttgatcgtctacttccgaaattgcagagagctggtcacagggttttacttttctctcagatgacaaaattgcttgacgttttagaaatatatttgcagatgtacaatttcaagtacatgaggcttgatggatccacaaagactgaagaacgtgggaggttactggcagattttaataagaagaattcagaatatttcatgtttcttctcagcacacgagccggaggtcttggattgaacttgcagactgcagacaccgtcattatctttgatagtgactggaaccctcagatggaccaacaagctgaggaccgtgcccatcgtatagggcaaaagaacgaagtacgtgtgtttgttcttgttagcgttggttcaattgaagaagagatattggatcgtgcgaaacagaagatgggtattgatgcaaaagtaatccaggctgggttgtttaacacgacctccacagcacaggacaggcgagcattgctgcaggagatactcaggagaggaacaagctcactgggaacggatatccccagtgaacgtgagataaaccgcttggctgctcgaaacgatgaagaattccggttgtttgagaagatggatgaagaaaggaggctaaaggagaactacaaatctagacttatggatggaaatgaggtcccagattgggtgtttgccaatgataatgaaaccttacgcaagaaaaccgtggcagatgaattccggaatataattgttggttcaaagagacgtagaaaggaggttgtctattcggactcttttggtgatcagtggatgaaatccgacgagggatttgaagagattgcaaagatgactccaagggtgaagcgaactgcttattcgcctgacattcaagttgagtacaatgaaaggaggaaaaggcccaagtctgtggaaaacagcgcagatggcgcaagcaacccaacacggacacccgacaaaggaagggctggagtttcatcatacagcaaggatgagaccgaagatgatggtgaagacgaagtcatcaccagtggcttacagaagggtaacagtttcacatggaagacccttggaagaaaaaggtcaagccacttaagttcgtcgtcggactcaaaagggcgaccatcattctaatgtcagttgccttgatgcttttgctcgatgaagcccttctaataatggagtacccctggaggctagcagcgctaccatttcgaaagtaccttgaacctataaacttcaggatggaggctgtagctagcaggactaccattttgaaagtacattgaagctataaacttcagaattagtagtatactctggacttgttgccatgaattcgtaactcaaacgaacttaaattgcgttacagttcaagcctattttgggggtaaaggttattggtaaatagctggtgatggcttgccctgaatttgggctgtcttgtctgcacattccgttgagcagtcttcggctaatgcctgtccagattttactggtttatatggcaagcaaaactgtactaggtgctatctgatgtgcttccaccgaggcaagtcctcaaacaagtgtcatcttttattgtgtatagctagtagagttggctctgtgaatctatatgcacttacatagcctgatagacacacgataactacgtaaaaatagctttgtgcaaagataatttctttttgagttttcccctttaattaatcgcgttgaaactacgcgttcaaatttgtgcttccaagtgccaaacggaattcgctgcgact

SEQ ID NO: 27451 - DNA, 179 bp, Zea Mays
acctagggtttccccaagaaatcttcaagaagagatggggaagaacatctccttgatcctctcttcctcttcaattcaatgtgcccctccttttctcgatccttgctgcgtagggggagatcttgggggaggaagcaatggatgatggctgccatagggggagggggcgtccagccaag

SEQ ID NO: 27452 - DNA, 1513 bp, Zea Mays
catcactgtgtcgcccccacccccctcgccgcatgatgcccgcaacgtccgtggccgtcgcgcccgcccctccccccacctcgagagcggcacccggcaaccaccccactgtcaagatcaccgtgtccatataaggatggatcccctcacccgagaaccactcacgtcgagactaacgcatcccaagccagataaggatggatcccctcacatctccgattatttcgccgtccaaacacatgatttcctggttcaccctcctcccctttggcgtcctccagatcttgccttcgcccgcatcgacgtaggcgacgggggcatgacaggtcggttggtggagcggggctagaggccatcgatggtggttgtggcgacgtgctgctgggaagacgaggcaactctctcctccagcacaccctgtggtggagacttgccatacatatgacgcagctgaagctgcagagggcgcgcctgtgccgacgacggaagcaaagaagctggcgtcctctgtcacgaggtccaagcaggagatcacagaggacttctcgtcgattggcgggacatggcccccacggccgcccaagaagagaccagatcacaaagaagatccgaaaggcgagaggatttcatttcccggatcgacttacttctaccctccggttgtttgtggacagtattttggtgctggttttgttatcatgtgttgtgtttgttttattttaacatcactccagatttgatgaatcttagctcggcttctgcacgatgctaaccctaggctcgtcaggtttttttaagaaggaagccccaattcctgtgctagatccaccatgccattcaatgttgcagatcatgacgaatcttgtgattggaggtgaaggatgaggaagaaaaaggggaggagttgcctccagatgttgagactttgaccacaacaattgaataaacatgatgagtgattggaaaatgttcggattcttttgcaagatcaaagtttctatgcacttaatcagcttgtggatttcatcatcttggtcggcaagtttgtacgacaaaggcgacccggagtcaccgtcccttgaaagcgccccacttccggatgatgataggttgcgcattgccagcgagtttagaattgtgccacatggtgatgggggccattatctccttgtcgccctctgtgacaaagtgaaattgaaggattacatgtttcacatcttctttatgttgaaattgtcttgtatgttgtttagaccttttaaaggcaacatgccacacatatctttgttttggtgttcagagctacatatggtactcttcatggtttctgttgcgagtaacagggatatcaggtttttgtacttacctatatggtcatatctgaacctataaactgttgttaggatagatacaaggtgtgcatgatcttctttctattgattcatacttacatatgtagaccatattttatcaacttatctatactatactcaaagcaccagtttcaacggtc

SEQ ID NO: 27453 - DNA, 1135 bp, Zea Mays
caggacctttttgtggcgggggggcctactcatattggtgcagaaacagaccttcgctttgtatactgtgcagctgcaatctgctcaatgctagatgactggacaggaatggacaagttaaaggcaaaggagtacattcttaactgccagtcatatgatggaggctttggtatggttcctggttctgaatctcatgcgagtcaggtggaggaactttttgtgctgttgctgctctccatctaatgggcttcatccaagttgattttggcatctgacttaagagattctacatcaatcgacacatgcatgctcctcgaatggtgtcttcagagacaagtcactgatggagggtttcaagggagaaggaacaagctcagtgatacatgctatgctttttgggttggaggcgtcttgaagatcttgggtgcataccacttgatcgacagctgtgctctgcggagtttcttgctcacctgccagtcgccttatggaggcttcacgaagttcccggatgatcggataccagacatctaccattcttactacggcctggcagccctctccttgttggaagaggaagggctggaacccctctgcgtcgaactggggatcctctccgctgctgcattatagaaacttgtgtttctaccgaatccagttactgtacaatgtttgtgggggggggggggggggggggtaatccagtacttaacacaggataaacagctgagaaatcgaagggagtaatttattgatagagtgagttggtccgtgctgtcagtgtgctgcgcagatcgtgtaacattacttcgtgagttcgaaaggcgtgtgacaattttgtttgcaaaagtgcgatgggcaggctaactgagccagtcttcttcccagttggttgatctgattgttgacagttgagttagctgaacgctttgtatgattgtatcgtcacttggaaaggtactcgaatgtttgacgtttctgtttccgtctgtttggcataactaaatggcttgtgtctgctgccgtgaacaactttacatattgcatgcttcttcacaacattttgtttcagttaacactctctttaggcatctgcatactcatcgcttttctctcagaattcaggtgagtgaga

SEQ ID NO: 27454 - DNA, 1339 bp, Zea Mays
aaaaaaccaaacacccgtagcctccgccgagagtcgcagccgccgacacccagtcgcccaccgaggcaccgacccgaccccaaccttggagctgctgtgccccggcggtccgtctctggccagagctccgccaccgcccgccgatcagagctccgcctccgagacgacgcgcctccccccagtggctcaggccgcctgcccgcctggcaggacgccgcgccgagctctttcccggcagctgctcgcccgcgccgatcttttcttcggcaaccgcgcgcccgcgtcgagctcctccccgtccccggcagccgcgcgccagcgccgagctcctccccgcggatccgcctctgctcagtctgagctccggccagccgcgagctccgtcgaggcgtcgacgccgaggcccagctccgcccgtgagtgcctgtgccggattcagcaaacagaaatttgctctgctggttagatagatggaggtgccaatgaacaccacgcaatctggtcctcacttccctgtgcagcatcggtccctctcgttagacatcaagggaaataaaacagatattgttatcaataaatacgaagatacctttctggtgattgtgacccaaatcggctgcatgggaaccatactagctgccaagaaagatgaaagtgttttctccgacccaacctacaacgtgtctgttctttttgggaagagagatgagccactcctactagcttgcgcacgtcaacttattgagcacataagtggctcagcccggtcattggtgatttctctgggtctgaaagatcattctcagggaacgctgaaggatattactgtagctgtgatcgagaatcgcctttggtgatgattgaatagctgagctgggcatgggaacgctgaaagatactgtttagcattgcgcaataggagccatcgtttataccatgcactaaattctggtacttttgtagttagaccttctatctactgggattaacaaaaggtgggtttaagctgctgtcaaaattggagtgtcaactttaacgctaaacaaaaggcaatgtacactggtaaagcacttctgagtcgaatcatgattttcgaggctatctgacaatttcagctatccgtgctggggctgtcaccgtggagctctgtgcgtactcctttgccgtctaggactagctaggagagctactgtactcgccactcacatcacggcttaatagcctagtctcgctcactgtattcaaggagctgttgttgttgttggtctaagggccatctccaacaatttctcctatacatttttctttatctatactttctaatttattttacaatctc

SEQ ID NO: 27455 - DNA, 434 bp, Zea Mays
cccagcagctcaagtgcgtcaaccacctcgcagatggggcgcgacctggtgtggatctgccggagctcgcagaccggtcgttggtcgagctctaccgtggtatataattcccccctcaagcctcgcctcctcctcaaccacccgcgccgccaccggagaaaccacggagtagagagaaagagagctcgtcatcgcgagaaaagggtgagatagacgccaccgatgcactcgtgtgtgcccaaccattcaggccccactgctggcgctgaacctttctaaggcctccttgggttgttgcgcggtgaccttggacacggaggcgacctaggatctcggggattcctcgccggaattggagaagccgtcgtgctcatgctctgccgtggccagggatagcggcgctgcgattcacgctgaactacctcctccactag

SEQ ID NO: 27456 - DNA, 694 bp, Zea Mays
agagtgtaactggagagctttctgatttctataccaacaacttggacagatctggttttctgaagccatgtgcgttgtcagctaataagagctccactacttgttactgtcaagttttctgccaaatgctataacctgcgacggacagggctattctggcattggtactgatggccctgagccttgccatcgttcccacaaaagtgcttctgctgctggtgtttctggaggtatccacgaacaactcaccactacgaagagcaagcacagaaaggtgtaccagaaggttgagagagtggtggttcagcatacctgcagctccagtggtggtggagaaagagaaagaggacaagaaaactagatgatacatccaatgtaatctttatgttgcttggctgatacgttgtgtaacgtatcagccaatgcccacctttgtacaaagaccgcaatatcaacaacgaggggcagtttcaatgaagatttcatctcacttgtaccacctgccctgtttacatggctcttgatgctttgttgcaagttgactagagctgaggccggtgtcaatcgccgctaataacacaaatccctttctctgggttggacatatcgccgtgcggacctgcgccccttcgtttgtaacatgaacagtattgattcttcgatattatgggattgcttctctaatagactatgt

SEQ ID NO: 27457 - DNA, 2188 bp, Zea Mays
tttttcgacaacgccaaacatctggtttcgctgccccgattcgccacgaagccgcactgtgagagagggacgcggcccgttgtcctcggcttgtacgcaatccttccgtcgctgcgaagctgatccctcgtgttcgccatggcccccagcgtcgccgtggaaaacctcaaccccaaggtcttgaaatgtgagtatgcagtccgtggcgagattgtcatccatgctcagcgcttgcagcaacaactacaaacacaaccagggtctcttccttttgatgagatcctgttctgcaacattgggaatcctcaatcccttggtcagcaacctgtgacgttcttcagggaggttcttgctctttgtgatcatccatgcctcttggaaaaagaggaaaccaaatcattgttcagtgctgatgctatttctcgagcaaagcagattcttgcaactattcctggacgggcaacaggtgcatatagtcacagtcagggtatcaaaggattgcgtgatgcaattgctgctgggatcacctcacgtgacggattccctgcaaatgcagatgacattttcattacagacggagcaagtcctggggtccacatgatgatgcaattactgattaggaatgagaaagatggcattctgtgcccaattcctcagtaccccttgtactcggcctccatagctcttcatggtcccctattaccttgatgaaaaaactgggtggggtttggagatctctgatcttaagaaacaactcgaagatgctcggtcaaaaggcattgatgttagggccttggtggttatcaatccaggaaatccgactgggcaggtttatactgatcatttctcctcttgttaaagaacatctctgcttatccacaccatactctttataattgatgtaataacatgagatgtgtatttattgtactcctattttaagtcagtgaatactttgtatacttgtattgtctagggaaaggttttggttgaaaaaaataagtgtttttttgtcgttctgcaatgcgaatgaatgtttttcaatgctggtgaccaaaacacaaattttattgaagtggttcatttatttgtaggttcttgctgaagacaaccaatatgatatagtgaaattctgtaaaaatgagggccttgttcttctagctgatgaggtgagtgagaggctgatagctgatgtcagacgaacaacccaaaaaattgtgccacagctgtaactggaatgccattttcattggtaggtatatcaagagaacatctatgttgacaacaagaaatttaactctttcaagaagattgcaagatccatgggatacggcgaggatgatctccctctagtatcatttcagtctgtctccaaaggatactatggagagtgtggtaaaagaggaggttacatggagattactggcttcagtgctccggtaagagagcagatctacaaggtagcttcagtgaacctgtgctccaatatcactggtcaaatccttgcgagcctcgtcatgaatccaccaaaggttggggacgaatcatatgcttcctacaaggcagagaaagatggaatccttcagtctttagctcgccgtgcaaaggcactggaagatgcattcaacacgcttgagggattttcatgtaacaaggctgaaggagcaatgtaccttttccctcagatccatctgccacataaggcaattgaggctgctaaagctgccaagaaagcacctgatgcattctatgcgctccgtctccttgaatcaactggaattgttgtggttcctggatctggatttggccaagttcctggaacatggcacgtcagatgcacgatcctgccgcaggaagataaaatccccgcggtgatcacccgcttcaaggctttccatgaggcgttcatggctgagtaccgtgactgaactgttacagtggctgagtaccaccgtgtagaccgaaacaaaataaagctcccccctctctctgtgtctgtgcgtgtgtgtgaactgatctctgaatggacgaacaatgtactctgttggcgcctttaatggcaattgaggaaaattttgatcaaatttctgttgtctgctgttgtgaaagatgcgggattgtttcctagtgcagcgcaaaatgttgtttccatgtactgaggatattggcagggttgcaagagctggga

SEQ ID NO: 27458 - DNA, 1758 bp, Zea Mays
ccgcggcctccccgatcgccatcgacggtcccgtataaacccgcctccctgcgcttgggcagcttccctcccctcccctcccctccccacctaacgttaccggccggtcagcctctagtccacccgagcgcggccggccgcgtggacgcccgccgacgagcgagcagcgacgacgacgagcgagcaccggcggcggaggcggatggggaagtacgagatggggcggacgctcggggagggccacttcgggaaggtgaggctggcgcgggacgcgggcacgggccggtccttcgccatcaagatcctcgaccggcagcgcatcctcgccatgaagatcgacgagcagatcaagagggagatcgcgacgctgaagctgctcaagcaccccaacgtcgtccgcctgtacgaggtttcagctagcaagaccaagatatacatggtcctcgagtacgtgaacggaggagagctatttgacaaaatcgcactcaagggtaagctgacggagaaggaagggaggaaactgttccagcagctgatagacgccgtgggatactgccacgagaagggggtttgtcacagggacctcaagcctgagaatgtcctcgttgatgcaaagggaaacataaaggtttctgattttggactaagcgcccttccgcaaaaccaacgaaaagatggtttgttgcataccacatgtggcagccctaactacatagccccggaggtccttctgaacaaaggttacgatggctcggtatctgacgtgtggtcctgtggtgttattctatatgtaatgcttacagggagtcttccatttgacgaccaaaatatggttgtcctctatcagaagattctgaaagggaatgctcacattccaaagtggctctctcaaggtgcccaagatctactgcgaaagatcctggatcctaacccgatcacgcgcgtagatgtggatgggataagggcacacgattggttcaagcaaggctacgctccttctgcgccgtttaatgatgacgaagaagatatcaacgtggatgaagaagacagcctaaatatgactgagcagaatggcattcaagacaagatagcaatcaaccaaatcaatgctttccagctcattgggatgtcctcctgccttgatctatccggattttttgagaaagaggatgcttctgaaaggaaaatcagattcgcatcaaattatcccccagcttacttgtttgagaagatcgagagcattgtcagaaaaatgggtttccaggtacacaagagcaacggcaaggtgtttgagattaatgaatccctttacgttgtcgagctaaaaaagtcatctggagactgctccctgtacagaaagttgtgtgagacgctctcggaggacttgggcacatgcaaaagccagcaatttttaaagcaggattctatcagacaagagataggtagacataacagtagcttttaactaagagcccccttgttaaataggctatagacacaaactaacacaaacaatatactgaatttaaaacagtatattgggcatgcacctattacagatgtgctctctcatgccttttgtcatgaaaccttaagagacttagactatgaaaaattggcaactgacaatgtatcgaactccaaagggataatatgatgatgtaaacaagtaaaatacgcatataagtgattcagagctacctggtctctatgtttctcttatatattgattgatattggaacgtaagattgtttgct

SEQ ID NO: 27459 - DNA, 62 bp, Zea Mays
gatttcaagtcaagcaactccaagaaggcaccttcatcagccaaatgaagtacattcaagac

SEQ ID NO: 27460 - DNA, 762 bp, Zea Mays
tcggcccaaaccaagtagcgtctagggttttagcctctccaaccgcacgatggacaccgacgcgagaaggcagggggagagaaaatggcgtatttgtcccgcacagccgccgccgtcgccgtcgccgtgaggtcggcggtccgctccgcacctctcactggccgcgtcctcggagcgccactgccttcccttgcctcgccttccgctgcccggtccgcccgaatcctccgcaggacggcggccgcggcgtcggcggggctggagactctaatgccgctgcacagcgcggtggcggccgcgcggcttaggtcctgcatcgtcgtcgactcctcgtgctggagctcgctctcgcaaggtttaaacaagcgcatctgatcatggctaggagctgagcacagaagagaagtgaggacaacgagttagaacgaagtcatctcttttgcagatatttgtaacatgatatgctttgcctttatgagaggagaggtgcacctgaagaaaccaatgaacattaggaattacaaacaagggctgtaataatgtgattgttgtaaactaattttacctttgatgttcattgaatcatccacagatgtacaactggcatttgttgatgttgggattttatttacgtggatccatgaattacctgcagctcctctttcaaacggttgcttcattattggcattgggatgctcagatattattttcaattccgatgtaggcatcacttgaaatagcttcaattatgtgccttcctt

SEQ ID NO: 27461 - DNA, 3121 bp, Zea Mays
cttgttgtccaaaacccttctctacgcgtctcggtgcctcgccggctcgccgctcgcaatcgccggttcgccgtcgccatttgtccccttcccccccctcgcgaccgcccgcttcgagtgtcccccaaacaaaaaatccctcccgcctgcacggccctcgctggacgcggagcatggcggaggagcagatcgaagaggcgtccatggccgcggcggcggccacgccgttccagctccagttcgacaagcccatcccgttccagagttgacagggatgcagttgggttcggtgggaacttgttggtctgaactataaaaatggcagaatggaatccagagaaggatctgcttgctatggttactgatgactccaaggttctcctccatcgcttcaattggcaaaggctttggacaatctctccagggaagtgcatcacatcaatttgttggagccctgatggtaaaataatagcacttggcacagaagatggtttgattcttttgcatgatgtggagaatgggaagatgctaagaactacaaaatcccacgatgttgccattgtatctttgaattgggcagaagacgatccactgtcaaagtctgacaaggatgagtttttatcctatgaagaccgcaccacacgtttctttcctcctcctcctgtgatgcctaggataggtggactacgttctggagatactggtcttgcggatgagaacgaagaagctattccagaattttctagtgcttcctgtcagcgttttaacattctgtgcagtggtggcaaagatggttgtgtttgcttcagcgtttttggaatatttcctgttggaaagataaacataactaaaatcccaatcaatgttggatcctctagaaagagttaccaactccaggatgcttcagtcagcaaggtctctttatcaagaaacctccagaaatttgttattctgtgctttggaaagttggttgataccgacaacctctctgacagctgcgaaaattctggattacattgtctctacctagatacttctatcttcttcaaccgaaaaaatgagctgcatcaggtgtcccaacaagcatcaagtattcaagatatggttgaagttgtccgtgcttctgtatctttaatatccaaacaatggtcaaacgccatgagtttattccatgagaaatttagtgccttgcccaatctgatatctacacatggagtggaatctagttctgaggatgagtttcttagccttttgtttgggacacgaacaagtccagcccttcaccattttttagctagttcacttggtgaagcgggtctcaagaggatagccaaggctgttgacagtgctggaagagatattcgtggcattatcactgagcatcttcagcctgcagtggagattatttcattcagactcgcagaattaagaggcctttcaagatggcgttcacgatttcaaactatcgggttagatggaaaccttattgatggtgtaactgagagtatagggatgctagttgttcaagtggagcgcttttcaagggtggcagccactgttgtttatctgtttcaaaatttctttgcctgggttttaaagtctgttagaatattattaaatgaacctaccgaccaagttccagcagcaaacagtgaacttgtggtgatttttcttaagtttcttcttgataaggatccaatcaaacaactacttgaagcagatgagagaattgagtgtgatatggatactgcaagacatgtagaacagctagtagtttttggaggatttacagacacccaatttttggaaaagagtttggtaaatcaattcaatgaattggaagatagcttgaaggaggctttcttgatgccatttactgctatctcttcgcagatacaatgtcaaggattgcttcctttatatcctgttacatcatcagctaccttgtcatcatcctgctcgccaacatcaatatcattttataaggatgaagattcatcgcatgaggaatcctcctatagcttgactgactatgtatgcttgaagatacctgatggatcattaaataaagtaaattgcatcggtgtgataaagggctctggtaactgttgtactaccctcagcatgatgtcactttcaggttttctgttgcatatacctgacggatatgagtgtgttgacctgtcactttataaggacaaccaggtagttttactactgagtgaaacgtcttgttctgatagccctggaaaatcttggatggtgatgctgcaaatagagaacttttcctttatgccactctcaggaacattccctgcaaatatttacagtttgcaaaaactggtggcactcgatctgcaattggacacagattatgggaaagttcgtagcatacctcacaccgtatctactccatttgcagttagtgcatcgagaggagtagcctgtgtcttttcatcccggaggcatgccttggtttatatccttgatgaggatgaggaagcggagggggatgaaacttccgatatggagtgattattatccgattccttcaccttcggctcagccatttcagcttcaggcttcagcattgtcttatgtcttgttgcaatggaggcagaggcccggagatatcaatatgtacggaaacgtcgtctcattttcacggcaatgcatgcccgggttcagaagctacgtcgcgtggtaacagcctaacaggtcaccacgcacgcgcagccgcttttagagctcatgaaattgtcagtcgtcaccctgatgtgtgtaggccctgcaggttggacttcatcgtggttatttggaaagcgagcaaaattgtacacccatttctgatcgtgttgtgttatacgagtgcttgctagttgtgtaaaaaatctagaggtaacgtcaacgtgcaaaaaaaaagggtctgtcgcaaatcttgacggtcactagagctatcgcatttctaatcgtgtttgtgttatgtggattcattattttattgttcgagctgctaatgtacttggtaaaatacattgttgactgaactcgtgttgcgccttcaactcatgtttcctttcatcaaaccataggcatatctaagaacaagaaaacatgcctc

SEQ ID NO: 27462 - DNA, 3832 bp, Zea Mays
gtcttccccggcctaatcagtgtgatcccgatgtaggggagtagacgacactccaaccaccatcctaatcagccctctagcggcgccggggccccgcgacgaacgccgcccgtccgcccgcccgcctgcctcttccgccacctactagagcaaccactcacttgcccgacagcgtagctagctagctccgctccacgtccagatcactcgaatggtgtaggggggactgggaactgcggagaggagaagtggaggtgagaggggcgacgacaaagagagagagagagatgggagcgattggaggcgacgcgccggtgcagtgggacaaggtggatggggccgaggtggccaatggcggcggtggaggtgctgcgggaaggctggagaagatactcgtctcggtgaggctgagaccgctcagcgacaaggagatttcaaggggggacccggcggagtgggagtgcatcaacgacactaccatcatctcccggagcaccttcccggaccggcccactgctccgactgcgtattcgttcgatagggtatttcgttctgactgtactaccaaagaagtatatgaggaagggaccaaagcagttgccctctctgtagttagtggcattaactcaagtgtttttgcatatggtcaaacaagtagtggaaaaacatacaccatgactggaataacggaatatacagcagcagatatctatgattacattgccaagcatgaagagagagcgtttgtattgaaattttcagcaatcgaaatatataacgaagttgtaagggatcttcttagtgcagaaaacacatcgcttagactttgggatgatgcagagaagggaacatatgtagagaaccttacagaggtgaccttgagggattcagaccacctgaaagaacttatttctacgtgtgaagctcaaaggaggaccggagagacatacttaaatgaaaacagctccagatcacaccaaatacttaaactgactattgaaagttctgctcatgagttcttgggtaaggacaagtcaacaacacttgttgctagtgtgaacttcgttgatttggctggaagtgaacgtgcatctcaggcattatcagctgggactaggctgaaggaaggttgtcatattaatagaagtctacttaccctaggaactgtgattcggaaactaagcaaggtaagaaatgggcacataccataccgagattcaaagctcacgcgcatattacaaccttctctaggaggcaatgcaagaacagcaattatttgtacaatgagcccagcccggagccatatggaacagtcaaggaataccttgttgtttgcaagttgtgcaaaggaagtggtgacaaatgcccaggttaatgtcgttatgtctgataaggcactggttaagcaattacaaaaagaacttgcaaggttggagagtgaattgcgatgcccagcttcatattctggtcttgaagcattagtgagagaaaaagataatcaaatccggaagatggataaagaaattaaggaactgaagttacatcgtgatcttgctcagtctagactgcaagatttgctcaaggttgttggagataaccacggttcgaagcaccccctggcttcttctgcaagaaattttacttttgatgttcctcagccatgtgaggatgagcaatcgacgacatcagaagctatcagcagtggccaaaattttaggcttcaaggacgcctgacaacacaaagagattataggtcacagcaatctgaaaatgatgtgcagtttgctacccctcttagctattcaatcagcagtcccccattcagtgggatgcctccaactaatggcagaaatgataactctcatatatctgatgaagattcagaggatctttgcaaagaagtacggtgcatagagaccaatgaaacagaagaaaatgaatgcttagagtcgtcagctgtgggaagcaatagtctgcaagattcaaatttagcttccagcatgcatgggaacgacaatacaaatcgatctgtgaattctggacggaatgatgcatcttctattaccctggaacaacatctggagaatgtcaaaaaaccgtttgccaatcctggcatggatctgggatcctctacacgtaactcgtcaagctcaaaagtaattggcagaagcaggagctgtaggtctctgatgggttctactctgttggaagacttggagaaagaagtttgcacccctccaagcagaagtttcatggactacccagggaggcccgaaacatgtcaaagaagggtacccgcactgaactacgatgcagagagtgaagctttatccagggcaggatcaatgctatctgaaattaccaccacgaggggtggactgaaggaaaacagctctgctgctggtgatacagaatttgttgctggcataggtgaatttgtcgcggagctaaaagaaatggcccagggtcataatggagaattggctgaagggaccataaggagcgtggggctggatcccattatggatatcttgcaatcaccttctcgctggcctttggaattcgagaagaaacagcaggagatcattgacctgtggcatggatgcaacgtttccttggtccacaggacttactttttcctgctgttcaaaggggacccagccgacgccatttacatggaagtggagcttaggaggttatcatttctcaagaacacatactccaacggaagcatggggtatgatatggtggcaggcagcttgagcacttctctggtttcaagtgacctgctgtgcagtgcaaagaaactgcaacgcgagagggagatgctctgcaggcagatgcagaagcggctgacgatccaggaacgggagagcctgtacaccaagtggggagtctcgctgtcctccaagaggaggcggctgcaggtcgctcggcgcctttggacggagaccagggacctggagcatgtgagggagagcgcgtccctcgtggccagactgatcgggctcctggagcctgggaaggcgctgagggagatgtttggtctgagcttcgcgccgcagcagtccacccggaggtcgcacagtagttggcgggctgaaggcagctgcagggattacgtggctataaagatggatggctcgagtattctgcgacttctttagagtaaagtgctttcggcaaggagaactgcagtgggtttgctcatggaactgatctgcttaagaaggagagaaatggttgaattgctcctgcatggatcgagagcagagtcgatcgtggaggcaatggatgtgctgctggagtacctccggagcttgcccgcagaagaacaagccccaatcgccgttctactgatgtgtttggatgcattggtggagccaaacagaaacagcacgtacagagaagaggcgatcaagaccatcgcacgttctctgagatgctgcctgtcagaggacactgccgttcccagcactcggagagctctgctgctgcttctcaggcgaccttcacgcagaggactggatgctggaacatgccggcttcgttgaccactcacgggccaccactgccacttctgatgctgttgtacacgacaaggaagcgaccgaaaacgatgcgtggctgagacacgtggctgcggcgctactcggcagccgtagcgagatcaggagaccgttcctggaggcgctgtccacgtgcctgggctcccccgacgccggcctggtgggggcgtgcctgacgatggcctggtggaggttatcagtgagaaagtagatatctgggctcttgggtgtctcttgtatagaatctgcacagaatattaact

SEQ ID NO: 27463 - DNA, 1014 bp, Zea Mays
atttataaacactgccaattagtccgcgccggacctccaacccgcccccacggcccacgccatcctccgcaccccccacgccggacaaccggggctcgccgcgccgctacgctcccaagccggaactccgaactcgccgcgccgttctcactgtggcaccagagctgctcgatctgccccgccctcgcccctcgcccctcgcccccttgccggaggggcgcgaactcgcaaaaattattgggtgtgcatttatacacccatgttctttgctgaccctgtctggtagcagattaaggtttggttgcggaaaatattggtgggttgtccaccatgacgagtccgccaagggtgagcatggagatcaccgacgacatgctcaagagcatggaggtcggcctagctttccgggactataatggtagaattagttctatggattttcacagcaaggctaccaactatcttgtgacagctagcgacgatgaatcaatccgcctatacgacactcaaaatgcagtatgtttgaagactattaatagcaaaaaatatggggtcgaactagtgtgcttcactgataacccaaatattgtcttatattcatcaaaaaatggctgggatggtaagtcctcttttatgttaatttgaaaatgattgatttcatgtactgaaaataagtaatagtgcagaatctctgcgtctactctcactgaatgataatcggtttcttagatattttaaaggtcaccttgacaggtatgtcacactatcttaaaataaattgtactccctactttcctatgtcaaacttgttgaacttcaaccaagcttataggaaaatgcacaaattaaatgtcttgatagtgcaatatactttcctaaggcttggtcaaatttagagaagtttgactgacgacaaaagccaaagggaactataatttggaaaggagggagtagttaacattttggtcgtgctaatgccagtggaggatgctaatatgctgtgttttgtccagg

SEQ ID NO: 27464 - DNA, 1397 bp, Zea Mays
aagcagggcacatgctgacatgccccgtgaccgtgccgttgtatcagaataatgccaaggagatgctgatgcgctggtcaacaccggtctggcgaagctgggctacgagtatgtcaacatagatgattgctgggcggagtctgacagggactaccagggaagcttcgttgcaaacagacaaaccttcccctctggcatcaaggcgctcgcggactacgtgcacgccaaggggctcaagcttggcatctacagcgatgctgggacacggacgtgcagccagaaaatgccagggtcacttgaccacgaggagcaggacgtgaagacattctcgtcctggggtatcgattatctgaaatacgacaactgcaacgacgccggcaggagcgtcatggagaggtatacgaagatgagcaacgctatgaagacgtatgggaagggcatcttcttctcgctgtgcgaatgggggaggcaaaaccctgctacctgggcaggcggcatggggaacagctggagaacgaccgatgatatcgccgacaactggggcaggtgctcatgacgtctcgtgcagaccagaacgacaggtgggcttcctacgccggacctggcgggtggaacgatcctgacatgcttgaggtgggcaacggcggcatgtccgaggcggagtaccgctctcacttcagcatctgggcgctcgccaaggctccgcttctgatcgggtgcgacgtgcgggcgatgagccagcagacgatgggcatactcagcaactcggaagtcatcgccgtgaaccaagatagccaaggtgcgcagggaaagaaagtgcagtccagcaatggcttggaggtttgggctgggccgctcagcaacaacaggaaggccgtggttctctggaaccggcagggataccaggcaaccatcaccgcacagtggtcgagcatcgggctcgcttcttccactgctgtcactgctcgcgatctatgggcgcactcgtcgttctcggctcaaggccagctatcagcttcggtgccacctcacgactgcaagatgtatgtcttgacgccgaactagctcagaagacaagagcggattgttccatggcgcgtgggatgcaaccattcggtcaggattcagggaagaagagtatgcagtgcaggcaaggatttcaagagaaggaaattcgatatcatttggttatacaggatatgagtgcgaatggaggaataatttatactaatactatggaagtgtatctaaggcgccgtcaaaatgccggtgcctgtgttactggatgtttgtaacgagagttgcagcaataaaattggcttgcccaccaccctttttacgagcatgtggacggatttcagagaacaagagaatatagaaaatgtgcgttctctgtg

SEQ ID NO: 27465 - DNA, 2516 bp, Zea Mays
atctacgacagtggcggcggttcgaggttcggtgcgagagcgcgacgtcccggaatcggcggcggcgaagatgtcggtgagccacgcggaggacatcgagatatcactgtgcgacggcaactcggaggacgagcggcggcggcgtaagatcggctcgctgcggcggaaggctatccacgcgctcaagaagcgagggaggcgccgcgtcgacttccgcttcccgccggcggccatctccatcgaggacgtccgcgacgccgaggaggagcgcgccgtcgcctccttccgggaccgcctcgccgcgcacggcttcctccccgacaagcacgatgactaccacatgatgctcaggttcctcaaggccaggaagtttgaagccgataaggcaatgcagatgtggtcggagatgctgaaatggaggaaggagttcggaactgacaccatcctcgaggattttgatttcgcagaactggatgatgtgctgcgctactaccctcagggctaccatggtgtggaccgcgaaggccggcccgtgtacattgagaggctagggaaggtggatcccaacaaactcatgcagatcacgtctgtggatcgctacatcaagtaccatgtccaggagtttgagagagccttcagggagaggttccctgcctgcacattggctgccaagaggcacattgactcgaccactaccatcttggacgtccagggtgtggggtttaagaatttctccaagactgccagagaacttgtgcaccggatgcagaagattgatagcgactattatcccgagacactccaccaaatgtttgttgtgaacgctgggagtggatttaagtggatctggaacagcgtgaagggcttccttgacccaaagacttcatccaagattcatgtgcttggttcgaactaccagagcaggcttcttgaagtaatggattcgagtgagctgccagaattccttggcggttcatgcacatgtagtgacaagggtggttgtcttggatcgaacaaagggccgtggaatgatccttatatattgaagctgatccacaatttggaagctggatgcgcgagggaaatcaaacctgtttctgagggggaagaaagaaacagctcatcctttcggttggaacagatgaaatggcagggcttgctaagtgatacatcaaatgctgaatctggatctgatgttgatgattttggtgcatcatttgttcataaagtttctgactatggttgcttgactccagttcatgaggaagtaaagggcacagatcgtgtgacatacttcagctatgatgatcaaagccacccggatatggctcctgaatcttaccatggagcgcgacgagctactggaatggagcaccacaaaccaatggctgatttcagccaatattctgccaatagaaggcctggggacagtgctcttaacgtcaatggtacggccgctcaaagcggctgggaaaacgtggtgaagctagtggttacaactttggtcaagctcttctacttcatccggcttttcctctccacagccgagaggaggctcgagagcatccatcgccctgctccaccagcggccccagcagcggcagaggagccaagacctcgcgccatcagtgatgaagaggtgtgcgcctgcctgcagcgccttgacaatcttgagtcgatgtgcagtcacctcgccgccaaaccgccgcagatcccagaggacaaggaactcattctgttgagctcgttcgagcggatcagatccgttgaggctgacctcgagaggaccaaaagagtattgaatgcgaccgtggtgaagcagaaggcactggtggagactctggaatccgtacaggagtcgtcgtctagagtcaagaagaggatgttctgttcataggacattgagccgagctgagcaccagcagatcccaggaaccatgccatctgcgtcgtcattaaccaacaaactgtgaagctgacgtgcgaagctgccagcagccggagcggagccgccattttgacctcgtcgcgaccacccacttcgtcagccctccgaggaggatgaaccagcctacaccaaaatggaagagaagaccgtagcacccatgtcccttcctttcattcccactcgtttttgtagcctccgtacggttgtatttgttccctgccttccggcgctcccgttttttgattggtgaattctctgctccggccggccgccgagcgccatgccaagtgctgtgttacatcttcttttccttggtgccgtccgaatggctggagtcgttcttctgtatactgatgagtacagagtagtgacccccgcggcaggagctgagctggggagaagcacggtggcgagcttggtctggctgcagctcctgtgctgtcgtctgtacatggcacagactgcttctggtggccctgctaatacagattgctatgaaatggcctgtttgggttctgtgctgggatttgtcgctggatggattggtttaggccacctccccggctga

SEQ ID NO: 27466 - DNA, 1640 bp, Zea Mays
gtaaagtttccgttccacttagcttggggaaaatcgatctagatcacttctgtcctgtgaaaatggcggatgaactacgctcaacgtctgtgggtcagaagttccatgggcagtccgtgctgttgagcagaatctcttcctattccgccatgaacaaccctgtattcaacaatgcctattctgcttacaatgtgccccagaggtcatatcatgggatgaatgcaactgctggactctcatctgtcatggcaccatctcctgtctttgcttctgccccaaaagagaaaggcttttctggatttatgatcgactttatgatgggtggagtttctgctgctgtctccaagacagctgcagctccgattgagcgtgtcaagcttttgattcagaaccaggatgaaatgctcaagactggcaggctttctgaaccgtacaagggtattggggactgctttggccggacaatcagagatgagggttttgtctcactgtggagaggaaacacagctaatgtcatccgttacttccccacacaggcattgaactttgcgttcaaggatcacttcaagcgcatgttcaactttaagaaggacaaggatgggtactggaagtggtttgctggaaatctggcttctggtggagctgctggtgcttgctctctattctttgtctattctctggactacgcccgtacgcgtttggccaatgatgccaaggctgcaaagaagggtggtgagaggcagttcaatggactcgttgatgtttaccgcaagacccttgccagtgatggtattcgtggcctctaccgtggattcaatatctcttgtgtggggatcattgtgtaccgaggtctttactttggtatgtatgattccctgaagccagtgcttcttgttggtaccctgcaggataacttcttggccagcttcttgctcgggtggggtataaccattggtgctggccttgcctcctaccccattgacactgttcgccgtcgcatgatgatgacatctggtgaggccgtcaagtacaacagctccttggacgctttcaagcagattgtcgcaaaggagggtaccaagtccctcttcaagggtgctggcgcaaacatcctccgcgctgtagctggtgctggtgtccttgctgggtacgacaagctccaggtggttgtcttcggcaagaagtacgggtctggtggtggctaaggatgtataatgatgatgacgacgaacaacaaacatgatgttttaggtgcctcctttaagtaaacatacgtacggaccctcgacaccattttaagttcgctctcgcagaggctggtgagtttgtagcgtggctgtgaccgcacctctttttatgtcagagattggaaataagtgacgttagaaattgctgtcttgctgcatcagttttttatactccgttttttgttttgcgcgtgcaaagggttgctcgaatgtatctatgtaggtttcggaatcacagcttactatgtttgatgaaggtgtatgttctgtgacctttggcagcatcacttcatctgtctagcgctacatgattttaaggatcatctggtattattacggtaacactcgatgtttgatgggggtagtgaatgctcatatgagtgggttcgagag

SEQ ID NO: 27467 - DNA, 809 bp, Zea Mays
ttagtttttacccattggcatcgcccgtctgtactgtacaacatccgatccgaaacctagcaacacccccggacagacgggcgcgaactcaaaccctagaaacggtagccatggattcgggaggcggaggagggagcggcgcgcacaaggcggcctcgggctccgcgccctcgccggcgcctaaccccacggcgatgctttcggcgctcatgagcaagcgcgccaagctccaggaggagctccgctccatcgagcgccaggtttatgatatggagaccacctacctacaggagactaatcaatttggaagtgtgctgaagggtttcgaatcttttttgtcatcctcaaaaaacacctctaagttgatgaacatttggctggacgagatgatggaagagagtatggagcaggtcgttctaagggtggaagcacccctgcgaacgggcaaggcaaaccgaagaagggagggcgccctggcgggcgagacggcaagagactacggccgtcgaatgacccagacctggacgacgaagatgactactaactcctccatcatgtaggcctactgtagcgggttaacttcaatttagcgtctagcagcacatgattctttacgaattgcttcccttctcgtttgttttgcttggttgcatcttcgcttccttccccaactcttccgatttgtaatataacataggtcaatgaaaattagccagattgttaaaattttgtgcaaactttgttctcagacggtagctttttctggatttccgagttaatatatcttcgttacatccttgaatcctagt

SEQ ID NO: 27468 - DNA, 2728 bp, Zea Mays
ccatccgccccaccatcatcgcactatccatcgccgccccgccatcatcagcccgcgcccgtgcgcatgccctgcccccgacatcctcccctcgcgcccttctatcggcgaccgctcccactcgctgtgcatcgtgccctcgcccccgtcaaccaccccgtgcgtcgatgcctgcccctgcccctgccccgcccccatccctgcgatgcccgcggccacagcgcccctcccctcgacgcgctctgcgcgccatgcctgctaaccaagaccacagcgcctggagcaatggggaggatgtcggccttgcatggcaccagagagggcggcccctgcgcgaacgcggcccccggcctcagccccgatggcggcacgctgccccaccggccccccgacgcgagcgggcgcgccgcggcccccacccgacggcgcgagcgaggcacgcggccctcccggcggggtggacgcggtccctggctgtgaggcgacgatggggctgggggctgcgatggcactgggcgacccaccggcggactacgcatccatcgcggcggtggggctgtttgtggcactcatgtgtgtcggcatcatcgtcgggcacctgctcgaggagaaccgctggatgaacgagtccatcaccacgctcttcatcgtgttaagccaagatgagacaccattcttgtacagcctcgtgtttggtgaaggtgttgtcaatgacacaacttctgttgtgttgttcaatgcaatccagaactttgatcctggaaatatcagcggtgccaaattactgaacttcattagcagtttcctttatttgttcggctccagcaccattcttggagtagcttctggacttcttagtgcttataccattaagaagttgtactttggcagcccggtaaagtctatcgctttgagcaacaccattttagccttggtgctggtttcaagagctgcttttgttttcccactatcctttctatcaaatttgaccaaaaaaactccaaatggaaagatatcttttaggcagcaggttattgtttggtgggcgggtctcatgagaggtgttgtgtctattgcgttggcttacaataaggcgtttgacttaatgtttccaaggttctgtggaagtgcgaggcattttgggaggtgtgcgaggcattttgggagggacatcatcatgcccaacttgaagtcgtccgtgaccacaacagcgagcgcggtggagtacatggatgaagtattgaaggcgttgccgctaggtgaggccaggaatgaggattcacgaacactgcaattcaattatggttcattcaaacataagggatttttgaagcactaactgcattccccttctccccttctcccttcctgctgtcgttgctgtttgtgaatgtggtttggattatgacagacttcagttctgtccgacagatatgcaaaaaaagtactttgagaaacaatttgagttggctgaagcagtaaagctgcccattttcttcacatgtgtgctgctggtgaagacttctatgaaatcatgacacaaaatttgcacagattccctggtggggttacacattccttcactgactcaacagaagatcaggataggctactttcttttgagaagatgtttatcggtgttaatggttcctctctgaaaactaacggaaatcttgaggttgtacgaggcattcctgtcgagaggttgatgatggaaacagattctccatattgtgacataataaatactcatgctggaagccagtatgtaaaatctgtctggccatccaagaagaaagaaaagtatgagccagattcaacagtaaaaggtcgcaatgaaccttgtttagtcagggatttttgaagcactgactgcattcccctttctcccttcctgctgtgcgaagccgtgccccaaaccctctaccatcttatttcagtccccactctctaccatcctccagggaaaaaacactagcaatcttacatgaattccaagttttgcatgtcgttgctgttggtgaatgtggtttggattatgacagacttcagttctgtccggcagatatgcaaaagaagtactttgagaaacaatttgagttggctgaagcagtaaaactgcccatgtttcttcacatgtgtgctgttggtgaagacttatgtgaaatcatgacacggaatttgcacagattccctggtgggttacccatttctttcactgactccgcagacgatcgggttaggctactttcttttgagaagaggcaagttcttgaggtagtggcgggaagcaaagaaatttctgacatagaaggcctgagtagaactctgtaccacaacacatgcaggctcttctttcctcaggatcttgacgcgtctactaatgcgcagcttgagagtggtactgccgtccaggattgctgatgtcagagtgattttttttaaaaaatgtttccttttggttggcgtttggtttcgtacaacttccaatatgcctatgaaatgtttttggtcttataattttccctcgctgccaattttgccatgtttcatgagcctgatgacatgtcaggcaagtcctgactatgtacaagtaccctactgagactatgccctaaaatcatttagggctgagcatgtacaagtacagtttgatggctatgttgttcactacaatcaaacaacaactaagctctatatctatattttatacaaatttttaaattcc

SEQ ID NO: 27469 - DNA, 3819 bp, Zea Mays
atgggtggcctggttgaagtcaggtgccggtgcagggacctggtgatgaggcaagtgacgccatggcctcctgaagtgtccggctcttcaagcaaacagaaacaatggcaggatcaatcgaacaaagatggagtcattttggttgatgaaagccctcagaaaaagcaacgtaaaggtagaaagcaagatgcaatactgaaggagcctaatgctagcagaaagcgttgcaagacatcggaagctcctgatggtcctggaagctgtcagcaattgcatatcagccagattgaagccagctcgcctgcagcagcgccagtaataattgacgttgatttgatgagtacgccttctaaagcaggacatgctaattcaatcgatcaggatatatcaccgttgaaagttgacctaaggtcagaggcgaagatagctgcagaggaaattcgaaggttatcatctggaaagaaaattcaccctttctttcattctcggaaattgaacaaatgtgctagccaagatcaagatgtcatcaatattgaaaacatgcatgggctttgtgattctgaaagggatccaccattttatcctattcatgttgtgtaccaatcagaggccagcatgccaatccactggagtaattggataatcactgatatgtcatcatttgacactgatactgccgttcctcttaaaaaatctgtgtcatactttgagggcttggttaagccactgacaatagaaactaattgcaagaggcattctaatcaattgtcagatccgattcttgctgagtgtacaacttcaggaatgccttttccaagtttttctggcaagcaaagtgaacacagctgtttttcagatgcgatcaacgtggacacacagaacttgttgaggcctggtgctagttgccaagcttctcttcttgatctgaatgtagagccagaagatccacagaatggttgtcagcctgcctgttacctatggactgacaagtaccgacctgaaactgtggcccaggtatgtggaaatagtgagcacgtaaagtttcttgctgaatggcttaaaagctgggatgaaaaaggccacaagattggagttgctaacggggacactaatgataactcatatcaagatatatctgattcagattattcagagagtgcttctgattgtgaaaatacacttctaatcactggacctgttgggtgtggaaaatcagctgcagtttttgcatgcgccagagaacaaggcttcaatgtgatagaggtaaatacatctgacatgagaaatggagcttatgtaaggcagaagtttgaggaagcaactaaatcacatggccttgaaaaatggtcacaggaggaggttatcaatccactaagggatgattccttggatccagattcaggaactcctgataggactgaataccaatgtttgatgtcctgtgctacaagagtaatgattgactgtgatcaacagaaatcacctgtaggatactactcaggtttgaaggcctgtgatgaacctcctaaacaagttgctaacaagacactcatactatttgaggatgtggatactgtctttgatgaggatcgtgggtttatttcaactattcttaagatggcagagactacaaaatggccaatcatactaactagcaacaagaaggatccgtctttgccgaatctcttggatcaacttgttttggatttcaaatacccatcgacctcagagctactttcacacgttgccatgatttgtaaatctgagggagtgaatgtcactgttcctcagttaaaacatgtaattgatgtttgtctaggtgacattaggagggtggtgatgtttttgcagttttggtaccaagggcatcaattcacagagaggccaaaggaatgtttgtgtggtcctttctcacttgatttagatgcagtacattctacagtgccaaaaatgttgccatgggagttcccttgtaagttatctgaaacattatgcatggaggtagacaaaactatccttttggctgaagaaaagaaaaaacagatggaaatatcagatcttgaaggcctgcagttacatgtaacagcacctttgatcaagggaagaacttctaaaacaagaagggctaagaaatccaaattaaagcgtgctcactcgactgagcataatgatatttcaccttctgatgtaggtactgaaaaacataacatatttactgttactgaagttggtttcttcccacaaccttcagaggtgcctcctatgcatgggcaagggatttctgatcagttccattttcccgttgaatcacgagagacatgtgaaattgctgattctttccaaaatccacctgaaagcaacatgtatgggtccatttcacaagtttgtgatacatttatgtcacaggacgtgtcatgtgtacccgagtcatccttaattttggacggcacatctgcatccataagtggtgatgaatttttgtcaagggcagtgtccaatggtttttctgccttttgtgagggtacatacactacctccagaatggtattagaagacagtgactgtgtgaagaatctaatggctgaacgacaaaaagatgttgaagatgtagttggtgagacaagtgagacttatatggaatcatttcggagaaatgaacaggcaagctgttcagctgctgggtttcaattaatggatgaatgtagtcgtgctgaaagcatctggctgctctctggcaaaaaatctaatgactcttgcaaggtggaactagtacaggacacttggaacaggctacggagttgtcgtcttgaatttaccagtgaggctaatcacaacagagcaacttctggagctttgaagcttgtctcagaagtgtctgatttaatatcagaatcagatcttatgcttttccgttgctaccctcttactaaggatacgttggatccgtctttaactccttgtgatgagccagttgattcttcttggtacagcaatcaggttgagatgggatctgtatatgcccagcatgctcttcgtattttatcgaggaattcccaaaaaatagatggtggttctgtcgatttgtcacaagagttgtttgccagtacagctgctgtatcctttggtaaaattacctgttcaggattcaggaatgattatggatctacggacctttctcatatgaaaaatccaactacctgtatttttaaaagaagggagcggcatgttcatctttgtgaaaccctgtctccagtggttcctccaaagttgttgcagtcattgagaggccctgcttttgttgattatttgtcttcaatcagccagatttccaaattagaaaacttgcgactctctgaaaataaagtcataaacaagcgaagaaggtcccgtcaggcaagacattacttgagttctggcgcacttcaactttcacatgaggatgttgtattattagaagaaagcggctgtttcagtagcagacgcgagagggttgaggttgtagagcaagcaccagtcagtacataagttaatgaactggtgctgatcatgagcggcagcattttgattttttttattagaaggcaatgtgactgggttggccgagccatttttatagttgcgtccgtgatcacggagcccggcggtggaggaaccggaatgtgtgcagttgattgctgtatctgttagataactagacattttaaagtttatttaaattttaaaattatttatagcaatcatgaatatggattaatcttagtatgtttacatgttcatgtttatcatctttataatcataaatagtataaaaataagaag

SEQ ID NO: 27470 - DNA, 2307 bp, Zea Mays
gcccgctcctattatatcctcctcatcgtcgagcacccctcaacccacgcaccaactctcgccattgccagtcaagctcgctataagcagccagatattcaggaccaccgatcacgatcccaaaaacagcggctctgtgtcgcgacgtcgacggcgatggacgctccggccatgttcgcgcgcaagcaagtccccgatgacttcggcctccggaacatcggcgaagctgaggacgaaggagccggggcccaggcccaggcccagctgcaccgcgacgagaagcagcacaagccggccgtgctgaagaaggtgaaggagaaggtgaagaagatcaagaacaccctcgccggccacggccacggccacgacggtgagcacggcggcggcgagcgcatgggagacgcggacgccggcagcgacagcagcgaggaggcggaggaggacgcggcggagagggaggccgcgctggagaagggcggctacatggaagatgtcgaggacaagcccctcgtcatggagccggagcccaaccccgagctgcacggcgcgccgatgtacgagtcggcgagggcacccgccgtgcaggacctcatcgccgagtacgatcagccggcgtggacaccggcggtgcaggaggtggagggcgacggctccgcacctagggtgcggctcggtgatatcggcggccccgtcgtcgaggatccagccgcgccgcgctccacgacgcccaccgcgcgagagggtgaggacataggtacgacgcccgtggtgcggcagtttgagaccatgagcttatccgacgacccgacgcacgtgggcgcgggcaagaaaggcgccaaagcagaggagtggaaagacaaggccgcggacacggtgcgcggtgcggacggtggcggtggcggtggcgctagctacacggacactctcaagaacgcggctgccggcaccacggagtacggcaagaagctagcgagcacggtgtatgagaaggttgccggcgtcaccacggctgtgggcgtggggaagcgcggcgacgaacgcacggaggcaacgccggcgtcgaacacccgcacggaggagcgcggagcggcccccgaggccacggatgcgacgagaggcgcagggtacaccgacaagatcaagtcggcggccgcgggcaccactgggtacggcaggcagctggcgtccaccgtctacgagaaggtcgccggtgtcggcactgccgtcgcgcccaacctccgtccgcaggagggctcggccaaggcggaaggcgcacacagcgaggcgacgccggtatcggacaccggcgttgaggagtggaaaggcgccccggctgccacggacgcggccaacggcgcgtcggggccggcgggctatactcacaaggtcaagtccgcggctgcgggcaccacggagtacggcaagcagctggcgagcacagtgtacgagaaggtcgccggcgtcggcaccgccgtggcgggcaaggtgcagcaggccacacagtcgcccagcacggcgacgccgggagccgacgcgcagcaggacacggacgccgccgcgacggccacccccggcgccggcgggcagtccaaaggaacgaccgtcacggggtacatcgccgagaagctccgtccgggcgacgaggaccgcgcgctcagcgaggcgatctccggcgccgtgcagcgccgcaaggaggacgtcgggggcacggtagcgcagcgcgtgccggcgccaggccaggtggtgaccaaagcgcgcgaggccgtcgcgtcgctcaccggcgggaagcgggtctcggagaccgtgcaacccaccacagcaacagggaaagatgtgaaggaagtctatgcggcggaggcgcctgtgatccatggggaggagatcggcggcccgaagctgaacaccaataccatgtgagctgctcatggagagcgcgggtgatctctgagtattgtgtcaggtttgtgtacacagtacacgtgaatggtgtggtttgcgctgtggagtagagtaggagctggaataataagcgtgctggttgcgttcgccgtggtgcgctttggttttacgtgtgcgtgtgattgtggatctacgagtagttgtacgtatacatatatgtatatgtgtatctaactatgtatacgtatacgttgaaggaaaattgttctgttttttttacgaacgtgaaccatgcacctctttcattaagaatttagtgtgtgtataaatcttcgcctattactaagcaactaggaatcaaacaccctataaggcttactcgctatttcatctatcgtaccgtttcta

SEQ ID NO: 27471 - DNA, 1284 bp, Zea Mays
tgtggagacagcgatattatccaaggtttttactgttgcgttgcgtgatgaggacgaggttccgtttttgatgagctgaagcctcgtgacgtcagggttgccccaagcatgtccgtcttcaagcatgccgatcctacaagcccccctccagttacctatttgcacttctacggttcctccgagttttcgtttggtatcttctgtttaccgaaatcggcaattattcccctccacaaccatcctgggatgacagtgtttagcaagatactgtttggttccatgcacctcaagtcctatgattgggctaaaagtctgccggcgggtagcaacgataatgcacttgagaactctgatggagcaggagctcgtctggccaaggtgaacacagatgccgtttttgacgcttcatctgagaccgtagttctgtaccctgaaaatggagggaacttgcactgctttacggcgctgaccccttgtgccgtgctggatgtgatgggccctccctacaaccgtgctcaaggaagggattgcgcgtattacagcgaatcgccctactcgtgtgctggagatgcacaatattcttggctcaaagaggttcacagcacatttgagatggaaggcataaagatggagcccaacttcatcgtctaataattaagcaggcatggcatggcatgtcatcgtaatgctgctagtttcatgtagataatctctagctgcgggggtgtagtacaactggaagacggccagatgctcttttgacattcgtttgccttaatttcatatgcctccctttatgtatgttaacaattcgaatcttgggtcatggtcactttttttctgttttccctgtagacagcaggtgctactttttgaagtgatcatggaccaaattctgtgggtcgtttggttggtttttgttgagcagcagaacagtcttcaactttctgcctgccatcgtgtttcagtttcagggcccatgccttgtgttttctctttgaatgaacaaagaactgtctctagcatagttataaatggatatggtccaggcttccaaatcaggagctgtgaggtgatggggacggacgtagttgtgtagtacgggggtcaggtcaggtccggccggacgatgttcttcgttgcagcgtactctctgttggctgcaccgcattagcgcaatgattcggtctgatttgtcatactttttaacctacaaatgttatgcattagcaatggttttagataaaaaaatattaacaaataaaaaaaattagagaaatctcc

SEQ ID NO: 27472 - DNA, 1958 bp, Zea Mays
tttaacttttttttgtttataaacggccacaactgttggttgtttcgtgtctaccgatgtaacttttaacattgtttcaagacactatgatcacctgcgccaacagagttaatacatcagcacgcctagcgagtaccgacagtaacgcgaagggattcgaatttctcacagcaccacacgatttcgttacacctctgctcgaacaagtcagcagatcacacataattaccgaaagtgtcagcagcgaaagctcttactccgactagtgaccctccgactttgctggcatgctgcggacgttcttgagcagatcctgaatcttggatagcatcatcgtcggcgtggagtcccctcccgcaccgctgctgctgcccacgccgaccgttggcctctggttctcctgcagcttgatcttctcgaagaggaactgcttctctgcctccgcctcctccaggcgccgctttaggtacatgctggcatagtcctgctcggctgtcttggacttggtgagcgcaatgctctgcagacgctccgcctcctgccgggcctcgttcgccttcagctggaacatctccgcttccgcctgcttcaaccgcacgatgctctccagctcctccacctgctgcttcttgcgctgacgctctgccttcagctcctgggcttccctaaccttctcctccagctctcggtcgcaggcctccacggcgaggcgagccttcttgtaaagtcgcatcttttcttcagccacgagctccatctttctcacggcctcttggactacctctgctatgcggttgcaggcttcctggggtgtgatcagatgcccaacatcttcattttcagagatcttgggggagtccatctcaagctctgtgtgaagatatgtccatagtacatcaacccatcaatatactcagaagtcagaaagctaccacagaaaaggaaacataagtagtatttacgactgcttaaaacaagggtcagataacatgtcatgttaacacatacgaaatcctaaagaacttatccaaagcacccatagaactcagccaaacaaattcaacatgtgtactaaggtctaagggagtgcccagaccaaaaatttatatactgattatgtttatgttggggatatctagttgattgttattgagcaatattttgacatcatgaccaaagctatgaagagttgaggaacagacagcagcaaaattttgatccaatagaaaatacttctagtaacaattaacaacaagaatgttcaatgtaaaattgatcttagccatttattaaattataaaaacaaaacatttaaatatatgagttaggtagatgcctacctctaaaacgaaggttgaatgcagtagaattttaggtgtggcaacaaaaaaaattcttgctggcattcaataacaagataaatggcacaagttcattcttatcatacacgagcatagccataccgctaagaaatagtagctttacaacacaacataaagggcgaatcctgatagaaacaaataagaagtgattgatttgtttgcctgtttttagaccagttcaataccttttaatgttaacacaaagtgaaaataaattggcactgttcaaccgcctgggttaaagggaaggctggatgggccaggatgaactgctgaatgctacgacataaggctcaacaacgactggatgaggcagcagagaccatatcacaggggacaggggtactgataaatgcagggagacatcaatgacaggcactaaggattacgagcaggagcaatgctggagagcaaatgaatggatgggactggaaagagcagcgtcaggaaaacacaaaaccaatccagaagttcttttttttaaaaaaaaggcaggctcttcgcgaacagactgtctctacacgactctttatatatattgtatcttaattgtatttatgatctaaaagcttaggg

SEQ ID NO: 27473 - DNA, 416 bp, Zea Mays
cattccgtttcaaccgctcatcccacgccggagaaacggaatcgaatcgacccggcgagccagacgggcaccaaggaggagatgacttccccgaagcgggcagcagggcgggaagggtgcggatgcttggccgccgtcgcgcggggcctccgcggggcgtgcttccggccggcggtgacggcggacggtgacggcggcggctcggccaagggcagccacgttcacgacgcagcagagacaagatatctgaatgctagcaatcgggagcttggtgatcattttcagacaaaacgcgatggtgaaaatggtgttgatgcatcaattgaaaagagaacacccaagctacttcagtttacctttcaagagttgaaatctgccacgcttaacttcaggccagacagtattcttggggaggg

SEQ ID NO: 27474 - DNA, 244 bp, Zea Mays
aattaaaggcaggccggcacaaaagctaccctggcggtggcgaggatgacgaagtggtcactgttatcgatcctcctctacgtcacctccggcaccaagatgacgccacaatcctcgatatagtagtcgtcgaacgcgcgcgacatgacgagtaccaataactcttggttgggctgccaaacgaagtgcaccccgggctcatcagcgaggtagtaccgatggtcgttgcaccaccagatgcgct

SEQ ID NO: 27475 - DNA, 3837 bp, Zea Mays
ggccccaccccacctggccgcgtcgcacactcgcaccccgtcgtcttccccaccacacctcctccgcagtccgccccctgcctcctccgaccaccgcattgcgttcgaaatattgaaaacaccacaattccccgtattccgaaactcgggggagggtccccaaattttcagccccgcgtcggcgcgttgcctccgcctccgccttccacccgcagccccgcatatctccaaatccccaaccccctgctcgcggccccgaactcccccactgagcttgcttaaaatcccgacgcggcgctcgcggaggaggcggaaccctaaggcctggatccctccccgtccccgcgcccgaattgcacgcccgattccaggttctagtgtttcccatgccctagccaccagcgcccgtggtgccggtgccatgcccgcgtcccgcatccctttcaagcgctgcaccgccgccgtcccgggcgtggggaagcccggccccgctgccagcatgccgcccgccaagcgccgccgcgaccgcgtcgtcccgtcgcggtccagggactcgatgccgccgcccgcgccgcacgtggaggaaggtgacaacaggcacggggaggtgtacaacgtagagttgctcatggccgagcccaaagtcgactcatttggtcccgtggagaccgcgttgtggacgcaagcgcggacggcgcccacggatgccgacctgtaccgagcgtgtcgtaacataaacaagaggggcagctgtgggggagctgccagcggtagtgtgctcacgtctgtgagcaatgccgcctcggacgcttgtgctggtggcaatggcaccattgtccgagtgagcaatgctgccttggaaggtggtgctggtagcaatggtggtctggaggggagacctgcggtggtggagtgcaagcccaagagggagggcagcgacaagaaagaggatttctactggccggaggattttgtgcttggggatgtcgtgtgggcgaggtccggcaagaaatccccaatgtggcctgcactggtgattgaccccctgcagcatgcgccggaagtcgtgctcaactcctgtgttcctggcgctctctgcgtcatgttcttcggttattccgctaatgggcatggcagggactatggatgggttaagcaaggaatgatctttccctttgtggactacctagacaggtttcaaggacagcctctgtataagctcagaccaaccaaattccgtgcagcaatcgaggaggctttcctagctgaacgtggtttttttgatctcgacatggatggggcatgctcaccgcgaaagtttgtagataagcagtctgatcctaatggctttcaggaagaggccgcttcaaataacgagcaggagtgccaatctgagtctcaggttgttggcaaatcggcactgtgttgtgatagctgtggtaatcgcctaccatccaaggtttcaaagaaaaggaagcaagggggtgagcaggtgctttgtaggcactgtgaaaagttattgcagtcgaaacaatactgtggcatatgcaagaaaatttggcaccacacagatggtgggaactgggtttgttgtgatgagtgccagatttgggttcacgtagaatgtgacctgacatgcaacaacatggaggatttggaaaatgcagattatttttgtccggattgcaaatcaaaatgcaaaacagttccagcaactgaaaaaatgaatacttcccacagttcagaatgtgctagcacttcaaagggaaaatcaaccccaatgatagctgttttctgcaacggcgaggaggcattgtatgtacctgagaagcacatgatactatgtcaatgtaaggcttgcaaggaaaggatgatgagtctgaatgagtgggagaagcatactggctcaaggaaaaagaattggaagatgagtattagacagaagagcacaggggagccactcattaatttgctggatgatattccttgtgggacatcgaagtcttctaagccaggcattaagaaaggagagctgctacaattgcaagctaatgcttacagtcctgtctgtgctaaatggacaacggaacgctgtgctgtttgtcgatgggttgaggattgggactacaacaaaattataatttgcaacaggtgccaaatagctgttcaccaagagtgctatggagcacgagctgtacaagatcttacaatatggctttgtcgagcatgtgaattctcccaacagaaaagagaatgctgcctatgtcctgtcaaagggggtgctctcaagccaacagatgttgatggactgtgggttcatgttacatgtgcctggtttcagcctaaagtctcttttccggttgaggagaccatggagccagctatgggaataatgagcatccctgcagagtactttaagaagacttgcgtcatatgcaagcaaatgcatggtgcctgcacacaatgctacaagtgctctacgtattatcatgcaatgtgtgcatcaagagctggatatcgcatggagttgcaacactatgaacgaagtggcaggcacattacaaaaatggtttcctactgtgattttcacagtactcctgacccagacaatgtgttgatagtgaagacacctgaaggtgttttctctacgaaattttttgtccaaaatggtgagaaacagacagctgcaagactcgccaggaaggaaaattaccaggagaaagtgcttcctcctatagtttctgactgtctagtcgcaaagtgcctgacctatgaaatgttgaaatacaagaaagaaccaggagaggctattgcccaccggattatgggacctcgacaccactcccaggattttattgatggccttaacgcatacatgggtcataaggacgaccaatccttttcaacgtttaaagagcgacttgggtatttacagaaaactgaaaatttgagggtctcttgtggtcgatctggaattcatggatgggggctctttgctgcaaggaatattcaggaggggcaaatggttattgagtatcgtggtgaacaagttagacagcgtgttgctgatttgagggaagcacggtaccatagagaaaaaaaggattgctatttgttcaagataagtgaagatgttgtcatcgatgctaccggcaaaggaaacatagcgcgcctgattaatcactcgtgtatgccaagctgctatgctaggatcgtgaccgtcagtggtgacaggagccagatcattcttattgcgaagagagacgtctctgccggagaagagctgacgtataactacctgtttgaccctgacgagtccgaagactgcaaggttccatgcctgtgcaaagctcctaactgccgtggatacatgaactagggtgctgctagaagagtaaaaaccaatctaacaaacaaggactgaggctaactccttacagaagccaaaagccggccatttttttttcctggaattctttcggtagtttctcgttttcttatattactcaccagaagcttacaattcgtgggctgcacaaggtttggaccattttgttcagaaattgcgatttagggcagccgtaggcagtcatccatttgtatattcttccattgctgtgataagatggtaagaatgctcaaatttttttttggttaaatgaaaataagaaaaactcagtttgattctatctatttccaatggcatttcattgatcaaattaatgacttcatctcctatccaaggccatgcagctctatagaaagctatatatattgagtccaccaggacccggagctgcatccctttttcattttttagtgtattgaagatttcct

SEQ ID NO: 27476 - DNA, 5831 bp, Zea Mays
aggcccgtaccgaaaatcctcccacacgctgacgctggtgcccgttgctctgtcctctgttcgaaaaatttcctcttgttgagacctggggcatctctctctctcgccccccccccccccccccccccctgctcgcggcgcagcggagccgacgcgatgccgccgaggaggaaacggcgagcaccaccggccaagtcgcagaggcagacggagccggatccgcaaccgcaagtgccccctggcgccgacgcgccgctggaagagcggctgatatggggcagccaacaagaaagcgagcgccggattactgccatcaaagccataaaagacgcggaggctgggaacatacattaccagttgcaattggcacggtcctattattccgaggagcaattggagggaaacgccatgcagtattttcaggagaacttgcacaatctgtcggttgttccgaacgaggaatatgatgtgcttgagctgaaatggaataacggcggcgaatggatgattggagactttgcagatgacaggactctacgggcttcgattgcatcattcacagctgctgatggacttcagttcccaagggattcagacttctatacgcgcactagcaatttcagtgactttgcttggagtgagcagcctgaaggccaaatggcaggagcatcagaagcttttcagacacctggggctgtgagtaaccggctatcctgtggcatgacacccaaaactgtgaggctacccaagaatggtgagatgctcctatctgtgcatggttcacctcttggggtctataaagaagaaaatttagcagccattgaagaatctggtaacggaagtgaagatgctccctgataactcactgatatcacctcgtgttcgaggttcgagcccaagtgcccaacacaccgggccacacatgacttgactggctggctcaattcgatcgcctacgcggctacgccccacgcaacgccacgacgtaccccgcgaccgcaaagcgagcagcgaagcgagccccaggcgccggcgagccgggagtgcgtcgccggcggcggaggtggaggcagtaatggggaataagatcgcgcggacgacgcaggcgtcggccacggagtactacctccacgacctgccgtccacctacaacctcgtgctcctcgacgtcgtcagccgcggccgcttcctcaagtccgtccgctgcaagcacgacgaggggctgctcctcgtcaaggtctacttcaagcgcaccggcgagcccatcgacctcaaggagcacgagcggaggctggagcggattaggaaggcgttcaaggggattgatgggtcccatgtatggcccttccaggtttggctgcaaacagataaggcagcatatctcctgagacagtacttcttcaacaacttgcacgatcgactgagtacacgccctttcctcagtcagattgcaaagaaatggcttgcctttcagttaattcatgcagtggagcagagccatagtaagggaatttgccatggtgacataaaatgtgagaatgtgcttgttacttcttggaattggttatatcttgcggactttgcatcattcaagccaacgtatatcccggatgacgacccatctgatttctcattctacttcgacaccggaggaagacgaagatgctatctagcacctgaaagattctacgaacacggtggtgagtcccaagttgcagcagatgcacctctgcaaccatctatggatatattttctcttgggtgcgttcttgctgaacttttccttgaaggtcagccactttttgagctttcccaacttctggcttatcggcgtggtcaatatgaccccatacataccctagaaaagatacaagatactggtatccgtgacatgatacttcacatgacccagttggagcccaaaaaaaggttaccatgtcgaagctatctgcagaaatatgaaattgttgtgttcccattttatttctcaaaatttttgcacaagttcttctcagatattgttccacttgactccgatgccagggttgaaaagactcaagaaaattttgaaaagatacatgaaataatgatgggcagctcaacaattgaacaaattgagaggtccacatcgtgtgagcatagtgaaccatctgggagaaaaggcatgggaggagaaactttatattcaccaggagattatagaaacagcacatccataggtaagaaaaatacttctgtagaccatcaacatattgtcggaggtatcaatttcctcctcaaagaagtggagagcaggagcaacaacacaagcacaaaagtcacaaaagacactgagcattttgttgcaccgagcatttcatgtgcaagtggtgttcagtccttgcagctagttaatccagcaggaagacaaattggaagtggtttgatgagccagaacaatgctgtatctcatgtgaagaagatctcaaagactaacttatgctccttagtggctgcttatgatgatcaatcagatacctatagttttgacatttttcagcagatagacaccaaggtgagctgtgaaggaatggttttgcttgtctcgttactctgctcatgcatacgcagtgtgaaaaaacctgagctaagaagggccagcctaattcttctgaagttctcctccacatacatagatgatgataggcgcttacagctagtgctcccctatgtgattgcgatgctttcagatccatctgccattgtccgttgtgctgctttggaaaccttatgtgatgttctttgtcttgtgcaagatttccctatcagtgatactgttatattccctgagtatgtcctcccaatgctctctttgctccctgatgatacggaagagagtgttagggtttgttatgctagtaacattcacaagctggctttaacagcttacaggttcctacttcgttctcgtagcatcgcgaatattcgacctctggatgaatcactggtagctcacagatcccagtctgcagattcaccagcgaagaggcaagatattttttttcgccaacttgcagaactgaggaaatctatttatgagatagtgcaagatttagtgatgggacaaaagcagacacctaatacccgtagagctcttctgcaggatataggttatttgtgttacttctttgggcacaaacaaagtaacgattttcttctgcctatactcccagcatttctaaatgatcatgatgagcagctccgtgcagttttctttgcccagattgtctatgtttgctattttattggagcaaggagtgttgaggaatatcttctgccatatcttgaacaggcgctaagtgatggtatggaggctatccttgtaaatgcacttgattgcttgaccatgatgtgcaaaagtggttatttgaggaaaagagtaattgttggtctattggtaaaggttctccccctgctccggtatacaatcaattgggttaaacagtctgctgtaagatttgttgctgcctgcagcgagagcttaggatctgtagatacttatgtgtatctttctcctcagctacggcagttcctacacagggagccaccttcattggactctgaaactgctcttctttcatgtcttaagcctccactaccaaaatcaatgttctacgtacctttagaagatgctcaggacattggaaacattttactgaagagcagtggcaagaaagaacagatattacatggtggaagatactctggcatggcacaaagtggatctttgggcaaccttgaagatattcgtcgactgaaaggcactaatatttccagcagcgtgtccttggatgtcaaagactccttttcttttggcaaatcactatattctggttttgctctacatgcatctgctgcaaatagctccttttatgatggcttatctaaaggaataccatcatattctttttgtattgataaccggggtttaggagaaacacacatggtccctgattcatcagtgtataaagcttcgataaggctaccttggttggaaccgaatcgtcctggcatgcagactagagatgatcatttcagtagcaagcggcgagatttaagcatcaatgactctttgaagagcaattcttctttgcaaggggatagcatttcaaactctgatactggaggattgccgttctccagatcagcagtgaacctggagactggatggaagcctcgaggaattctagtggcacatctccaggaacatcgcttttctgtcaatgacattgccgtgtcgaatgacaataccttttttgtgactgcttctgacgactcgagtgtcaaaatctgggatacaagaaagttggaaaaagacattgctttcagatctaggttaacatatagcgtgggtaatagccgagctttatgtacggcaatggttcatggtacttcacaggttattgtcggtggtagcaatggaacattacacttgttttctgtggattgtgcacgaagcgttgggagtgtcgtggaaaggtatgctggaattgttggtgtaaaaaggaatgatatcaaagaaggcgcaattctcagcgttgtaaattgttcacccgacagctttagcccaactgttcttttcagcactgaacattgtggtatccataaatgggatacaagaaccaactcagaattttggtattttaaatcctctccagaggagggctatatatcagcacttgttgtgggccagtgtgggaattggttcatctcaggttcttcaagaggtgtccttacattgtgggataataggtttttactacctgttaactcgtggaactattcaatagtaagcccaatagagaaattgtgcttgcttatacctccaccaagttcaatatcttctgctggaaggccactagttttcgttgctgccggatgcaatgaagtctctctgtggaatgctgagaatggaagctgccaccagatgtttagaacagcgagcactgataatgaagctgtgatgtcaaaggcaccatcaaggcctgttaacaagccaatcattaaagatataataagagcacgtaattataagtacagaatcgatgagttgaatgacccacctgtgcgtcgtccaggcattcgttctttgctacccttaccaggtggtgatctgttaactggaggaacagatttgaagattcgttactgggatcaagccaggcctgagcaaagcttctgtattgctggtccctcggcgaaaaaagtccgttcagctaaagctgacattttagagaaagcagctggaaacgatgagtgttacgatataagatccagttttggagtacaagtcgtgcaggaaatgtacaaacagaataccacggtatccggtttgacgcccaagactcagttcgcggaggcagctgcagattctgccgggtgccatcgtgacgcaatactcgcgctggcatccttcaacttgtctagccagagattgatatcagccagcagagacggtgctgtcaaagtgtggaaatagctgctccagcatgggtaagatgacaagtcctttggcgtgtacatatttgcctggttagtgcttacacagtacacatatgccactagttattgttgtacagaagattgatccacacaagagtcgaaattgacacgtaagctttcatcctgtgtgacctgacctgtgtatataaataccaatggcttacctaccttacagtagtatattcatggattagtaaaagatatcataatgaataggaggtaggaaggctgtctaactacaataacatagggctccaaccataatcctccacacaaaaatgatctttttt

SEQ ID NO: 27477 - DNA, 1623 bp, Zea Mays
aacgaaacgggaacgaatcgccgtgcctcccctatcgctggtatccgttgtccagcactccagcccccgtccgtttcccacgaattccgcgtcccacccggccacactttctctacgagcgccccccatctcacccacccaaaattaaaatcctcccggaaatcagagacgcgaatccctcgccccaggccccgaaacctccgagttctctcgccaattcgatccgcctcaccgccgccgcccgtccgccggtcggccttgactgctccgttgcacgtggcggttcgcagcgcggaatctaccttgtgttgagagatccggggaaacccttgttcccggtcgttccggctcgaatcttctgcggactggcaatgtaagcgttctccatcggagggcgacgatctacggggcggttgttggcggggtcgcgggaatggagcacgtgttcggagggaagtttaagcttgggaagaagatcgggagcggatctttcggcgagctctatctcggcgtcaacatacagagcggcgaggaggtggctatcaagttggaatctgtaaaatcaaggcatcctcagcttcattatgagtcgaaactatacatgcttctccaagggggaatttgtttgttttccaaacttcagctggaattcctcatttgaaatggtttggggtggatggggagtacaatgtcatggtcattgatcttcttggtccaagtctggaagacgtattcaaccagtgcaacagaaagttttcccttaaaacagtacttatgctagctgatcagatgataactagggtagagtacatgcacacgagggggttccttcatcgtgatatcaagccagacaatttccttgtgggcttaggtcgtaaagcaaatcaggtttatatcattgactatggccttgcgaagaagtatcgggacctccaaactcataaacacattccatacagggagaacaaaaacctcacaggaactgcacgatatgctagtgtaaacacccatcttggagtagaacaaagcagaagagatgacttagagtctcttggttatgtgctgatgtacttcttaagaggaagccttccttggcaaggcctgaaagctggaacaaaaaaacaaaagtatgacaaaattagtgagaagaaaatgctaacctcaattgaggccctttgtaaatcttatccatcagaattcattacgtacttccattattgtcgctctttgcgttttgaagataagccagactatagctatttgaagaaaaatttccgggatttattcatccgtgaaggttaccagcttgattatgtatttgattggactgtgtcaaggcaagctgtggacaataacagattgcgactgagcgggaagacaggtggcttggtgggaccatctgtggatagggctgaacgagctgcagcaagacaagatgttccagatagattcactggtcaagctggtgcttttgctagaagaaccggctctggttctggtcaatacggagaacacacaaagcacaggactctgttggattcacttatggcatccaagatgtcatattcagggcatggtggttaccaaagaatttatttacaatcccacggtgattgactaaag

SEQ ID NO: 27478 - DNA, 1181 bp, Zea Mays
gccgaactgggcctcaaccggaacttgttttaccccatctcatcccactgactccacccacccgcccgctgcctccgccggatctcgtcggactcggatccgcccgaccaccccgcgccgccgccgcgcagcagcagcaggtacgagaaatatgcccagaagaatgggtggaaatttgatgtcattgacataatggagtctgctgtgaaaggatacaaggaagctagtggaactatatcaggtcctggggcgttcggcaaactaaagtttgagagtggcatccatagagttcagcgagtgccagcgactgagaaatctggacgaatgcacactagtgctgtatcagttgctgttcttccgcaagctgatgaggttgatgtccagctgcgaaatgaggacctgagaattgatacctacagatcaggtggctctggaggtcagtctgtcaatacaaccgatagtgctgttaggataactcatattccaaccggaacagtggttgcaatccaagatgagagatcacagcacatgaacaaggccaaagctctgaaagttctccgagcgcgactgtatgagttggagaggcgtagactacacatggacaggtcaaagcttcgatcagaacagattggaagcggtgacaggtctgagcgaatcagaacatacaacttcccacagggccgtgtcaccgaccatcgcgttggagtcacacaccactccatagcagatgtcatggagggggagagcctggacatgttcgttgatgcgctcctgcttcaagaagagatggacgccattgcttcatttggcgcatagctagattaaaccttgcaacattgattcacgtcatggacaaaatagagatcagcgaaaaacaataccgagcagtccactagtgaattgcctgtgcattgtgtcctgttttggcgtgtgctagttttacataatgctgaatttttaatgtaggcatgtgttataattgttgccgataaacgtgtcgctcatccaattctttccaaactacagttttgctggcaatgttttgttgttcgttctttccaaactacagttgtgctggcatggttttgttattcataaacttggtgcgcctgaattgtctatggacaaacatgtttataagtgatccttatttaagcttcagtaagacgttctggccttct

SEQ ID NO: 27479 - DNA, 351 bp, Zea Mays
ctgcaagggaacactgaagatggtgaccagatgatggatatggagtgaccgtcggtctctgggtgctggatggttgcttagtggcttgggtctcctttatctagtcggtcctgtttagactgcgttctggttttgcgctttgtcgcagtttggtgctgtatttttggctcctttggatgatgtccttctacttgttgtcatgaatttagacaatgcctggtagatgtctttgacctaaatcaggtcggttatgttttcttccctgtatgttggtgcttggttgcttttgcaactggtacgcacgtttgtatttctgttatgcaagtaatagaaatggaggttctctggtca

SEQ ID NO: 27480 - DNA, 5770 bp, Zea Mays
ccggaattcacccctgccttctgttctgctgttcaccccgcgtgcgcgttcttcctctcgtgcgacaactgggcgaccgccgccgtcctacggcaggtggtcacttcttcgtcggttccttcgctggcgacgagcacccaccaagccctggaagaagcaaggattcaccctcaagctcgaaactgaacgcaactcccgaagacccggtgaagccatgtctgcggggagaggcgatccaaacacccctgccaacaggcctctgttcctgagtgctggggtgcccaacttaggctgtcacaatgttgcagctccagctgcagcaggcaacagcggctcgatcgcctcgcaagtcttattctccccatgctccacgtctgtcctgaatactattcaggaggttcctgctccacaatctgctctgttgagtccgataaaccgtgcaactgaacaaggtgatgtgccctgcatccagccatcctggaatatgcctgggggttgcacgcaggtgcctattaatatcatagtgttccatagggaactcactagaaggggttcgaggccgcagttgtcgccgtcggccactgccttacctgatgtttcagagggagcttccattcggcttgctgggagtaatttcttgtcacatggaagaacacctagcatcgttgcaggtgatatgacaacgaattcttcacagctagccactgcagataaatacaattcagagcatcggatgaattgtttacatgatgaagcatccaagactgaaaatggaaaaggaagtacccaacttccacaattagcaacagcaattttccgtgacagctacaatgatttggaatcagtggttcctgcagctacctgggaaacacgagtgcaacattctcaagaatcaaccacctgtcttgcagaaagtaccactgatgacaacattcatatgtaccaatctatgcaaaaaaggctcaagacacaaatcaacaagagtgaacacacaccattgtcagcaccaactgtacccaaggagaaaacactgactcaaattgagacgcagctagcaagtgccgagaaaaccgaaatgttcaggaatgaggaaaccccagcgctgaaaatgaaggctcggaagaaaaaacacagaccaaaggtaatcagagagaataagccagccaaagtgcagaaacctgattcaacaccagatggaaaatctccgaaccaaaaggtcaagagaagttatgtccggaagaaaagaaacctcagctctctggagaattgctctggtcctgttagcgatcaatcaatctctggagcaacaggagttgcagctagaagcagaacatcatcagttcgacgaagtctgcaatttgaatccaaagaacaaggattgcagggcggccattcgtcaatggccaacatacaccatcacaactatgagaaacctggccatgctcaaagttctttctactcagagtcagaagtgcagactgggcgtgtgatgcaagaaggtatggagaattcaccaggagaattagctttcgacatgagtcgcagactgaacaaatttttagatgagtacatacatttgccagatatgctaaaacctacacaagaagtttcggctgcaacttctgcatcatttagtacggaactggcaagggaagaagataatgtgggaagaacttgcaaacctgatggcaaaagtaagtgcagtttgtttgctgatgaaagggtggtaaaccccacaatagaagggaacaaaaaggacttggaattaaactattctgatgctgatggtcttgtttcctcagctaggtctttacctcaaatggatcccacaagaagtcagatgggtaaggtgtcggaagtggaaaaccccacacaccatagcaatggttcgctacctggcacacgggactctgttgtcttgagggctgcagctgagatgttcgcatttttccaagcgggtgcaataaaaaagaagcgatctgcccgactccgcagaaattcccccttttatactatggatcttaagaataatactctacaagcatcaacaagactgccacagccatgcatggatgcgctgcatagaagttcttgcattaagtttttgaccaaaaaacgttcagaaaaggcaagaccgcactgttccagtgtaattcaaccaaatgatgagctgaaggacaggctttcagctggaagcactttttatggcgcaactaatggatgcaaaatatcagaagagagttctccaaacttttcatctcagaccctggacaataaaagaatcaacgttgatactcattgtgaagtagcagaagggagatcaaccaacacatcaacaggaccctatatggattacgttcaaggagttgcatcaaagttgaagcatcttgatttgaatactgaacaggtgcagagaactgagatgcatttatctctgaccacaccagctgttatttcttttgagggaacaagtggtccttcaaatgctcttgtcccatatggtggtgtggtgatggttcccaatgagaggcccttgcagttagtcaaaaagcagcggcctcgtgctaaggttgacttggattttgagacgacgagggtttggaaccttttgatggggaaatcagccgagtcttatgggactgatgttgaaaaggagagatggtggcagcaagaaagagaagtgtttcaaagccgtgctaattcgtttatagcacgcatgcgacttgttcaaggggacaggcgcttttctccttggaaaggatctgtagtcgattctgtagtaggagtgttcctcactcagaatgtagctgatcatctttcaagctctgcctatatggcccttgccgcaagttttccttcacggccagtcaacaataattgtaaggatgatggtaccacagaagacaataaacaaaccaccaggatgagtgagctagtaggagagaaaagtgtgtttgaccttttctacaatggtgttagacctgatctagaagtgggatgtgaggaggtatcaatgacttgcaagaagacacacatggaaccaacagacaatactagggatagtgaatttattgaaggtgaaacctattcctttgattacaaatcaacagatgaaagcgtttgcaatcacaaagggataggtatagaacataaagaacaacaattaccagatttctcctcagcagaattaactgtgtctacagaactcgtgcagcagatacaaatccagaagatctcatcctctcaaattttaacttcagaaaccatacaatcaagattatctttgagttctgagatacctagaaattttgtttgtggtggttctgctgcagcttatcagcagctgggaagcaatttcgaccagggaagctcattaacagaaaatgatgccacagccagtgaaattgaatgtcacagactccaaatggctgcaataaatgattatggatttgattggagcagcgataagataacttacaccactctgaacactccaaaaataagcacagaacttccagtcaagttacaccatgacaaaagtagtagctttgaagcaccaaacctgaaggagcatgaatcagtctttgcaacacatgaaatgacggtagaagcaacaagaaaagaagacgaacacacatcaaaatctagttttacttcctacaatggagtaccagatacagctgcacaagcatcaaagccaaagaaaacaagaaccacaactgcaaagaacacagagaattttgactgggaaaaattacgaaggcaggcttgtagtgaagggcagatgaaacaaagaagttttgaaagaagagactctatagattgggaagcagtacggtgtgcagatgtacgaagaatatctcatgccattcgggagagggggatgaataatgttttagcagagcgaatccagaattttctgaatcgtttggttagagatcatgggagcattgaccttgagtggctaagatatattcccccagactcagcgaaggattacctactaagtatacggggactggggcttaaaagtgttgaatgtgttcgtcttctcacactgcatcatcttgctttccctgttgacaccaatgttggtcgtatatgtgtaagactgggatgggtgcccattcaacctcttcctgaatctctacagctacatctcttggagctatatcctatcttggaaactatacaaaagtatctttggcctcgcctttgtaaactcgatcagcagacactgtatgagctgcattatcagatgattacatttggaaaggtcttttgtaccaaaagacagccaaattgcaatgcatgcccaatgaggagtgagtgcaagcattttgcaagtgcatttgcaagtgcaaggcttgcacttcctgctccccaggaggaaagcttagtgaagttgagcaatccatttgctttccagaatagcagcatgcatgctatgaattcgactcacctacctcgccttgaggggagtatccattcaagggagtttcttcctaagaattcagagccaataatcgaggagcctgcaagtccaagagaggaaagacctccagaaaccatggaaaatgatattgaagatttttatgaagatggtgaaatcccaacaataaagcttaacatggaagcttttgcacaaaacttggagaattgcattaaagaaagcaataacgaactccagtctgatgatattgcaaaagcattggttgctattagcactgaagcagcttcgattcctgtaccgaaactaaagaatgtgcttaggcttcgaacagaacactatgtgtatgagcttccagatgcacatccacttttacaacagctaggacttgaccaacgggaacatgatgatcctaccccatacttattggccatatggacaccagatggaataaaggaaataactaagacaccaaaaccatgctgtgaccctcaaatgggaggcgatttatgcaataatgaaatgtgccacaattgtactgcagagaaagaaaaccaatctagatatgtcagaggcacaattctggttccttgtcgaacagctatgaggggtagtttcccacttaatggcacttactttcaagtcaatgaggtatttgctgaccacagatctagccacaacccaatccatgtggaaagggagatgctatggaacttgcaaaggcgcatggtctttttcgggacttcagtacccaccatattcaaaggtctaagaacagaagaaatacaacaatgcttctggaggggatttgtctgtgtgcgaggattcgacatggagactagagcaccaaggcctctgtgcccccatttgcacattatagcaaggccgaaggcccgcaagacagcagcaactgagcaagtactctaatcagcaaagatatcagttttatgaacatcatgtttattgtgatatgacatcaatagctctcgacctatgcatggaatcatattacttcctgcctggcgatggccattgtttaggaaatttaagccatggatggggtccgagactgttagttctgagacgagaggactaatgaagcatcaggaagcaccaataattttcacttttttgtttcagatctactgtatgtaaattagcatctagctgttagtccatgtaagatgccattgctatcctttctgagacaaactaccttatcaacatttcatttggttaacatttgttctgagtattgggaagcctgccagaattttgttttcgtacctgtatattcctgttatctgtacaacggtttag

SEQ ID NO: 27481 - DNA, 929 bp, Zea Mays
aaatgttcttcgcagtctgtagttacagtacgttttgtttgatttggggacaggcaaattgtgagctgggttttggtctgttgctaatgcggtacgagactcgtcctcgttgatatttctctctatgaaattggactgcaacttggttgttagtcactttgcaacgcttgcgggattcggtaccgaaagaagaggaggcaagagcttggcctagagcacaacaagcagcagcagcaacaacaaaataatggcgaggcgaagactggagtaaaagacagctctagcaacagcagtagcgggagcagcaactttcacgtggtgcagaaacggaggctcctaatggaagtggaggaggctgctctgctgctgatgaccctatcttcttcgcccgcatccacattgctacatggctaggaaccctgcaacaccaaatcaacgatgtacatacacacacaggcttccccaccccacaccttgcacagtcaccatccaacgattccagtccaaatcgtacatgtttctcacaccagtctgagatagggaaggagggggcctatctcgggattgtgtgatcttctgataggggtggatgattagtgccaacctaatcactccattgatcgtcttcttctctgtttccgtcctacctgtagaccttgatgtatctgctatgtgagttgtggtaggctccataacaagaggtcctgttgatctcacttccccacacatctttttctctgtccttttctctctctttttttatgttctccctctttcggttttgtatgtactttgatgttgcccctttgtgagggatggatgatcaaaaggagacgccatcctttctcattctggaataatcaaggatgtgagctctttcatttcagtaagttcgtgttgctgtgtcatgaacaagaaaaaatgcagtt

SEQ ID NO: 27482 - DNA, 1756 bp, Zea Mays
cttttccgatgttgaacccatcatggccatgatggatccaccatcaagttttattttgacaacatcccacccatttgaagcatcatcttttgtcaaaacaaaacattttgtttttctagagcaaggctaagcataagaaaaacctttttataaaacaggtgatcaaggaaaggtaatcaaattcttaaggaaggaaatgcatccacttgtttagcacccaactcctatcacctaatgcatcaagcaagtgagaaagattttaaaatagcaaggaggtggcaaatgcaccggggcttgccttgtgttataggtgggtcaggctatgctccatagatgtcaaaataaaagcaattccaggcctcgggttcttgaggtggtggtggtgtagtccttgcttcttcaacttctacttcttcttcgttttctatatatcatatatatataatcatgaatgaccatgaaaaatgcttatgaggatgcaaggataataaagatatattatttaaggtcttgaatacaattttccttcacgggactccaggaaactagggtttttggagtcaatagtgaagttcatagggcaggctttactagaagactagggttttggggtttaggcatcaaacattgcccaaatcatgccaaactttacgaaaggcttctaaatattattttaagcttatccaaaaagatcagtgatttttggagttattaaacaatttctaaaattccaggagtgtaggctttggctattttcaatactccataattctttagttggactaaaaatcataaaactatttttattaaatactaaagaaatttaggagcctagaaaaattggtttcaactttttatcattttcctagaattttctagaaattctttaaccctggtagaaaaagaaaaagagaaaggtgctacagtattgggctcatttcagtccgagatggcccacaataggcagaatgcccctacgcatgcgcccgcgctgataactttgcgcaaaagtccctggggttttaaataacttgaaaagcgtctaaagtagtattccctgagtcactgacatttacaaaaatccccctctatttctatttctttacagatcttgggccacgacgggaccaaaccgaacacctggccgaagccatggtttcacggtgacggtgacccggacaaagagtaacaagctcataaacatcaagcttaagtcgatccgagcaaaaaccctcatttaatttgaaaaatttgaccctaaatggagcttgttcatggtcatggcggtggaacagccctggagatagcgttctggccaaccaatgggattgacgctaaaattgaagcttgaggaagcttcacaggttcaccagagactatgcacacgattgaatttaggccgaacgagggtaggaaggcgggtcgatagagagggtgtacgcggtggtgttctacgggactacggggtgttccggtgtttgggccttggcaaaattcaattggccggctccgagagcaataggaagttaaagacaagccagaacaagagccaaatgggcgagtactgatccgaggagggttggccatggaggggtccttcacggcggcggaaacgaccgatcacaggaaaatccgatgatcactgatgatggtggatagaacagggtggctagtgagccgttagcttcgtaactgagagatgaagaggagtgcacggttaattgggaggacgagggtgtgggcatggtgaatttat

SEQ ID NO: 27483 - DNA, 3273 bp, Zea Mays
gatgggctgttgccaatggagctggagttatattaagtgtctgtgatgaggaggtagctcgttatgagacagcaaatttaacagcagcagctgttcctgcgcttctgctacctccgccaacgacacccttggacgagcatttggtggctggtctgccccctcttgaaccatatgctcgcttgttccatagatattatgcaattgctacaccaagtgctacacagaggttgctttttggtcttctcgaagcacctccatcatgggctccagatgcacttgatgcagcagtacagctagttgagctacttagagcagctgaagattatgcttctggcatgcggcttccaaagaattggatgcatctgcatttcttgcgtgccattggaactgcaatgtcaatgagagctggtattgctgctgatacagctgctgctctgcttttccgaatactttcccaaccaacgctgctttttccaccactgcgacatgctgaaggagttgacgtacatcatgaaccactaggtggctatgtatcatcatataagaaacagttcctgcatctgaggccactatcgatgccactgcacaaggcattgcttctttgttgtgtgctcatgggcctgatgttgagtggagaatatgtaccatctgggaagctgcctatggtttgctaccactaagttcatcagcagttgatttacctgaaattgttgtagctgccccgcttcagccacctacactgtcatggaacctgtacttaccattattaaaagtattcgagtatctacctcgtggaagtccatctgaagcatgcttgatgaggatatttgtggcaacagttgaagctatacttaggagagcttttccttctgaaacaccagagcaatccagaaagccaagaagtcaatctaagaatcttgctgttgctgaacttcacacaatgatacattcactctttgttgaatcctgtgcctcaatggaccttgcctcccggttgctatttgtggtgttaactgtttgtgtaagtcatcaagctttgccagggggcagcaaaagaccaactggtagcgataaccattccctcgaggaagccactgagcattcaagattaacaaatggaagaagcagatgtaagaagagacaaggccctgttgctacgtttgattcgtatgttctagctgcagtttgtgccttatcttgtgagcttcagctgttcccttgcatttctaagaatggatcacattcaaatttaaaggattccatgaagattatcatacctggaaaaaacaatgggatcaataatgagctacacagtagcatcagctcagcaattattcatactcgtagaattcttgccatcctcgaagcccttttctccttgaagccatcatcagttggtacctcatggagctatagctcaaatgaaatagttgcagcagctatggttgctgctcacgtttctgagttattccgtcggtccaggccatgccttaattcactctctgcactgatgagatgcaagcgggatgctgagatttctaccagggcatcatccctctaccatttgattgacttgcatggtaaaacagtgtcctccattgtgaacaaagctgagcctcttgaagctcacctgacccttacaccagtaaagaaggttaatcaacatcgctgtgaggaaaacaacaccaactcatcggatagtgccaagttggaaaacaagaatggttcaacacataagaaaaacggtttctcaaaaccacacttgaaatgtgcagaagaggttctgaacggcaatgttgcaagtacatctgggaaatccattgcaagcttacaggtggaagcatctgatttggcaaacttccttaccatggatcggaatggggggtaccgagatgtctgcagaaagcacatcagctcaccaaggatggaggaaggttgtggatgcactttgtgatgtcgtttcagcctcaccaaccaaggcctcagctgctatcgttctccaggccgagaaggacttgcagccttggattgctagagacgacgaacaaggccagaagatgtggagagtcaaccaacgtatagtgaagcttatagcggagctcatgaggaaccatgacagccctgaaaccttggtgatactcgctagtgcctctgaccttctacttcgtgctactgatggaatacttgttgacggtgaagcttgtactttgccacagcttgagcttctcgaagtaaccgctcgagcagtccatcttattattgaatggggagatccaggtttatcagttgctgatggcctttctaatctgctaaagtgccgtctttcaaccaccatccgctgcctttctcacccaagcgcgcacgtgcgcgcgctcagcatgtccgttctccgtgacatcctggaccacggatccgtgagccccaacaagatcagccgaggggaacagcagcggaatggcatccagagcccatcgtaccggtgcgtggccgcaggcatcctcaactggcaagcggacgtggagaggtgcatagagtgggaagcccacagccgccgcgccaccgggctgacgctcgccttcctcagtacggcggcgaaggagctcggctgccctctcccgtgctgacgaggccgctcccggatctgatctgacatcggcggccacttgacggccagtgctggcagcttgctgcgggaccggcgagtaggacgctaatctctcgaccaaggacgactcgccggtttgttcacgtgatatgtgatcaaactgatattagatggtgtttccaaagtatatatctactgaggggcttgctcccatgatgcgattttattccaatctgacgtcagatgctttacgagcatatttaactgcttgagctgtacgtagcttgtattacttgtaactttgtgtaatatggttattattgccgaagaagcagaacatagctttttcttttttttctctctcttttttagactgctgctagatccttatccatgcgttgcaacggagcgccatatagattgaagttccccttgcagggctccttgtacggtctataacatgaacataaagatggcatccagtagtcaatcagcaactatcgcaatgagattggtcttctgcacgtgacccagtttagctcccgtgcagggctctctgtaacctactgtgatgtcccatgacatgaacataaatgtggcaggtttatcattcaataaccaaacagcagccgatatgtttcatctttatacataagtgctgatctaat

SEQ ID NO: 27484 - DNA, 1389 bp, Zea Mays
gttttttttttaaaatacctggcgcctgatcacggaaagggacggcaacaaatcgccgtgcgccagcggccagcgcacagccgagctccagagaggaggcggagctgcgggggacggggggagacggaggaggtcccggcgtcccgcgcctccccgattggacaacttaatgacccctagtccctagtagcaagtcggctttgtgcgcgcgtgctctgctgcccacccggccgccccatttgtttactgggtgtctgggtccagtccccgccccgaatcttttccctcctcccgcaccccaggccgcagcagcagcaccggcgcaccgccacccactcgccccgcctccgtgcccgcgcaactcgcgcctgcagcgtgtgggagatgtgatcggagcccggccgtcggttcgagtgttttcttctgcctctgggctgtggcgcggggaggaggcaagctggcggtgagatgggtcggtgcggaggaggaagcggagcaggagcaggagggggagctttgggcggctgtgctctcctcaccgccgccttggttatctcaacgctcgtgatccagggcgctggaggttcttctatccataacgaattggcacccacacaattacttggatgatgtacttcatccatcacaagtacaagatcaaaggctcgaacgtttaggccaagatgccccatcatttcatactggcaatgaacttccaaatcctcatctccgtcaagtacctgctgctttgccatctcttccagttcaaccatatgcgcctcatcctaaaatttctgctgacaatccaaccgctgcaccttcttttcaaaagataccctggttgtcattgacttcaccgcctttgcctgcaattgggcgacgaatgcaaagtccagcagcttctccagaaacagcagttcatccagctaaacatggcaaggatcatggaactccagtttcagcaccttcaaatgttagtcatcaccatgcgatgcctgcgaataatacacatggaaaaactcatggaactccagttttggcaccagaaaagagaaggcatcaccacttgcctgcaaataattcatatgtgaaaggacctgctgtttctccctcaaagtctcccatcatccacaggaaaggacatggtgttccagttgctgcacctccaaaagaacactggagctatttaccacctgcaaatcgtagacaccacaaaggttctcgtcctgctccacgtaaaagtaacaatacttctgcaccaagccatgtatatcctggtagtcctgcacctgcacctgaacgtttgctcatcaaaggaaagggcaaggaaatttctgctcatgctccacgccatcccaatcattaccattcgcatcataattctccaag

SEQ ID NO: 27485 - DNA, 3901 bp, Zea Mays
aatcatggtacactgactatacctgaaatagaagtgaagtagcttgttcggtccaagtacttcattgagttcttacaatatcccgtcattccaactgtcctgacaaggatccactggtggcgactttgtttggatgaagctcagatggtagagtcaggcaggacttctgtgactgagatggcattgaggctaaatgctcaacaccgttggtgtatcacaggaaccccgatacaacgcaagcttgatgatctctttgggcttctacgttttcttaggacaaacccatttgacacatatagatggtgggtggacattattagagatccatatgagagggggaacaaagtagcaatgaattatgcacacaatttctttagggaaatcatgtggcgttcctccaaaattcatgtctcggctgaactgcagctgcctccacaagaagagtgtttttcatggctcatcttttcttccattgaagagtatttctataagaagcaacatgccacctgcatggaccatgcacatcaaattattagaagtttgagaaatgacaccaatagaagagaatcaatttctgattcaaatgctttgctaaatgtttacctctccaatgacgacattgccaagctcctagtcccactgctgaaacttcggcaggcatgttgccacccacaagtggggagttctggtctctgctccctgcagcataaccctttgtcaatggatgaaattttacaggttcttattggtaaagcaaaaattgaaggagaggaagagctcaggaaaattgtagttgccctgaatggtcttgctggattagctgttattgaacaaaggaaccaagaagccatttctttatacaaagaagcactagcattggctcatgaaaatattaatgatttccgtgttgaccctctgttgaatcttcatatcaactacaatcttgcagaactgcttagaattagttctgagtatttacaagaatgcccattaaaaaatccggcttttgaagttgcaatcagccgaaaaagaaaggaaatagatactgttgagacaaatgtacttagtgtaaaacgaaataaaatatgtgaaaacagtgttttgagtttgacagctaatgggctagaaatatctgaagataaaaacactattggacaaacatgcatgactagagatgtggatgtggagaatgtcactgggtgccactcatcatttgaatgttttgctgatgactgcttgaggaagacttgcaatacaatcacagaaaaatacctgtcaacttttacttcaaggctggtagtagcgcagaaggattttaatgcatcattcacagaggtcttgaatatcactaaagagctacagagtgagtatatgaattggtggctgtatgctttggactgcattgaagagaacaacatttctgctgacgatctgatcaagaagattgataattcttctagtaagagcaccactggtttgggttcatggggaatatcttccagggttaaaagtattgctggcttaaaatatgcaattcaagctgatattgattctctacaaagttcgaggcaacatcttatggatagacttctggaagttgacaaaacaatggctaacccaagggatgaggacattgagggccagcgatattgtccaaactgctatgatggcactggttctctatgtatccagtgtgagctagatgaactctttcagaggtatgaatcacgcctgtttcttgttaagaaatcgaacaatggttctgtcattgattcagtagaagaagcacatgatctactgaggcgaaaatatgagctcaatcacttcttccgtaatagaaaatccaaggagggacctgaacctgactatgacaataacaaccctaggtcagctcgagaaaacatacaggtctataggcatccttctagaaccgagactgcattaagggttatctggaatcactcaaagacagtattgggaaagcaatattccacaatggctaaaaaacatttacttctttttgaggctatgcgcaaggaatttcctcaagcaaggtttctgtcaattgctcaaacacaattattgcgtgctcatgatgagatcaagatgtccatctcaagacttcagctcaaagagaaagaggatgatcctagcgctgccaatattgtaactagagaggaactcataccatataatgttcagtttacaagtgaaaaattcatgtcactctcatctttagcccgtgtaagaggtcaactccggtacttaaagggattggcggtatgtaacaagaaaacacataaccagcatgatgaatcactggctaaagcaggcgatgctgttgatacagctacttcatgttcagccacagggcaaactgtttctgattttcgtaatgaaccatgcccgatatgccaggagaaggtttttgaccagaaaatggttttccagtgtggtcattttgtatgctgcaagtgttgtctttacatgacagaacaaactgcagcacaattcggaaagcgtaaacaatggattatgtgccccacatgccgccagcgaacagatattgagaacattgcttttgtagttgagaaaccttgggacaaacatgaaaagagcattgaagatttggctgaaagcactatttctgtccaaggttcatatggaacaaagtttgaagctgtcacaagaagaatcttgagaatcacttcaactgatggaacagctaaagttcttgttttctcaagttggaatgatgtactggacgtactagagcactcccttgctgctaacaacatttcatatgttcggatgaaaggaggaagaaaatcacaggcagcactctcccaattcaagggtcaggagagcaatataaatgtagataaagtgaacagggcagcctgcaaaatgcagcctgttcaagtacttctgatgcttatacagcatggagcaaacggtcttaatctactagaggcacagcatgttattctagtggagccattactaaatcctgctgctgaggcacaagctatcagcaggatccatagagttggacaagacaaaagcacatttgttcaccgttttatagtgaagaaaacaatagaagagagcatctacaaattgaacaggagcagagctgtctgctctactataaaccgtaaatccaaaaacttcaaagatgagcctgttttgacgctgaaggatgtggagtcgctattcccgatggcaggacctgatgaacccctagaacaggcagatcaaaattacggcgatagcttgaggagtttgcctccatctgttgccgctgggttagctgctgaaagaaggcgactaatggagcaataagttaatggagtttgcctccatctgttgccgctgggttagctgctgaaagaaggcgactaatcaagggacctccatccatcgttgtggcagttgtgctaattttacttgatcagaatttctcttcgcagcacagtaacgacagtaggagaatgatgctccttagttatgaagcacccccatcatgagaatcaggctatttacgttgtaactttaggattttttttttatgtacctgtaggccttttagactcttgtacataagcttctagttttagttcgtttatacggcccatcctgtagttttgatgtagcagctctcagctctgccactgctacaccaacttatggcatgtataagtgtactaatacatggtcatcagcatgatacattctttagatgcttggtcaattttttagatgcttggtggtggcagagccagtagtcattatggaagaaaattgtcggttgtcctatgctgtctgcagatgtgccggatggtcagtcaggaagatgcagcaaggctttctgatagcttctgcatccgggcccctgctg

SEQ ID NO: 27486 - DNA, 2257 bp, Zea Mays
gcgggtgggtcgtccaaagtagaatccaacggcgcgccgcagctcctccgcccctccgctcccgccgcctatattccttacttgcgttcgttcgtcaagcccttgcacaagcgcgggcggccctccgaccggctgaaaccccggcggcctcctgaagattacggtaccgggatcggtctgagccgccgaggcccgcgcaggcgcttccttatatatcgtttcttggcgtggctaaggtggtggtgaccatccggtgaatatgaacattgtgtgtgaagtatgtggagatattggttacagacaacttctgctatgttgcggagactgtaagcgttatgctgtgcaccagtactgtttggacaaagttgttttcgatgcaacgttgctagaatggttctgttatgaatgcctacaaaggcgtggtgaagttacttgcgtcgcatctctagaacaggtgtcaagtgaaagcccactaagtcatgctcattttggtcctctagtacatcagcgtactactaagagggtggagtcagtaacagggccatattcacccagtgatgactgtgaggaattattttcctaccctggcatagaaagcatcccaagtgttcaagaaataagtgtagatcccattaagacttcaagtatttctgaacatgataccatagaagcagctgcaagcagtgaaagattcacggagtgtcaaaaggctagctcctgtcgcgaggggataactgtgaagatggctatggcgccctcatcatatgagaactcaggagaagacattttctctgaaaatgtatttttggaatatgttttggcatataaatgttatctatctaaagcacaaaagaagagagtaatggagcttattcaggaaattcaacctgaattcacagtttttatatcaataatgcggaggggcaatgtgcgacctccgggtccttttctgggaattaacaaggaatatgcaaatgcacatttcccagataaaagcacaaatgtcactcttgagatgcctgacaagagcaagaagtggcatcccaaattctacagaagagatgtaagcagaacctgcatgcttacgggacagtggctagactttgtctgcgacaatcatgtgcaggagggagatatatgcctccttttaccgacaaaagatgagataagatgcacgtttatggtctatgttcttcatgaaacaactcattcttctagaggtgaggctggctttcaaatgggtggcccatgccctggtgcatctggtgtggcttcagaaatccatgttgaggaggaaccaaccactggtattagtgcaaaacattaaaaaactattgagtatctatattatttcttttcttgttgtctaaaaccgtctgcaggggaacatgtttcttcagaaagtgatatgcgagaaattcctcatgaatctctctcgagaggagactctgatgatcaatttgagcctccatactttgtaccatgcaagagtcctctatctgaatcccaaaagagaatggttgaggagcgagtgcgagctatccgatctgaaattcccatttgtgtggcagtaatgaagaacaacaatgttggtgtcgctcaacgttggatgctagaattaggttcacgatatggttcggtatatctcccaactaaagggcaaaccatattgctccagtgcggggggacgacatggaaggcaaaattgatgtttcataatggtagaaggtggtttctgaatggaggttggcccaattttgctcgcggcaatggcctgcgtgtgggtgacatctgtctattcgaactgaagaagaaagacagtaagcttaccatggcagtccacatcattcgcagggagaagttttagtttgcactataccaaagtgtggctcctgttctttcggctggtaccctgggcttattgtacttgttctattttgacagtcgtgtggctgatctctcgaaggattagagaccaatctgtaacatctgttggtagctatcgtgccgccttgcttttgcttatgttgtacttaacacccttcttaaagtttcatctgaattaaaagtgatgactattgtttgtcatcgaacatctagtctgtgttctcaatatagtctctcatgcctgttacgtctatctccctctcaagaaagagatccggttgtccaggaaccagttaatattaattgtttattctctctttgtgcatgtacaatgtatgaaaataatggaaaatactattactaattctta

SEQ ID NO: 27487 - DNA, 3032 bp, Zea Mays
gggggcgccactgcttctcttcaagacccgattccactcgcgtgtctgcccgccggccagacctcgaggaaacaaggccttacttccttgattacatggcgtcgccggacgaccccgtgctctccgcttgcaagaaaaacttgagccacttcagaataaaagagctcaaggatgttctacaccaacttggactttcaaagcaaggaaagaagcaggacctagtggacagagttatggcagtgttgttgagccagcaagatcaagcctttgaaacgaatggcttaccaaaggcaaaatcagcggtgaaaatagtggaggacacatttagaaaaatgcaagaccctacaaatactgttgcagtctcaaggagccacgaattaggagacagtgttacgtgtaaaaagaaaccggatgattctgctcaggcagttaaggttcgttgcccttgtggtgactccaagccaaatgattccatgattaagtgtattgatccacaatgcaacatatggcaacatgttggctgcgtcgtcatacccgatactgagaaatccgcggacaatatttctcctgaattaccttcctgcttttattgtgaagtgtgccgacttagcagggctgatcctttttgggtcactgtgaaccatctgttactccctatcttaataggaccctctactgtagcagcagacgggtcatacactgtacagtataccgcaaaaagctttcagctttcaagagctaatagagaaattctgcagcaagctgaatgcaatattcaggtttggtgtatccttctcagtgacaaagtaccttttaggatgcactggcctttacactctgacatgtatttatgttagggtggttaacaggcaacccacacaaaagttaggggccaatggtagagacgatggtccactattaacagattacctgaaggagggacctaacaagatttctctatcaagaaatgacactcgtactttctgtttgggtatcagaattgccaagaggagatctctagaacaggtcctaaatttggtgccaaaggaacaagatggtgaaaacttcgatgacgcccttgcacgtgtgcgtcgctgtgttggtggtggagctgaggcaaataatgcagacagtgatagtgatatcgaagttgtggctgattttgtctctgtgaatcttcggtgccctatgactgcttcaaggatacagatcgctggtaggttcaagtcctgtgctcacatgggctgctttgatttagaagcttttattgaaataaaccaacgttcccggaagtggcaatgcccaatatgcctgaagaattactctctagagaacataataattgatccttatttcaatcgcatcacttctttgatcaaaagctgcggagatgatacatctgaaattgatgtcaaacctgatggttcctggagagttaagggcagacctaaactgaaggaccttacacagtggcatctaccagatggtactctctctctgtccacagatacagcagccaaacctggaatgtgcattgtaaagcacgaggtcaaagaagagccattgtctgaagaggtgggatgtcatcttaagttgggacttaggaaaaaaagcaatggccagtgggaaattagcaagagagtggatgctgatctggtgccgtcttctggtaacgaccatgaccattcaggacacgatgaaaacaaaaactgcatcactcactcaagcaatattgatgatacaaacattgcagatgaaggttataatttagagccagcaacaaatggttatcccatgacccatgtccatgatcttgactcttcatccgcagacgaaaatggtcctccagcatcgacagggcaggatatagtagttttgagtgactcggatgatgatgctatcatggtgttgtctcccggtgctgtgaactgtggctcgatgcataacactggaaatctgtttccacccaacacacctgaaaatttaggagtgtgtagtggagaaactggtggatgccccaaggagacatcattccttgcattaaaagaagattttggtgatccggggttgtcattttgggaaagtcatggtagtccccgagatgcttctacttcccagatccccgatgccagtacaaaggcagtagataatccaggtgaagtggacaactaccctgccaatgatcaatctaagcaagggcaagtttctggggctgattttggagtagcagcaaatccggtgccattggaagatgggcatgatagcgcactgcaaccttgttcaatgagtgaaagagatagtgccatgggtcttgctagcctgggagcggatactcaatcatgtgttgatgtccattctgacaattggacatctgtcagcattagtggccgtgatgaagttttaactgctgccaaaattgcatctaggaaaaggagcaatcctggagacagaatagaagatttagatgcttcacttgtgggaagcccaaaccaagatgagtgcagcggagggagatgttcagttcgaccgagattgatactagagatttcctcagattctgattagcacacatttgtgttggctgatgcctgcatgacttggagaaaaggaagggggtggatgtgatgctgtctaacgcggtcagcgaactggcaagcagctagaggcctctcctctatcctgtaattggagatcccatctctgttaggtggtagaacgtgacaccaggagcaacatatagagtggcataatagagctgaaccatatatacatgcagtgtaggcaattttgtaccatatatgtcatgaaccgaggtggcagttagttgatgtaaatatgctccctctctgtttttctatattattggctgaaaggagaggggaggatgcatgcttagtccggcctggttatttatcatttatttatgatatataatgaaaacggagtaccaggtaggtcgcagcggtagagaggtgcaaatctaatctaatcttgtgtcagacagggtcttcaaatcatatctttacttatgt

SEQ ID NO: 27488 - DNA, 1315 bp, Zea Mays
acaaaaaggctttgttgttgttgttgttgttgtatgaaggaatattgtagtggactagaaaaatcaaaagagggaaactgggatgaagtgaccttattgttcctaagtcctaacacattataatatgttaaacaaagctaatatattagtctccttgtaggttacaacatggtttatcgttctcttgctttgataaatgatggcattttattgtttattacaaaaacaggctcaagaacagcaacttggacgcatgtgtacttggagctctcgaggttcttgccactggtgttacaatcacgttcttggacagagctggccggagaatcctccttattatatcttcttgtgggatgaccctaagccttcttgcggttgctgttgtattttacatcaaggataatatttcacatgattctgacatgcataacatcttaagtatggtgtcgttggttggtgtcgtggcttatgtcattgccttctgcttcggcatgggtgccattccatggatcattatgtctgagatccttccggttagcatcaagagtgtggcaggaagctttgcgaccctagccaactggttgacatcctttgggataacaatgacagcaaatttgctcttgagctggagtgctgcaggcacatttgcctcctacatggtcgtgagtgcgttcactctaatgttcgtcatcctctgggtgccagagacgaagggaagaacccttgaggagatacagtggtccttccagtagtgagctgcagcagcattcatcagtaaatgcagtcatcagcaaggtctggtctgagctgctgtatgtggtgtggcggcatttcttcttctttttgtactgcaatctcttctgtggcatcatttggtgtgtaagtttcctgcatgacattgatagtagggattaacttgcatttgtgacaaattagttgatagtgataggatccctttttgacgtccccatatcctccgtgtggcggcatgggatgtcaaaaggaaagggatggagttttctcgcttttggtgtagcaggcctccctttggtcaagtagtcacagacccattttttttttgtcattggattggatacgttacagggttcgctcaccacccacactcgagactgttcattaagtttactcttatggagatgatcgagtggaagttggataaggattggagtcggatgtatcaggtgccaaggaatccttgtattcggtaaaaaatctatgctaagaatcagcatatcccttgcgcaagcaagagcgttccccttctttctaattcaaaaaagaaagggacggtaag

SEQ ID NO: 27489 - DNA, 2084 bp, Zea Mays
  misc_feature (2083)..(2084): n is a, c, g, or t
gcaccgcacgcccccacatttcccgcgccaaccgaccaggcgaacggcggccacgcccacgccatgggcaagcccaagcagcaagtgctctcccgcttcttctcccccaagcccgcgcccgtgctctcgtccgccgcccccgacccgccgcctccgcttcctcccaaccccaaaccctccgcggcgcatccgcccgtctctaccgtcgcctccttctcccccgctaaacgcgcgcgcgcgctctcactctcccccaaatcccccgccgccaaacggcccaatcccacccctcctccttcccgagacgccgtccgccgcaggctcctggagccgctccaccaggagccgcctcgcctcctggaccctacaggtggcggcaagggctacaccccgctggagcagcaggtggtcgacctcaaagcccgccaccccgacgttctcctcatggtcgaggtgggctaccgcttccgcttcttcggcgaggacgccgccgtcgccgccgcggtgctcggcatcgtcgcgcacccggaccgcagcttcctcaccgccagcgtccccaacttccgcctcggcttccacgtccgccgcctcgttgccgcgggccacaaggtcggggtcgtgcgccagaccgagaccgccgccatcaaggccgcggccaggggcgtcggaggcgccccgttctcgcggggcttgtccgcggtctacacgcgcgccacgatcgaggccgcggcaggcgagctggagggtggcggcgccgccgcgcccgaggaggggagcagctaccttgtctgcatcgtggataaggaggtggaggcggcggggagggaggggctccaagtgaaggttgggttggtggcgattgaggtgtccacgggtgaggttgtccacggggagttcctggacagcgactccaggagcggactcgaagctttgctgcttggattggcgcccgtggaggtcatcctcgggacaccactctcttttgccacagagaagattatgatggcatatgtgggacccacctctaatgtgcgggttgagcgtgtatcatgtgaatggtttggcaaagatgctgctttggctgaactgataactttatttgaaaagtctgtaaacaatgcttctagggctgaagatgataggaagctgatagaaacaaatgatgataacaacaattttcatgggattgagggtatcatggcgatgccagagctagttgttcaagcattagcattatcggttcggtatctcaaaggttttggcatggaaaggataatatgctttggttcttcattccggtccattttctgctgatgcagaattttccttatcagcaaatgctcttcaacaacttgaggtattcaggaacaactcagatggtacaacagaagggtctctgttccaaattatgaacaatacatgcacatcttttgggtctagattgcttagaaactggacatctgatttgtgctcgtcacgatgcggtatctgagatttttgaatcaatgggaccacaacattcagttaacaatctgcaggatggaggggatagatcctgcacagcttcagtgcttagtgatttgtgtattgtcctttcgtcagttttggcattgctgggaaggtcacctgacattcaaagaggaataagtaggatttttcattgcaaagctacagctaaagagtttgttggcgttatccagtctatcctcacatctgggaagcagctacagaagcttgttcttgaggatattggcattgtctcgtctccgcataaatctgtgcactcccctttgctaagaaggctaataaatacagcttcatcatccaccatacttaatagtgctgtgaaacttctgtcttgtcttaacaaagatgcggctgatcaaggagatatgctaaacctgttcattgcatctgtggatcagttcccagaggttgcagaaggtcatgtaaatgtaaaaatggctgaacataaacttgatttgttgattgtggagtaccggaagcaatttgctatgcacaacttggagtttaaaactgtagctggaaccacccatttaatcgaactaccagtagatagaann

SEQ ID NO: 27490 - DNA, 1246 bp, Zea Mays
cgattttctattttttgccacctttggtatcccttgttgatttcgggccatattttttccgagcaagaagaaaaagagaggggcacgagcagttggtcctgacaaaaatggccgtggattgcgtcaatttagcatgagagtatgtgagaaagtcgaaagcaaagggagaacaacctacaatgaggtggcagacgaactggttgctgagttttcagatcccaatattaatattgactctccagatcctgataattcgtctgcgcaacaatatgatgagaaaaatatccgaagaagagtttatgatgcgctgaatgtcctaatggctatggaaattatatctaaagataaaaaggaaatacagtggagaggtctgcccaagacaagtatgaatgatattgaagaactgaaggttctgctcctgacagaggtcaatggactgaaaggtcggattgacaagaaaaatgcatatctgcaggatttacaagatcaatatgcatgtctgcaaaacttggttcggcgaaatgagcagctatatgggtcaggagatgcaccttccggtggagtggccttgccatttatactagttcagacacgtcctcatgcaactgtagaagtggagatatcagaagatatgcagcacgtgcattttgatttcaataggatgattcatttgtactgaaagcaatggcattatctggcgaagaagctgattgtacccaagctcctggtgcgaatggaggcgagtgctcaagtacacggaacaattattggcaccaccaccaacaaccgcagcctccagggccaagagtagttagggtaccaaactcgcctcctattccagggatactaaaagggcgtgtcaagcatgaacactaggcttcaatatgcttagtggtgtcaaatgagctatttactttattgtccccagctagttttacctgtagaaaatgcatgtaaattatgcctgtaggggcagccgcagtctaatttgacttcgctgatggatagttcgatttgtgtcatgatatgccatacgcctagctcacgttaactcctagtattcagttgtttggtcgaggaaaagagtctgtggttaagtgtaattgtgtagtttatcttcaaacagtcggcatatcgtatctatgggacgatttgaggaacagtgttgtcagtacactccaattgatatacaataaaatgcaaatgtttgtttacagttcggttggtttctgatggcaatggcaca

SEQ ID NO: 27491 - DNA, 1357 bp, Zea Mays
gaggtttcggcggctggcagcgccgcagcgtggcaaaacccttggtggcgaagtcccatgagctatcccttgcttatgatccaacttcactgaccaaacttgagccccccttggttcttcaggaatttgttaaccatggtggcgtcatgtttaaggtgtacattgttggggatgcaataagggttgtacgtcgattttcactcccaaatgttgatgaaggcgatctatcgaacaatgctggggtatttcggtttccaagggtctcttgtgctgcagccagtgcagatgatgcagatcttgaccctcgtgttgctgaacttcctccgagaccattgcttgagatcttggcacgagagctgcgccgacgactgggtcttagactattcaacatcgatatgattagggagcatgggacgcgagatcggttttatgtcatagacatgaactactttcctggtatgcaatctgacattcttgagcttgcacaagctatcttttgtttcggtaaagctgacccctacatgtacattttagaattattgatcaaagaatctcctgtttaatcctgttctactatagctaagtctttaaattaattcgcagtgcattgctgacactaatatgaaataccaaattggagacactgcgaatagaggtagtttatctcccgtgtcatcatgactaatgatgatatcaggtatactgcttgatggatgtactgaacgaacgagatgcctgtgctgtgacacttgttccactctgtcggttttattgtttttaaaaacagtttggagtccaaagagtggctagaacctggcacgccgaagttatcccagctcagcctgttttcttgtgggtagattctttgatttgacaatgatattagccataaacccataacttctcggccccctattctacttatgctgccttttttcctgaccaaacttttgttggtcgcagggtacggcaaaatgcctggatacgagcacgtgttcaccgacttcctgctgagccttgccaagaaagagtacaagagacgacaaagctatagctcgctaagctcaggcgaatggtgataagcgaggagactactcggcggggcatgtatatgtctatcatccacgatgcgtgcgtacagatgtacttgtgcatgacgagagataatgggtcgtagaagcggagggctgttgtcaggctataactaactgttgctttacatgtgctaactgttgatgcttcagaataaattttgtttgggtggatgatggctctgctgaaatcgagctacttgtagaacttatgactggaacctcgaaataaacggagaatttggattacgtaccgtactacttgc

SEQ ID NO: 27492 - DNA, 3367 bp, Zea Mays
cgccccggcgcctccccggaacgacctcccacgtggtgggccctcccccgcgttccacctgttttctccgttgacagcgcatcgagccttgcactgcccccactttccagtgtcacttgcgtaactcacctcgctgggtggggcccaccgggagccccgtgcgccgcgcgcgcgcgaggggtcaaactaccgccgcgttgtcgcgctcatcgtcgccgcgtgctgtggtctgctgctcctgctgctacccctcaatctccccgcaccgcacctcacctcccccagctcctcctcttcctctaattgctacacgctttcgaggctagggttgcctcgtcctcctcgctgtccacatggcgcgaatcctcatgcggctcctcctcctcgccgcggcggcggcggtggcggcgggggacggctgcctcaactccggctgcgtcgcgctgggctcctacctcgtcgcccggaaccagaacctcacctacatcgccagcctcttcggcatcggcgactaccacgcgctggcgcgctacaaccccggcaccacaaacctggactacatccaggccggccagagcgtcaacatctccttcacctgcggctgccacacgttccccaactcggacgccacctacctcggcggctccttcccgcacaaggttgtcaccggcgacacctacggcggcatcgcccagaactacaacaacctcacctccgccgcctggcttgccgtcaccaacccgtatcccacgaacaacatccccgacaccaacaccgtggtgaacgtcacggtcaactgcacctgcggggacccgaagatctcgtcggactacgggttcttcctcacctacccgctcatgggccagaccctcgccgccgtcgccgccaactacagcttcaactcgtcgtcgcagttggacctgctccgcaagtataaccccggcatggacaccgctacatccgggctcgttttcatccccgtcaaagatggcaatggaagttaccatcctttaaaaccaccagggcagattctgtccttttgcaagctaattatgcttccacattaagttttttgcaagaaaaactggacaccagctattcttgtgagataaaaagggtggcttgtttacactttgtcaatctcatcatcgattcgggccaggaaacggaggttctataggagctatagtaggaggagttgttggtggtgttgctattctggtcctgggcgtcttgttatatatcatgttctataggcgaaaaaaggcaaacaaggctgccttacttccatcttctgaagattctacccaacttgctactacatccatggataaatctgccttgtcaaccagtcaagctgatagtagctctggagttccaggaattactgttgataaatcagtagagttctcgtatgaagaactttttaatgccacagagggatttagcatgagtaacaaaatcgggcaaggtggttttggtgctgtctattatgctgagctcaggggcgagaaagctgccataaagaaaatggatatgcaggcttctcacgagttccttgctgagttaaaagttttgacacatgttcatcatttgaatctggtgcgcttgattggtttttgcaccgaaagttccttgtttcttgtctatgagttcatcgagaatgggaacttaagccagcatttgcgtggaactggttatgagcctctgtcttgggctgccagggttcagattgcactagattcagcaagaggtcttgagtacattcatgaacatactgtcccagtgtacatacatcgggacatcaaatcagcaaatatcttgatagacaagaactaccgtgcaaaggtcgcagattttggtttaacaaaacttacagaagttggtaatacatcactacccacacgtggaatcgtgggcacatttggttacatgcctcctgaatatgctcggtacggtgatgtttctccaaaggtcgatgtttatgcctttggcgttgtcctctacgaacttatttcggccaaagacgccattgtcagatcaaccgagtcttccagtgattcaaagggattggtttatctggtaatcaactcttttactttctgttcatggggaaaagaccagtggtctagttaagcacacgggtgctagttctggtattggtttggcttccattgtcatttctcttagatgctggagtttgtggccaatttatttgtgaaaaggggaaaaaaactttcaggtcttgtgcttcactaccatgagggtatttgttacttcccagtgtaaaatttgcataagtagtttaggtggtgtttgaatgcgctaaagctaatagttagccgctaaaattagctgaagactttcaaacagtctagctaatagttcagctattagctacttttagcaaattagctaatagttgctagctaattccactagtaatttttttgtcaactaactattaggtctagtgccttcaaacacccccttagtacatcctgttttgaataattgttttcacctgatcatcttttattctttctctcgtttgttgtcatatgtgttcgtgaatgattaggctgtagacaatggagcaaactcttttcttcttcttcttgccagcaatatttgtaacagtacggcttccaaagctatatatatagtagtacaggctttggatgctttcctgcttgatgactcaccagtcatgataccgcaaagtgcagtttgaggaggctctcaacacaccggatcccaaggaaggccttcaaagactgattgatccggcgctcggcgaggattaccccatcgactcgatcctcaagatgacggtcctggcaagggcgtgcacgcaggaagaccccaaggcaaggcccacgatgagatccatagtggtggcgctgatgacgctgtcgtcaaccagcgagttctgggacatgaacgcgatccaggagaaccaaggtgtcgtgaacctcatgtccgggagatgactcctgtccctgtgggctgtggtatatattattgtacgtcctacctgccttcccctgggcaattgtacattagggctcatttgtacggcccgttgacggccagagaggagggccactgtaggtatttacaatgtaatatcttgtcactcaagggttttctcccgtgtttaggctccctttggaacaaaaaggaaatttcctgaacctgtgttttttgctgtattttttaactaatttctatgaaattcttatagcattcatgtgaaattcctgcattctaaaggatcggaaggtcgttgagagccgcgtgtgagttactggggttatgtacaactctgaagatacttataaaagttattaatatttacttattt

SEQ ID NO: 27493 - DNA, 5976 bp, Zea Mays
aatcgccttcaatttcctactactagagagagacggcctcccttcctctcgcttcgcttacacttctcccctccccccaacccaaacccaacacaattcccccgtgttgcctacacgcactggccacgaccaaaccctaggcgccgccgcctccggggccctcagggctgtcatacggggaaggaggaggatatcggtgaggagagaaggggatttatgtcccagcgaggtgacaggggcgaggggcacgccaggagacccggccggtccagcagcttcggcggccaccgcggaggcggagtcggcggcgcgggcaagggcggcgcgggatcctcaggccagcctcctctttctaccaaccgcagctttaggaagcccggcaatggccacggcgggcagcagagggtggtgaaccagcccgacacaaccggtttccaacctgcccccgcgcctgccccccaccaaactcctgcgcgaccgccacctgcacctcagaatgcggctgtgcatgttcccatatccgcaccatggccgcaacctcaaggtccacaagtgtcatcttcatcagctgccagcgacaggccggctaatccgccattacctaaagctactcatgctgctccaagggctccaccaaaaagctctaacccaccccttcctcagggaggatcgaaaggggaaccaccaaaggggtttaactttcagtttggtagtataaatatgaatgggctgccgcaatttcctgccaggacaagctcagctcctccaaacttggatgaacaaaaacgtaatcaggtgcttgtggaggaacttaaggttacacctacccctgtgcaaccaactccaaaacagcagctgttgcagcagcatccgcatccgctgcagaagcaacagcatcagctgccgcagctgtcgcatcagccacagcagccacagcagcagtcaacaagaaaggaaactgttggttccagccaacctaactccatcaatccccatactacatcacaactgaaaagagatgtgcacccatctccgtcggtccccaatgttacatctgttagacctaccgttcaacaaatgcctggtgttcagatgccgatccccttccaccaccagccggcacaagtttccttgcagtttggtggccatggtgcacagctgcagccacaagttgtgcccagctcatttcaaatgtcaatgggattgacaggcagtagtacaccgcaagtcccacagcagctgtatgccccgactctgcagcatcatcaattgcaacagcaagcaatgatgcatcctggccagggtatgggttatgttccttcagttgctcaccaattcccacagttgggcagcattcctatgaacattgcatcgcaatatcctcagcaacagccaaacaaacctgctgctgcacgtaaggctattgtaaaaattactcatccagacacacatgaagagttgaagcttgataagaggatggactcttctgggcagagagctgcaccgagtattgcacaacaatctcagcctggtgttaattatgctcctcatttgggcttctttcatcagccaccgaattcctacaaccagtcaggaatgtattactctactacagctagtgtgaaccaggttgctactggatcatcgggtcctagatataattatcctgtcactcagtctgcgcaagcgatgacatatatcagtccatctgcagcgcctccggtatctggtcagtcacaatatacagttaagccgcaccctatggggttgctgtctgaaaaatcaggtactcatgtcacaataagtgctccaccagcaaaatctgatccacctaagttacatgctgctggggatgctgcgtcaagtctgaaaaaggataatgaagttgtttctgggatcactgttttaaataaaccaacccttgagagggagagtaacgatcctttagtcacagtgaagcattccactgtgataagcccgtccttgccaattcatggtgaaaaaccacaaactttggtgacatcgtcgcctgttgctaattcagtctcacctgtgactggagctgatgggaaaagcaaagaacccattcaaaggtctggatcatttaaagatagtaagaaaaatgtcactaaaaaggatgtcaggaattcatatgaaccaccaaatccaacttcatttgttgaggataaggttcaaactgtaaaggttggagatggcgatctccaggaaactaaaaagctgaacaatgagttggatttgaccaactcatcttcagctccaacggttccactggcagttagtacagagaatgccgacagcacagcagtaaccaatacaagctcaagaagaccatcttctgagggtactggtgagcctggagtggaaagcttcactgtttccgctgttgaatgtgacgaaagcaagaggactcacaaagttgtgaaagatcctagcaaggataatatttcttctgatgctaccaaacatgaattgcctaaggaatgtgcagtggactctactgaacaagcatcagcagtgacttctaacactgatgattcatatgcagcacctctagtaactaatcaggagcagttgctgaaagggtctgcttctgagaaacaagctgtgatgaataactcatccatgaattccgatacttcagcacatttttttgatggcaatgatgtgggcgtgacaacttctggaacttcagagcctactgctcaaacttccaatgatgaaggtgactcagatattagtccagaaacagacctagctgtttataatgtccctctaggttcatctgagctacaactgaaatctgagagtagggcaaatgatcaacagcctgctgcaccaacagtatcagttcgaccggtatccagggaaaagcctagtacaaagtccacagctgggaagaagaagaagaaaaaggaaatgcttgctaaggctgatgctgctgggtcttcagatctttataatgcatacaaaggaccagaagagaagtctgaagttgttggtaccgtggagggtgctgataattcttcaacagttgatacaactcatgtactgtctgacgaattagaaaaggatcctagtacatctgcagatgattgtaagaaaaaagttgagcttgatgattgggaagatgctgcagacatgtctactccaaagcagccatcagattctgggaaccaggctagcatcacccaagtgttggattcagacgtaactgaagcaaacagcaggaagaaatactcacgggattttctgttaactttgcaacatcactataccggtcttccttttggatttcagatgaatgaagctgtcaatgctataatgaataatttggcaggaaagtcttatgttgctgaccgggaacctcaccctagtcctggaaggggtttggaccgcccaacttctcgtgaccgccgtggtgctgccatggctgacgacaggtggactagggcgggtgttcctctcagtcctggtcgtgatgttcacatggacctgccaaatggaccatcagttatcaactaccgtggcggcccaggaggtaatcatggtgttttaaggaatccacgcagtcaatcatcaaatcagtatggcggtgggcttcttgcaggacccatgcagtccgttggaccgcaggtacctcgcagcggctctgatgctgatagatggcagcaaaagggtctcatgccttctcctggcacacctgtacaagcaatgcacaaagcagagaggaagtatgttattgggaaagtttctgatgaggaagaggcgaaacagaggcagttgaaagctattcttaacaagctgactccacagaacttcgaaaaactttttgaacaagttaaggaagtcaacattgacagtgtagcaacacttactggggtcatttcacagatatttgacaaagctttgatggaaccaactttctgtgaaatgtatgctaatttttgcttccatctggctggtgccttgcctgacttcagtgaagacaatgaaaaaatcacattcaaaagattacttttgaataaatgccaagaggagtttgagaggggtgaaagagaagaagctgaagctgataaaacagaagaggaaggcgagattaaacagaccaaagaagaaagggaggaaaagaggatccgtgctcgaaggcgcatgctgggaaacattaggttaattggagagttgtacaaaaagaggatgttgacggaaaggattatgcatgaatgcattaaaaaattgtttggaaatcatgatgatcctgatgaggagaacattgaagcattatgcaaattgatgagtacaattggtgatatgattgatcatgtaaaggcaaaggagcacatggatgcctattttagtatgatgcagataatgtcaacaaatcagaagttgtcttctcgtgtaaggtttatgttgagagattcaatcgacctcaggagaaataaatggcagcaaaggcgtaaagtcgaaggtcccaagaagattgaggaggttcacagagatgcagcacaagaaagacatgcccagtcgagtaggttgggacgtggtccagctgttagttctgttccaagaagagcacatcctatggattatggccctcgtggaccatctgcatcagcatcctcaagttcccaacaagggagcattcgaggaatgcctccacattcgcgtggttcacaagacatccgacatgacgaaaggcaccagtttgacaatagaactgttcttccgcagcgggtagtcaaagatgaagccatcactcttgggccacaaggtggccttgctaggggtatgtctataagagggcagccaccagtatcaaatactgaaattccttctgttattgaccaccggaggatagtatctagttctaatggctataactctgcggctgattggacatcatcatctggaagagaagattctaattcaagacttccagatcgaacctctggccgaattcctgcttctagtcaatctgctgtaacttcgcagaggcctgccagccaggaaggccgttcaagaagtaaatcatattctgaggatgagttgagagaaaaatctgttttgaccattcgagaatattacagtgcaaaagatgaaaaggaggttgttttgtgtattgaggagctgaatgctccaaatttctatccatttcttgtgtcactttgggtaaatgattcctttgagagaaaagacatggaaagagagttgttggctaaacttctcgtcagcctttgcagtggtcgacataatttgttgagcaagcaacaactcagtgatggcctttcaaatgttcttgcctcattagaagataatctaagtgatgctccaagagccaccgagtaccttggacgacttcttgcaaggtttgtggaggaaagcatattgctcttgcaagaggtaggtaaattgattcaagaaagtggagaagaaccagggtacctaatacaaggcggtattgcggctgacatcctaggtgcagtcctggattccataaaatcagacaaagggaattcattcttggatgagatcaagacaacttcaagtttaaagttggttgatttcagaccacaacatcttaagcgatcaaagttggacgccttcatgtaggcacataagttattgttacctgattaccaatgggtgcggtcaccaagcagtttagtttcttcgcacctaaatacccaacggcctttttgatgtactgtaaaacctctctgctcctacttgctgtccctgaccgtacactatttataagatggaaggcgatcggccacctatgtagcacggacggatacaccaattaggtgcggacgtgcggtatcctgtatcggatacctaacagatagggataccccatgatacgtgcgaatacatcgagtatctgagtaaaaataaatatttacaaattcgatatttagagtaaatacgtatagtcttgcgcaatactcccca

SEQ ID NO: 27494 - DNA, 2087 bp, Zea Mays
aggtctagagaggtccaggccttcgcccgagccccgccagccactaccaacttgggacgggcaggccggcccgtgttacatacaggcccaggcccagaagccgtcagaagacatccagccctaggctaggcgcacggcggcacgggaggcagacgaggcgagaagtggcaactggcaactggtacctttggggaggcgaggaaggacacgagatccctctctccgaaccccgccgcccgccgcagatccgaaggtcattggcagccatgatctcgtccagcaagctcaagtccgtcgacttctacaggaaaatacctagggatttgaccgaggcatcactatctggcgctggattatccattgtagcagcattagcaatggtttttttgtttggaatggagttgagcagttacttagcagtcaatactaccacatctgtgatcgttgataggagttcagatggggagtttttacggatagatttcaatatgagctttcctgcgctttcatgtgaatttgcatcagttgatgttagtgacgtgctgggaacaaacagattgaacataacgaaaactgttcgaaagtattcaattgatcggaatttagtaccaactggatcagaattccaccctggccctatccccattctcaataagcatggagatgatgttgaagaggatcacgtggatggtgcattttcattgtcatctcgcaattttgatagcttttcacaccaatatcctgttttggttgtcaacttctatgctccctggtgttactggagcaatcgactgaaaccttcatgggagaagacagcaaaaataatgagggagagatatgaccctgaaatggatggtagaatccttctaggcaaggttgactgcactgaggaagttgaattgtgtaggagaaaccacatacaaggatacccatccattcgtgttttccgtaaagggtctgatataaaggagaatcagggtcaccatgatcatgaatcatactatggtgaacgtgatactgagagtttagtcgcggcaatggaaacatatgttgcaaacatcccaaaagaggctcatgctttggaagacaaatccaataagactgttgatcctgcaaagcgccctgctccaatggccagtgggtgcagaatagaaggctttgtgcgtgtcaaaagggttccagggagtgttgttatctcagctcgatctggatctcactcgtttgatccatcccagataaatgtttcgcactatgtgacacagttctcatttggcaaaagactttccccaaggatgctgcatgaattcataagacttactccctatcttcgtggataccatgatagactagctggccagtcttatactgttaagcatggtgaggttaacgccaatgttactattgagcactacctacaagttgtaaagactgagcttgtaacacagaggtcctcaaaggaactgaaagtgcttgaggaatacgaatacacagcacacagcagcttggtgcacagcttctatgttcctgttgtgaaattccattttgagccttctcccatgcaggttcacatttaaaggtcttggtaactgaagtcccgaaatccttctcccatttcatcacaaatgtctgcgctatcatcggtggggtcttcacggttgctggaatactggattccatctttcacaacacactcaggatggtgaagaagattgagctaggaaagaacatttaaatttcgacgccgctgcaagtttaggcggatgcactaggtagccattgttttgttataactaggtaatgactcatgaaaatcggtatatgaaagatggcgtgctgaattgacggttgaaattcggggggtcatgaaatcatcatataataactagggatctcactgtttcgctaaaccactcacaataagacagtggattgctgctagtgtgccactgtgataagtaaccgagttggataatatattcagtatattatcttgccgtgcttgaattgcgcgtagttcgggttacacagcgtcacctcgatggccacctcagctccggtgggaggacgacggaggtggatagcctccg

SEQ ID NO: 27495 - DNA, 3732 bp, Zea Mays
ccctccccacatttcgttgtgtaccgcaaacagcagagagaaaacggaatcccagatccacccctccccatctccatccgcggccatggcctccgccgacgccggcacttgcccgtgggatgccctcccgttgcacctccaggagcgaatcctctccctcctccccatcaccgaactacttcccgttgccgccgtgtcccgcgccttccaccgccttctgcgctccccgaccttccatgccctcctctccccgcatcgcctcgacgccttcttcctcctttccccacggctcgccgtccacccgctgtcccgccgcgtccgcactatgcccgcgttcgccgcgctctctcctccttcctacccgctcgtctcctccccgtccccatcactccttatcacctgcgcctcactccagttcctcccgccgatccccgacggagcctacctcctatccgctatcgtcccatcgcgcggctcctccacctcctgcacccttgtcgccgtcatcaccggcgcagccgcgcgttcttacaccctggacaccggcgatccctccccgcagtgggcgtctagaggcgatctcccgctgtctctcacgctcctggaaaacgccgcggtctccggtgaccgcagcaaactcttcgtcctcggccgtggccccgaggcgctcttggtttttcatctcgtgacggggacatgggaggtgctgcatgttgtgatgccacaaggtctcactacggcgcacctgtttctttttgatgggagcctattcttagtaggtggtattgagagctttggagtagtggatcgggtggtggtctggcggttggacgacgataaggtggaggaggtgtggtggagggaggtgagcgtgatgccgacggaggttttcgatgagttgctagctggtaggtttggcagattctggcattttcaggctgcagacagattggggattgtttgcttgtacaatgctgtggatcggaggctggtcatgtttgatgcggctgatggcatgtggacagtgctgccacgattgtccgcgttggatgcatgcgagagcttcaggtggtttggacatgtcttggagccaggagttgaaatcttgatgggactacgttgacatcccgatgaagatttcatgctaacatcattaaattcataaagctagagttactagaagagctgtatgcaaatccctgatttattcacggagtgaaattcttattgtcctttcctttgagagagaagaattttcatggttagaatgtgtaacttatctatcaattgtcatatctctcttttatttttttaactacgatgtacccaactttgatctgtagtagctcctctgttgggacatagataaaaatcaaatatattgataaaaccatgttaaatttattgtcctacatgcaatattcaacttgttagctgataaaacaagattgtcctggttccgcaacttcgttctgtgagaactatttgtacatataggtattagttttatagtaataaacataattgtcggtgtacgaaacccgggtccctagggccacaagtcagtagaggattgatgccaggttcatccaccacgagttaaataaagctccaccccgcgggacaatccctcgaagttgggcaaggcggaaacttgcggaggggggtcaggcgaaccagcgaaaacccactcgagtggatttcacgtatctgaactgaccacaccgacaactttacgtacgtctcattaactacgccagccggcggagcgcgatgcaggtagtgttggtctttccccaccactcatgacctacaagacctaggcctgagttcctagaaggtctacgaccccgtaggagataagggaccggcggataggctacaaaggagggtcggcgtagggagagatgtggacaaaatccagtaatgatggcactctgacttttgtcgccaacacggatcgcaccctactcaggaaatctcggagatatgccagaagacctatgggaaagggcactgacacacgacaagatttaccgagggtgaatcccttttttacctcacattacgctcccttctgggagaaggcattgtgagaaggtatgtcccagtttccaatacccatatatgttggaaacaatgtagactagtttcatctctatttaactcattttaccctatgaaactttgatcatctctctcttcattgatattgtgccatgtccggatatttggtagttttgtagcttattcaatgctcatgaaacttatgaaacctccactaagactggcccgagaaacacaaactttgaccaagataggtggtgacctctgctatcattaagagaaaggtttcccttgtatccaagtggctttgaataaagagaaaatttgaacaagtaatcccatgcaagtgttacatcataaaaaaatacattatctttactttagctggggaaatgagcagcaaggatgttcgtttccaggtagaaagctgtgtgtgagcctgtgacatgttatgagatttaaacaatatgagtttttgttactgtttattgtccgcatctcatttgggagttttataaggcatgattggttgtccgctcgcgttcatccacgctctccgcatgcgttgaccaagtgacggacaatgtttggtttcctgtatacatgaggtcagagactgcacccgtaactgcagcgtaaactagaaataactcttctaactgtatgcacagatacgcacagaaatcccgttttccggcgggccaagcgcacatgagccacactacgcttatccagctagccaatcaggcgcatagtgatggcctcgggacactatagaatatatggcgaacacttaccatcattttttgtactgaaaacgagccatacattcttctgacatgttcagaaatgcatttgtattgcttattcttcaaactgctaaaccaggagttagtttaagggaaatgtcacaggcactgcatccactaggcacagtgtatcaatttggttattgatatgctcgtgatttcagctggccattaaggtagatatgtggacatgtatatagtagattggtgtagctgttttagcttttttttttgttagtggcaaatcgatggatcaagtaaagttcacttcatatggaccaagttgtgaatattttctattgttctcttctcttttcttttctttattttttgcttagtctagttctacaaaaaaaattcatcatacagattttgttattggcttggtctattcggcagaaaaagaaggaaaaaaaactggtggagcaaggaagtctcataatccgaaagataacaagtgatatctacaacaaagctcatggatggaagccggtcgatagacgcattcagtgatattttggctgttgttctgtctttttgggttcatctgttttgttagatgtaatctggctggctctttagtttggtaaaatcttagctaagttcgtcgctgaagttgtcagaaccaggctgcctttggttgggttgttttggtcccttcggttgaacatcagttttcaggcggtctgaaaacatttcctgctatggaaatgttcctctattttagctgatagttgcgtatgtcttgtcggcttgtagttgatgttggcttgtatggttgtgtaagaactttgtccttgtctatttcctaatgaaataggggtgctctcctgtgtcaaaaaaaacagattttgtt

SEQ ID NO: 27496 - DNA, 2138 bp, Zea Mays
ctgcacggcgaacgcgagtctcctaaacgataccgggcgggcaggcacacgagcgcgagcacgcacgagttcgcgagtccccctgacccccacgtgcgcgtcgttggaaccaaggattggattagcctcgccgacgacgaggagagaagagctggtggctggcgaggggctcgcggggatggggatctcgaggcccctggcgctccttctggcgctgctgatcgccgtcgccggcgcgaccgccgaggagcccgtagtggcggcggactcggtggccggcgcggtggaggccgcggcggcgctcagggtggaggaggctgcggaggccgcggcgctcagggccgagctggagcagctccgggcgaagatctccgccttagagtcagacatagcagtgcgatctctcgaactgaagaataaggacgatgtcatcgtgaacctagagaaagccattgcggagaagtcaaaggctattacctctatgcagggcgagattgcttctctccaggcaaaaggatctctagctgccgaggagcaggctaacaaggccaatgccaaggctgttgaacttgagaagcagattgacaagctcaaaaaggatattcaagcacaaagtagtcagaaagcagcactagaatctagggccaacgatgcagagaacaaggtggaaaagttgaatgaaaagcttaatacaatgcaaaaggaaagtgatgagcaaaaacgcaaaatcaagaagacagaacgtgctcttaaagtcgctgaggtttgcaataagtttgttttactattaatgcacttgtgtcctggttgttgtgtggtatatatactattacatatttgttctttcgcattgtaggaggaattgatgaggttgcagttagaagcaactgctaaatcaaaacagctgactgaggttcatggagcatggttaccaccttggttagcgacacactatgctcgttacatggaggttgtctcaggtcactggaattatcatggaaaacctgctgtgcagaatgttttgcataaggcatcagaaaaatcagcacatgcaaagaaatgggctgaaccacatattgagactgctaagatgaaatggattcctgttaaggagaaattggttgtcctcaagaaaaatgcagaaccttatgtacagaaggtatcgacaagatcagtggagttttatgagtcatcaagggatgctgtgacacctcacgttgtcaaagttaaagagtttgctcatccctactaccaggaagccaagaagttttctaagccttacattgatcaaattgctgagatcactaagccacatgttgagaaagttagaactactctgaagccatacactaagagagcagttcatgcgtatgggtcatttcttgggtctgcaaccacataccatcgacaggctcaggcgaccatcatggactacctccatcagcatggggtacccaagtcatttgcaacgaaggagttagtttggttcctggcttctgccttgctagctctgcctgtcttcgtcatatacaggcttgtagtagagaccttctgaaggcctcgtggcggtaatggtaacggtaaccatggccagaagagacacaagcggcgatacgccgacaagtagaccaatctacccaacactttagggttcagcatgttgtgtttgcattgtcgcgcatctttgagcaatgagcaagattgggttgctcctccctcccggaggcactgttgaaccatacatggaggaaggagactcgggtcatgggcaccctttaccgtgagaagcgttgtagcctacaccaccaatatttctctttcttttacttcttcccaggtgtactatggacttcggtgcaggtgcagcggaccttttatattatctgcactttgctggggttcagggggttaggcctttgttttattggtcgttgtttattgtaacttgtgaattcgtttgagttcgtctgtttgtttttttggctggcgacctacattcgaacttgttagttgaagtttaactcaagttgctggagtgtcatgaacaggagaagagtgtctaactgacattgatgtaagcgaggagggcactaggaactttgtggtagctaaaccaccaaattaatatcaaataaaac

SEQ ID NO: 27497 - DNA, 2415 bp, Zea Mays
ccatcacacactacgcacggacgacatcgaggaaccctagactagagcacattgcacgggcgacggcgcgccaccggtgactggcgtcccctcctcggtcctcactccccagcatggcgacgccctgccgcagcaggggcttcgagcgtgtggagctgcggtgtcccagggagctggacccacggccgagctggacgctcggcgatgtgctcgctgagcttgacgcgctggatgccacccgccgcgctgcgccacccacgcccctgaagcagccgccggattgggctaacggtggtggtgagaaggcctttgtgatgcgggttgatgacgacgacgaagacgacacagaagatgaagacgatggtacaagtggtgggaagtcccgggctctggtggccaaaggagcaaggttctcgtgtaatgatcttgcatcaagtgattcagaggatgaattagatggtcaggttgccccataccacttaatggagaaaagggacctagcgaagagcattcttcttgagctggaacacgagcatcatctaaaagttcaagaagaagttagaagtaagctagcttcattggaggtatgccaccaaaatgaaattcggagaacgatctctgcatttgcccgacttcagaaatatgcagaatcaagaaaggagatagacagaagacttgatgtacacttccagagaagaattgcagaagtactcgataaacacttatctatggtccaaagggatcatgaacaaaaatcccagattgttgaacgccgaataagagatgatgcagctcttgaagaagctaaaagaaaagagcaagctgtcaaggaagaaaagttaaggcaggaaagagcccagcaagaagcagaggctagacagaaggaagctgcaaaattagcagctgaagcacgaaaaacagcatttgaggctgctaaaaaggaagcagcagaaaaggaagcagcagaaaaggaggctgctaaattgagagatgcagcagcttctcaacctagtccgaattcccagaataatactgcagaaggcattaaagtttttggcgataaatacgcactagaagcagagtcacggaggcatgcattagtacagaatcaagtgccagaaaacattcatcacagcaaggaattcagcaaatatgaccgacaaattgccaaatccataagtaaacttatgccaactactgacagtgtcagaacaagggctagtgagcttgttaaagctttaaatggacaggattgtccccgtccaatctcttgttgtctatttgctaacaagattatttccattgtcaagagtagaaatacaaaggacaagacctttggaaatttggcctttgcgtgtggatatgtcatgctattagttacaaatcaggtaccagacgcaatggattatcttttagctgagttcaacagagtttgcatatacacggttccaaagcatatgcatgctttgaatgcacaagcacgaaatagagattattacagactgataggttaccaggaagaaaatggacagctcgagagcactgaaagttatctaacatacgtcgttgcatatgttaaactctacgcagcaatgattcagacggaaatcaaaggtgttcgtcatcctcatggtttagctgagggatggaagtggcttgccatgttcctcaattctctcccagctactacagccactgcatgtgcccttcacgctttcctcaagatggctggttttgcacttcacaagaaatatgggtcacagttcatgaaaatcctggatgtaatatcacggtgctttttaccagctttgaaggaacaaggcaacaagatgcaggctgaggctgtcaacaatctacagaattacctgaacgacaagatctacctggaggaaccagaagggcagtacctcgtccagcaactactatccaaggagttgttcatgtaaagatcaaaacaccagatcggtatgagacatcgtgtgtgatcgtctgaagggcggtacctcgtccaagctaccactatcgcaagaggggcctcatgtagagatgaaagcaccagatcgatatggagctgttcgtgtttcagaaacacgatcgagcctttcaaatctcacgaacattatttatgggacagtcccccagatcatttcccccctctgcacgggatcctgacgatgtatttgtttatgtgacttgtatccggccaaggacaggtatgataggttgaggttttatgtttgttgtagttgtacatgtactactagaatcgtgaccagaacaaaataatactcgaccacttcggcgtgggcccagcggtggccaaagtcaaggtcaacttgacacgcgacactttgtctactctgtttgcaatgaaatctaatgtttgtgcttcaaacaaaatagttttaatataaa

SEQ ID NO: 27498 - DNA, 4312 bp, Zea Mays
ccagacgcatcccaaagacccaaacccaagcgccgccactgccagccatgtcgtctcgcttccaccacggcggcggcgacgaccaccgcgtgggcgacgcgggcgacgccgccctcgcccgcgacatcgtcacgctccacaaggcgctctccctcgacccttccacccaccgccgccgcaccctaccactcccctccccatcccccgtcgtcactgagcagccgcgtaacaagccccgtctcaagccctcctcctcctcgtcgtcgtcgcgtaagctcctgccgtccacccctaactcctcctccgcttccacttcctcgtcctcgtcttccttctggaagaagtccctgactgccatttcgcacctgggccgccgccgcctcgacttcgcgttcgcgctgcatgtgcactccgtcaacggcctccccgctgcgctcgatgggtctgcggtctccgtacgcttccgccgaatgtccgtgtccgcctccacccgccccgtcgtggcggccctcggcgccgccgcgttcgaggaggcgctcacgctgcggtccccggtctacttctcccgcggcgcaaaggccgtggtcaagtacgagccccgttcctttgttgtctccgtcgccgcctccactctcgagcttggtaagcacgaggtcgacctcacccgcttgctcccgctctcgttcgacgatctcgaggacggcggcgactccggcttcgggaagtggagcagcagcttccggctgtccggccccgcccgcggcgcgcggcttaacgtaaccttctcttgctcgctcctcgcgggtggcgtcggcagcgagcagcacaaggccgtggaagtggcgggggtgcggcgcggatcgatggcgcggccggtgtcagtgcaggcaccaacgcctgtgcccgcgcggagcagggacgtgagggtgctgcacgaggtgctgcccagcttgaggtctgccaggtcgctgccttttgttggtgatgggggtcttgatgcgaggaaggaggaggtggcagcactggactgcatggaggacgggtctccggaggcaaagcactgcacatcagtagaggttaagaagggggacttggtgcgcccagatggggattgcagcacgatggagttcaatgttgttgggcatggagttgaggttgcttcatatgacccacaaaggctcaaacatgtggaaaccagcaatgaggctgatcaaaatgaggatccagggttcaaaattgacgaagaggtatcattcaagcctgtgctagtatgtggtgatgtcgctgaggatcagactgttggagtgaagactgaggtggcagtctgtgatgttgctgttcaaagggagaatgtggaagacaaacatgatggaataatcaaagccaattcactgcctacctctgctctcgaagcagaggatcagttgggagcagatgtagaactggaggacctggaatgtattttgaacgagctcttagttgctaagccggaggaatttgaatcaccagtagtagaagataagtattctaggcgattgagttgcacagctgatagttacaagtctgacagtaggaagggcagatcacgcagcatggatatttcaacagattctgttgctaatgagttcttggatatgcttgcaatagagcatatcccatttgggcaaccctcagatagtgatcccgagtcaccgagggaacgactttggaagcagtttgaaaaggaagcactagcatctgacaaagctattcttggtttggactttgatgatggaattgaaggacctatttgtgagaatgttgtggaggatttcgatctctctgcaatgatacatgaggctgagctcgagcttcagaatggaagtcaacccattgataccaaatttcgagctaagtcgctggaagacgaagaaactgaggccttaatgcgtcaatttgggctaaatgagaagtccttccaatcttctcctcctgaaagtagaagtgggtttggtagccccattaacctcccacctgagcaacccctggagctaccaccattggctgaaggtttaggtccatttattcagaccaaagatggaggatttctgcgatcaatgaacccagccctgttcaaaaatgcacaaaacagctgcagcttggttatgcaggcttcttccccgattgtactgccggcagagatgggatctgggattatggatatattgcatggtctggcatcagttggaattgagaagttatcaatgcaggcaaacaaacttatgcccctagaagatgttaatggtaaaatgatgcagcagattgcctgggaggctgctccagctctggagtctgctgaaagatatgacccgttggactatcatagcgttgatgctttggtaggagggggtggaaatgctccctccagtaagaagaagaaatgtaggtgtgctgatctttcatcatccttgggtggggagaatgcttcagaatatgtttcacttgaggaccttgcaccattagctatggaaaagattgaagccctttccattgagggtttgaggatacaatctggcatgtcagaagaagaggcaccctccaatatcagtgcaaagcctattggggaattttcatctctgcaaggaaagtgtgcagagaatacctggtcccttggtttagagggaactgcagggttgcagcttctggatgttaagcagagtggagaagaagttgatggattaatgggcttatccatcactctagatgagtggatgaggcttgattctggggtggtggacgaagaagagcaatacagtgaccggacatcaaagatacttgctgctcaccatgcaaaatccatggagttagctgctgagaatcggaatggggacagaaagaacaggagatctggtagaagatggggcctgttaggaaataactttacagttgctctcatggttcaactccgtgacccactgcgcaactacgagccagtgggcacaccaatgcttgcattaattcaagttgaaagggtttttgtacccccaaagcccaaaatctacagtactgtctcagacaaaggcaacagcgagcaggatgatgaggaacccaagaccgaaaaggttccagataaggcattggtcacggaagagaaggctgaggaattagaggatcccattccccaattcaaggttacagaagtgcatgtcgctggtttcaagagcgaacctgagaagaagaaaccatggggcaatcaaacgcagcagcagtctggctctagatggttgcttgcagctggaatgggcaagggaaacaagcatcctctgatgaaatccaaagctatagtgaagccaaccaaagaggcagctggtcaggcaggagacatcctctggagcatttcttcacgtgttcatggagccgggaccaggtggggcgagctaacaggaagcaagagtcattcacggaacccaaatatcatgcttcaaaaggacaagagatttcggtgatggcttggtggtcagtagttagcgctgggaaggacggacggttggtctatctcattagaaaggggacgtagcaattggaatgtccttggtggattgtgaaaccatgtacattgagttctcttgcataggatcagtactttttatatgctgcacagttcgtgatcggtgttccttccgaactctcgtgagaaccgtgcatagaaactgttgtttcttttgccacatttaagagcagcttctgcctctgaagatttgcagcgctgggcagaggtcagtgcggcagcgttgacgccccgtggctgtgatgattctatctacgagggtccccatgatccataaaaagcttcgttggttggacgcaagctttgtctaaggaatttgcgggtcgtgtctcgatcgacagctcatcaaaccatcattcggcacagggacaaaagaaaaaatggatggaatctgttctcgtgatagcctcccccgtctcgttctacacttctactcatgcatgccatttcgtccggctttgtcgcaagcccagctgccgagatcaaactagggctggaaacgagtcgagctcggctcggtgtggctcggtgcctgaatgagctcggctcggctcgtccattccacgagccggtgaaagaggctcggctcgcgagccatattttggtgcttttcgttgcattatttggtgaattaacattatataaatttgaaatatagaatcaccattctacattatgagtaaattaaattataacttgtaatatattcatcatcaaagactaaaaaatgagctattatccataaaattatctaatattcattat

SEQ ID NO: 27499 - DNA, 321 bp, Zea Mays
cggccctctctagtctcaacgtttcattccttgagctttgcgatgacatgggagcagcgttagggcgcaggacgtagacgacgacgtacggtcaccggccggcatccatggacgattcaagctcacagccagccacaatagtgagcggaggagaagagagaaaccaaaggagggaggaggacgacgacgaggagacggcggcggcggaggcagaggccggcaacggcagccagctgatggtggtgcccgaggacgggtacgagtggaagaagtacggccagaagttcatcaagaacatccagaaaatcagagagcaaggcg

SEQ ID NO: 27500 - DNA, 1440 bp, Zea Mays
ccccactccaactccaagcatgcagccccgctcggcttccgttgccaggctgccacgccgtcgccgtctcgccgcctaaaacctccctcccccccctcgcaccactccgctcacctctcttcacgccgccgtagccggcgagtagcagcgggtacgtgcctttgcggtgtaccttattggctgagccttccctttgccgaggaagagcacagaagcagggaggtcggcatggcggaggtgcatctaggtctgccaggtccctgggcggcggattacagggagatggccgaccactacaccactaagatcggtggagtccctgattggccaactggtgatatgggcttcaagcccgagactcttcagtgcagcttatgtgggaccaagctttgtcttgttgctcaggtacatgcgcctgtggcaaagctaaacattgaggagaggataatctatgtgcttgtttgcccgacaccagaatgtggacctaaacctcaaagttggaaggttctaagagttcaaaaatgccataatgttatgcaaacagaaggtggtggtgatgaattaggtcaaccgaatggaccttcttctacaagtcttccagaagaacagaatgataaaaataaaattcctgagacaaatgatgacgattttgatctagatgccttagccgaagcacttgaacaagctgcaactttggcatcaaactcaaagaagaagaacaaatcgaagcatgctaatgctcctgtaaaacgtcctgtattgaaggagcaagcatgtgatctgagcatacctgtccttccttgtttttacatacattataataaggaactatatgggggcaaaggcgctgtgggttcaagtagcagtgagttggttttggacaaagaaatcatggatgccgcaaatgacgaagaagaaaaatgggaaggagaaaagtatgagtacgatagagctattggtgctgacagaacttttttaaaattcaagaaacggctggatgcatatccccagcaatgctttaggtattcttatggtggcaagccactgttggctacaacaaaattacaagatcctggcacctgtaggctgtgtggttcaccacgccagtatgaactgcaattgatgtctcctttatcatactttctccatgaagctggagacggttcctcaaattatgcacccagcagctggacttggctgactgttataatatacacctgccccaagagctgctgcccgtcctcatgcggtggaaagccccagagctgttgttggggagcagcggaggaggagatcctgattcaggaggatgaagtcctttaggatctaaccagtgctggttgagaaactattcccgatttgaacatgtgcctggattgtcaactccaatcaagggtggccatgttacgcttgagcatcaagggatatgatccgatgcag

SEQ ID NO: 27501 - DNA, 1432 bp, Zea Mays
cgccaggtgtctaggtcgctgccgccctacgcctacggcaggtgccaggtgcccagctcttgttcggcccgtacgccggcgaggagcaccaccagggatactaaatatgcagaaagatgctcgtcgaaattcttggaaaataattaatgacaatattagattgcataaagaactggaaaccaagaaaaaaagaaattggcaggagacacgaggaacttgagaagttggttatgaacagtactaacagagaaaagcttgaagcggcaaaagaagagattgcaaaggagaacaggcttctcgatttagcaaccctaaagaagaaggaagaagatgagaagttcttaaaacttgtaaaggaacaagagcaagagaaagaaaatgtcaggaagatgctatatgatttagaaatgcagttggcttccaaacaaaaacttgaactggaaagagaacagttgagggggaatcttgaggtatggaagcatatgggaaaggaagatgcaaaatcgaaggaaatgctcgataagttgcatgaagcactgaaagagaaagatgaagaaatggatcatattgattctataaaccagacccttattattaagcaacgaagaaccaatgatgagctggaagaagccaagaaagaactgactactgacctacttaatatgtcatcagctcgatccattgttggtgtcaaaaaaatgggtgagcttgacaagaaagctttcattgtctcttgcaaagagaaaacagcagacgagttgtcattgtcaattctgtgctcgaaatgggaagatgagatcaggcaaccagaatggcatcctttcaaagttatagatgttggtggacaggcaaaggaaataattcgggaggatgatgagaagctgcaagctttgaaggctgaactgggtgtgcaggcgcacgatgtggtcgtcaaggcccttcttgagatgaacgagtacaatccaagcggcaggtaccccataccggagctgtggaacttcaaggaggaccggagagcaccgatgggcgaggcagtagcctacatagtgaagcagtggaaggcgaacaagaggaagcattaggcgggcctgatgcctgatggcccttgtgccattggttcctgggtcgatgtccctgacagtgagagctgagaccctgatcccctgactttttctgctgatggaagacctagtaccagtagcactactaaaaaaattgtccgatctcttggacggttagattggctatggcacctagtgcaatgatctatatgtataaaaaatatctgtagtgtttaatgattttaccagaactagataaagattatagaatatttattattatacctgttgtgttggaaagtgaacgtggagagagagcgttacggcttccggagagatcagcgtagtttctgtgcgcgtctcgaattccg

SEQ ID NO: 27502 - DNA, 1504 bp, Zea Mays
aaaaaaactatacaactgaaaacagttcaaaaccctcggccgaatagtaaggcaaagccgcaaaggcttatccttccgagtttccaccctttacaatggcgagcgctcccgccggctttgcccccaccgtcgctgcttccacaagcttcggcttcagccgcttcactatcgtggcatgccccttcccctcgcgcactcatcttccagcggcctcctccgttggggttcgcaatcagcagcgcgcgtccactgccaccgcctgcctgccgccgccgaatacctcccatggcgccgccaccaggctgtacgtcagcggtctttcgttccgcacaaccgaacggagcctccgggacgcgttcgagaagtttggtgaccttacggaagtttgtctcgtgatggatagagtagcgaagcgaccgagaggtttcgctttcctttcttacaccggggaggaggaagccaggggcgccatggaagggatgcacgggaagttcctggatggcagagtgatctttgtcgaggttgcgaaacgaagagctgaagcctgaaggatcgcgcccaaatattgctaaaaaaaaacttgattgttggttccagcaaagtccctgatgagacacacattgatgcaggcaaggtttaggtgaagtttagatgtgaacagaggaaccgaagaaaccttagggcttgtttgggtaaccttggattagaatggattgagggggtataaggtgtattgaagtgtaatatgaactaatttctctttcaatccctaaaatacacttcaatccacttcaatccctctttatccaaacaaggccttagcaacattcggtcgtgtagctgttgtcatttcattgttttacaaaacaacattcgtaatttacatatataggtcatacaatatggtctcctactacaactattacactgcttgctgcattgtcttgaactatacaaatgacagacaggaaccacagccagtcagtcacctccatcccttttgtggaaggctgcttcaccagtgtcaatctgcctctcataagtaacagcagaacgcctgaatggccgtcctgcaaaacatcagcactgctgtactgtacagtcatacgtcttcaatatcagcaaaaaaatatatatatccagagcagcggtggctggcgagggcgcaaaaattttacaggcacagccttgtcatctctctatctgcctccccaggtgcctctgactgcagcagcatcttgctctgaggcgtgcgcttgcacggtgcaaaacctcgaaggcagtctggaactacgctcgcgcatttccttgaacctggaacaggtgccactttgtctccgtcgttgtttactttcgtggattctacagaatctgaattctgagctgtttcaaccacgctgctggaggaggttgtgacggacggctccgtccacgatccttgtgccctcgtgacctcgcagtctgctgcggcttgagacggttggttgtcctgctgcttgtttga

SEQ ID NO: 27503 - DNA, 1719 bp, Zea Mays
gacttgagttcaccggtactatttatgtaccgtacataaagtaaagtttaacgaaaagaaaagcacgggagacgggacgggaccgctgggcgcgccgggccgcgccgagccgagcgagtcgtccactctccactccgcccgccacgcccacgccccgtcctcgcttccgtctcccacaatccaaggacaccgagcagcaggcggcggaagcaacccgctgtgggggcggcgtggagtccagttttgctcggctcgtcgctgggatccgccggccggcgaagcggggaagggaagaggagcggagattggagagtacaagcaggggaagatgtcagacgcgctgatcaacggcctcgccggcgccggcggcgggatcatcgcccagctccttacctacccgctccagaccgtgaacgcgcggcaacagacggagcgcgacccctccaagccggcgttcaaggacggcgccgctcgccagttgtatctggttgtgaagaacgaggggtgggagcgcctgtatggcgggcttatgccctctctcgtcggcaccgctgcctcccagggtgtctactactacttctaccaaatattccggaacagggccgaggcaagggcccttgagcgatccaggagagggcttggcgatgggtctgtcggcatgctccagtctctcactgtcgctgccctgtctggctgtgtcaatgtactgctcacaaacccgatttgggttgttgttacacgaatgcaaactcacagaaaggcaaacaaacagcaaagacctcagggtttgaattgtgctcttgataagccccttgaagctgctacagctgaaaacgctccatacaaaacgattgatgtttttcaggaactctacaaagaatctggagttcttggcttctggaaaggggtaattccggctcttatcatggttagcaatcccgcaattcagttcatgctatatgagactcttctgaagaaattgaagaagagacgagcctctaattttaagggagctgatggattgactgctcttgaaatttttcttcttggtgctgttgcgaaacttggtgcaaccgtcgttacgtatccccttctagttgttaaggcaagacttcaggcaaagcacatgattaacgatgacaagaggcatcgctacaaaggtacacttgatgcgttcacaaagatggtacgatatgagggtctgtcagggatgtacaaaggaatgggcacaaaaattgtgcaaagtgtttttgcttctgctttgctttttatgattaaggaggagctggtgaagggtgctcgactattggtaactggtaacactagtctggttaagaaactaccatcaaagtcatcaagatgaactacgggcatcgcaagcatgcaactgaagagggcgaggcagacagcagctcctaggcgggaagtgtagatttgttgtttcgcatttgttatgttaccctcaggtgaggatggtggggaattctttcctaacggggagaccttttgtctgcttttattgtaagttgattatgttctcttactgaagcagtatactagatttccaaacctcacataagagcatgttttcaaatacatcatccgttgtcgaccactgcatataaagtgttctttcatctacgctgcaatggtgaagaacagcggacaattatcctggaaactgacggttatgtgcctgattgctgatttaattcgtgc

SEQ ID NO: 27504 - DNA, 4684 bp, Zea Mays
cttctcgccatacagagagactccctcacgaaaactcaccgtctcccgctctcgatttcgaaacactcgccactcttcgcctcccgttccccagcccagacccgaagccctgcgcctccccctccgccgctcgccgggcgagatgtccccgccgttcgtgttcccctcgaccctgcgggatctggagctggacaccgacggagacagagacgaggagccctcgctccggccgcagaaccccgtcgccgtcgccacgctccgcgctgccgacctcgaggagttcgtcaagggaggtgtttgatgccatctactctatcgtgcgtgatttcaattgcctacccccagcccttaagtttaacattgttgagaccttgcgctccaacctcagtgtccttctacccagcatagactcactttcccgggcatccatgtcatccccttctgatgctaccgaaatcactgaccgcattgcctcacaccgcaatgccctcaagatctactccttctttctcatttccattgttctcaccgcggaagctggcgctgaaagctgcacagcggctaaggcaacagcacatggtcgaaagaagaaccatatatattcttggaactgggaagcacaaagaggcaggatcatgagtctagtcgctaattctcttgaagctaacctttcgctactttttggtcctggaggaaccgatgaacgatatctctcttttgtttcgaagtgtacttttgttctctgtgaaaatcaaaatgtgttaaaagatgaggatacaagaaatggcctgtgccggataattggagcaattgccacgaagcatcagaggatttctcaaatcagtgcatctgtttcacatctaatacacaaatttgatttcactgttcctcatcttgcggaagcagttgcttctgcggagaaaaagtttggtgatggaagccttgcaatttccctgattagggaaataggtcgggctgatccaaaagaatacacgagagatagtgttggtgcggataatgttgggagattccttgtagaacttgcagaccgcttgccaaaacttatgtcaaccaacattggtgttctgatacctcactttggtggtgagtcatataagatcagaaatgctcttgttggagttttgggaaagctggctgcaaaggctttcaaggatgttgagggtgatagcaatgctcggcttcgaagtaagcaggctatgctggagattttgattgagcgctgtagggatgtgtcagcatacacaaggagtcgtgtgcttcaggtgtggtctgagctttgtgaagaaaattctatttcaattggcctgtggaatgaagtggcttccgttgcttcagggcgactggaggacaaaagtgctattgtgagaaaatcagcattacagcttcttataacaatgctgcaacacaacccttttgggcctcagttaaggactgcaacctttgaggcaactctagaaaagtacaaggaaaaattacaaggaatggagccttcaaattcagacaaagatgaggccgcaaatgatagttcgcctggtgaagtgatcatggggcaagatgaaagtgtcagtgatagctgtttagcatcaagtcaggatcaaaatgaccgtgatgctacgattgtggatataacaaacttggaacaaataagagctttagttgcttcacttgaagctggtctgcggttttcaaagtgtataacttcgttaatgccaattcttgttcagttgttggcgtcatcctcagctactgatgttgagaacaccatccttttactgatgagatgcagacagtttcagatcgaaggatcagaagcagcactcaggaaaatgttacctctggtgttttctcaggataagtcaatatatgaggcagtggagagtgcattcattactttatacacaaggaaaagtccaatagaaacagcaaaaagtttgttagaccttgccattgattgcagcattggtgaccttgctgctctcgagagcttaattagttccttagtttccaaagcagaaatttcatccagcatggtatcagcactgtgggactatttttgctttaacataaatggagtgagaccagtgcaaagccgtggagctctatctattctttgtatggctgcaaagtcgtctcccagcattttgggtaatcacttgcaagatattattgacattgggtttggacgctgggctaaggaagaacctctgcttgctagaactgcatgtcttgctttgcagagattatcagaggaagacaaggacaagctgataagtaataatagtagagtatttgctgcattgcaaggtttggtaacaagcttctcgattcctgagaaaatatggtatggagctgcagataaagctataagcaccatctataccctacaccctgcacctgaactttttgctactgagactgcaaagaagtctctcagttctgtattcagcgttttaggaacaaatgatgtgtcaaatggagatgaagctcagaatggtgcctctctgtcatcagtatcaccttcaaagctgggtagatttctttttgttattagccatatagcactaaatcatttggtgtacattgagaattctgttaggaaaattcagaaacagaaacggaagaatgaaaaatctcagcccaccactgaggatctccaacctgacgtgtctaaaagtttggaggcacaaggcataaatgccgaactgggacttagtgcaaccatagatattgcaatcgagtcccttgctgaaagagcagaaaaggaaattgtttgctgttcttctgaaaagaatctcataggacattgtgggccatttctctcaaaactctgcaggaatcttgcattgctgcaaaagttcccagaccttcaagcttctgcaatgcttgctctttgcaggctaatgatcattgatgcagagttctgcgaagcaaatcttcaaatcctgtttactgttgctgagagtgcgccttctgaaactgtccgatccaattgcactatagcccttggtgatttagcagttcgcttcccaaatctcttagatccttggacagagtatatatatgcccggttacgtgatccttcagtgtctgtgaggaagaatgctgtgctggtcatttctcatcttatattgaatgatatgatgaaggttaaagggtatataaatgaaatggctgtaagaatagaagataaagatgagaggatatcaagcctggcgaaactcttctttcacgagttgtcaaagaaaggaagcaacccaatttataatcttcttccggatatcttgggtagactatgcaatcaacacctcaaagaagaaacattttgcaatattatgcagttcttaatcaactcaattaagaaggacaaacaaatggaagctcttgtggataagctgtgcaataggtttgctggagtaaatgatgtcagacagtgggagtatatttcttattgcctttctcagctaaccttcactgaaaagggcctgaaaaaactcattgataattttaagatgtttgaacatgcattatctgaagattctgtgatgaaccacttcagaagcgtaatatcaaagtgcaagaagtttgcgaaacctgagctaaaaatttgcattgaggaatttgaggagaaacttagcaaggttcatcaggaaaagaaagagcaggaggaaacaacaaaaaatgctgaggcacacagacagagaattgattcgcttgatgaatttctggttactaaggaagttagtgagaacagtgggaattctgctgaagatgaaactagcgaggtagttgatccttctgtggatagcagcacggaacatatggagaacacgccagaatgcagtgtcaatactagtgctgagaattctcagacaacagccccacttacagaatcagaaggtggcggtgaagagattcaatccgcacaacctgttagcaaaggcatgtcacggttaagggcaaagaaaaccagagatcctgttgtagatccttcggtggaccgcagcaccgaatataaggggaacacgccagagcacagtgcggatactagtacggagaattctcagacatcagtcccacttacaggaacagaaggtggcagcgaagagattcaatccacacaacctgttggcaaaggcgtgtcgcggtcaagggcaaggaaaaccagagaccccgttgtagaggactcagcagctccagtgagacgcgccacgcgttcaaccagaagacaaggaagctgatggtgcagcaaagcggcagctcaagccattccgtgccgatctcgcctcgaggtcccggagtactggaccacagcaaagcggtgcctggacgtctggatcggagagttggctggctctatcctttttgcgtgatgcgtgtcggtctagttttagctcgctgattcccggacaggccaataatgatctctcgtgaatctgtctaggggcagtatgtttaactgctccatacgaggagctcttgtgtttggttgttgcagtaggtcggctttcatatggattgtctactacagacattgctcccttggggagcgtatgtataatatctggcctgatctttttgaggcctgatgacgctatgatatttttgaacgtgttgttcttatgaatccagcaggctcagctgatttccagcctttcaatgtgac

SEQ ID NO: 27505 - DNA, 2161 bp, Zea Mays
ccttctcctattctatctatatatcacccgcctcttttttctccctcactccgccacaccttccctcttcttcctcagctccgtcgcccaccgccggagctccgaaaggccccgcgcccgccgcctttcctgtaaaaaacccaacctttagctagctaaccgctcctcttctccccctactccccttgcccaaatcagagaagatatttaacggaggaggggaaggagaggatatttagctgattgttgattggtggtccggggtacggtgttcttgagtcgtgaagcgaccgtacagtggctagggccgtctccgggttgcgtgcaggatggtcgtcagagatcgggagtgaggaggcagctcgtggtcgtggaggctaaatgtaccgcaagaacgactcggcactctcctgtttctacctcttcctcctctggttcttcttcttgaaatagaccagcgccagccaccaggtagctacctactagctagcagcccagttgcgactggggacgggctgctgcttgcaagttggaatcttggagcaggagcagaggagcgggagatggagctggatctgaacgtggccgaggtggcgccggagaagccatcggcggcgctggaggcgagcgactcggggtcctcgggctcgtcggtgctgaacgcggaggcggcatcggcgggcggcggggggcccgcgccgggggaggaggggtcaagctcgacgccggccgtgctcgagttcagcatcctcaggagcgacagcgacgcggccggcgcggacgccgacgacggcgacgccacgccgtcgccacctcgccaccaccagcagcagctcgtcacccgggagctcttcccggcgccgcagcattgggccgagctcggcttcttccgcgccggcccgcagcagcagccggacatcagggtcctgccgcacccgcacccgtacccgcccccgccgccgcccgcgcagccgcagcaggccaagaagagccgccgcggcccgcgctcccgcagctcgcagtaccgcggcgtcaccttctaccgccgcaccggccgctgggagtcccacatctgggattgcgggaagcaggtgtacttaggtggattcgacactgctcatgccgctgcaagggcgtacgaccgagcggcgatcaagttccgcggcgtcgacgccgacataaacttcaacctcagcgactacgacgacgatatgaagcaggtacatacacgagtgttcttgcagctagcaccgactgaaacatctgctgaacgtacacgcatggccctgtgcaccagatgaagagcctgtccaaggaggagttcgttcacgccctgcggcggcagagcaccggcttctcccgcggcagctccaagtacaggggcgtcaccctgcacaagtgcggccgctgggaggcgcgcatggggcagttcctcggcaagaaggcgtacgacaaggccgcgatcaaatgcaacggtagagaggccgtgacgaacttcgagcccagcacgtacgacggggagctgctgctgactgctgaagctagcgcagaagttgctgacgacgttgatctgaacttgagcatctcgcaaccggcatcgtcccagagccccaaaagagacaagaactgccttggtccgcagctccaccaccaccatgggcggccgtttgacggctccgccgttctgaagaaaaccaagatcgatgctccgtctgagctgtcgtcggcgggccgccctcaccggtcgttcctccctcatctcgtggctgccgagcatctaccgcctcggtctcaccccttcttcatcacacaccatgaggttagacgacactatacagtactgaatcatttgcaaaggtttgtcaagctagctagattggcatcataatacacggatcaggtgtcagattgttcatgcagtgcagtatgcagcctgaaggtgtatgcagtttcagatagcagatttttagcagctggttaatttctctcttgcgtgcggctgtcagtcagtgtagctctcgtcgtcgcccgctttatttccttggattctagctagagtccgcctgtcgcccgtcgatttcagtgaagttaatgggatgcgcgaattttttttctcccccgtataggccggctgttgaatatatgtgtctatcttgaattg

SEQ ID NO: 27506 - DNA, 3860 bp, Zea Mays
gaaaattggactgattgaccgcaccgattccgcgatacgttcccgaatccaacccatcttcgtccgctccggccactcgtttcgccgccgtcggtcgccacccgcaaggtttggaggataagattcgggagggatggcttccggtgggcagccgcagttccggtacacgcagccgccgtcgaaggtgctccacctgcggaatctgccgtgggactgcactccagaggagctggtcgagctggggacccccttcggcaaggtcgtcaacaccaagtgcggcgtcggcgccaaccgcaatcaggcattcatcgaattcggcgaccaaaatcaagctattgccatgatatcatattacgcatcgtcaacagagccagcacaggtaagagggaaaaatgtgtaccttcagtactcaaatagacaggagattgtcaacaacaaggcaactggggaaggttcaggcaacgttttgcttgtgggaatggagggtgttgcaccagattctgtcagcattgatgttctacacgtgcaagccgttgtcacggagtatcatggcaggaagcatctggaacacatgtctgtgtttgtttcctctcccttactcatcgctgccctactcctcccctaccctccctcccctgcacctcttctccctacctttcccctcccataccctttcatccaagtaccctcttagggttggtcacatctaccttcgtcgatgtccgttttagttgttattataagttgtatctagttagtgcctaaggttggtggatgcatttttctcaatggaggtcgtttctgattggttacattggtagctggcatatttgtatgattattatcaagtgctcttctctggatttagtaagggaaaagaaagagaaaaggaacataaaatgtaatgcatcaataatagtaaataaatattcttgttttcactaacgccccgtttggatcctcggaattgaattccattctaataatagtaatttaggcaaatatcaattaagctagtatagttttatgcaaaatatatttgtatactattattactttattagcaatatgtgggagatatttatgtgctgcatttttactacagaggagtgagtagaagagtgtcttataagttgcagagtagaaacatattccactgatacacaaaatcattttctatcctccacccccatgaatttgagatagtcttatatctgaactgtggaaagtggcggaatatcaaattccaagccaaatagactactctattaagtaaatttcaattccttcaaaatgaatagatccaaatggcccataaggtaaatataatgaacttgattggcacaaatttgtcatttggttgcactgatttgtgtaacggtttaataccatctttcaagcaggattttagctccttattacagatctgcaagctaccaactcgagttatttgcatctgtatgttgattaaaagaattactttacaatcttctacatgatgattagattataattcttttgcaatcttttatgtgttaattacaagaactatcttgtgtttatcctccatagtgtcatttggttgacgcacctttaatacgctgttaaggcgagcttcaaaattggaacatgtggattatcagttcataaagaaacatctgtctgaacagtttaatgagtttcactcactttccactgtgaatattgtagatttgatcactttgttactggcgcatgaatgaatgcttgttagctgtgctcgtttctgatctctttctctagacaatccttacaaagcctagaaatgcattgattgatttgattctaatactttaataacagcttgatgtcacaattttacccaggagtgatgataaattcatctgcattatctgtactagcaggttgaaaggttttgaacatgtacagttgtgtgctagtctgctagtacccttgattcattgttattggttattgccgacaaaaactttattgtagttgtaagcttttctgtatgtttgtataaatattaattttgtttggcgtagagatcagacaacctttggctgccactttcaatttaagatcatttcactttccagatatattggtgcatgcatttggttttactataatgtttcacatgtggtattaacagttgacgtatgtgtgcacaggtattttctgctttcggatttgttcataagatcgctacctttgagaaagcatctggttatcaggctttgattcagttttctgatgctgaaactgcaacatctgcaaaagctgcactggatggtagatgcattcctagctatttgctaccagaactggatgtggcctgcactttgagaataacctattcagcacacagtgttctcaacgtcaagtatcagagccacaggagtagggacttcactaatccttaccttccttttctggactctgctaaagatggctctggaccggatggaaaaaaacaggaagcagagagcaatatactgcttgcttctattgagaacatgcaatatgttgttacaatagatgtgcttcatgaggtcttttcagcttttggatttgtacagaagattgctatttttgagaagaatggctttcaagcattgatccagtatccagacattcaaactgcgtatgcagcaaaagaagcactagaagggcacagcatctatgaaggtggctactgcaaactgcacctcacattttcacgccatactgagcttaatgttaaggttaacaatgagcgaggtagagattataccaaggggaatgccactccaagcagtgatcaaccttccattcttggtcctcagccaataccaagcgttggtgctgctattccaccagcacagggtagtgttccttctgcagccaccaattcagtaatgccaccaggggatccatcagttgctctaccttctaatccttccagtgagccactcctgcaagcacctgttgtttcctctggagggcctccgcattaccctaatcaggccatcctacaaggcccacttggtgttgttgcacggttcccaggctatggtgccctgcagtttgctcagggctcagctcaagctcaaatggtgcagccttcaggccaaggaagtcaacatatgtcaggtcatgtaaattatcagctacctccaggttcagcccaattcatgcagtatctcagcaacggaagccatccacttccaaacgcacctgggccacagacaatgccttaccctgccctcagtgggcagcagctacctccgggtcttcagatgatgcaagctcaaggttttggaggcctgccgttttcacagggtcctggacaaccaatgccacagttcccaatgtatggcacccagcagtttcctccgggtatggagcccaagatgatgcgcttctctgagcagggaggccagcagtttacatttgcgccgcggggtccaaatagtcgttagcaaatttgaacttagcaacgttagatcgttgatggtgatgaatggatgtcaagccttctatgttgctgttttctaaggtgaataccgatgctgttccattactaggatctatacttggtttatctctcgtactgtggccaaaacaaatgtctaatctgaggtttcgtagccttgtatttgtatcgatttcctcacgcccgcagcttctgcctgcactgtgttacattacggttatactgcagtagtggaagcaaatgtaaaagaaacctagagacctgatgtgccaggttgaaagcccgtagctgcaaactgtaggctcacatcgcgtccagttataaatttgtttgtgctatgttaagagtacaattgtacaaaccaaggtttaggagaacc

SEQ ID NO: 27507 - DNA, 3351 bp, Zea Mays
ccggctggattcatcgcccccgcgacgtgcgccatttctccagcacacacgcaccggacgcgcaaggaaaacaagtcacaaatggcacacccggggtcccattccatcccaagctcggatctcgctccccgttgctgcgcgccgcgtgcgtgacggtgcggcaccagcacaccactccgtcggcgtcgatccagccatataataatctcgctcgcccgatcggatcggcttcacttcccacgatttggcttccttttctaccccgcaggccgcggcgcgtagtcttctgctctctagctcaccatcaccgtcgtcatcaatcacggtgaccttgccctcgctgctcgactggaaccgtgcctcgctcagatctgccccgttccactccccgctgttggctgttgctctgctctcatcgtcttcggccgggaaaggacgctgctgctgctggtaggctgacagcgaggaggacgagacgagggggccatggctcagatcttgctccacggcacgctccacgccaccatcttcgaggccgagtcgctctccaacccgcaccgcgccactggcggcgcccccaagttcatccgcaagcttgtggaagggatcgaggacaccgtgggtgtcggcaagggcgccaccaagatatatgccaccgtcgatctcgagaaggcccgtgtcgggcggacccggatgatctccaacgagcccgtgaaccctcgttggtacgagtccttccacatctactgcgcgcacatggccgccgacgtcatcttcaccgtcaagatcgacaactccatcggggcctcgctcatcgggagggcctacttgcctgtccaggacctcctgggaggggaggagatcgacaagtggcttgaaatctgcgatgaaaatcgtgagcctgttggggacagcaagatccatgtgaagctccagtactttgacgtcggcaaggaccgtaactgggcgaggggtgtccggagcaccaagtaccctggtgtcccttacaccttcttctcgcagaggcaggggtgtaaggttactctgtaccaggacgctcatgtgccggacaactttgttcccaggatccagctcgctgatggcaagaactatgagccgcacaggtgctgggaggatatctttgatgctataagcaaggctcagcatttgatttacatcactggctggtccgtgtacacagagatcaccttggtcagggacaccaacaggccaaaacctggtggtgatgttactcttggggagttgctcaagaggaaggccagtgaaggtgtccgggtgcttatgctggtgtgggatgacaggacttctgtcggcctgcttaagaaggatggcttgatggctacccatgatgaggagactgcaaattacttccatggcacggatgtcaactgtgttctgtgccctcgcaaccctgatgattctggcagctttgtccaggatctgcagatatcaactatgttcacgcaccaccagaagatagtagtagtcgaccatgagatgccgaaccagggatcccagcaaaggaggatagtcagcttcattggtggcattgacctttgtgatggaagatatgatacccagtaccactccttgttcaggacgcttgacactgtccatcacgatgacttccaccagccgaactttgagggtggatcaatcaagaaaggtggcccaagggagccatggcatgatatccactcacggttggaagggccaatcgcttgggatgttctttacaactttgagcagagatggagaaagcagggtggtaaggacctccttgtgcgtctcagggatcttcctgacattatcatccccccttctcctgtgatgttcccggaggacagagagacatggaatgttcagctcttcagatccatcgatggtggtgctgcttttggcttccccgagactcccgaggaagctgcaagagctgggcttgtgagtggaaaggatcaaatcatcgaccggagtatccaggatgcatacgtaaacgccatacggagggcgaagaacttcatctacattgagaatcagtacttccttggaagttcatacggctggaagcccgaaggcatcaagccggaagaaatcggtgctcttcacttgattccgaaggagctctcgctgaagattgtcagcaagattgaagctggggagcggtttactgtttatgttgtggtgccaatgtggcctgagggtgttccagaaagcgcttctgttcaggcaatccttgactggcaaaggagaacgatggagatgatgtacactgacatcgcacaagctctcgaagccaacgggattgaagcaaaccccaaggactatctcactttcttctgcttaggtaaccgtgaggtaaagcaggagggagaatatgaaccagaggagcacccagaacctgacactgattacatccgggctcaagaggctaggaggtttatgatctatgttcataccaaaatgatgatagtggacgacgagtacatcatcattgggtccgccaacatcaaccagaggtccatggacggtgccagggactccgagatcgccatgggcgcgtaccagccgtaccacttggcgactaggcagcctgcccggggccagatccatggcttccggatgtctctttggtacgagcacctgggaatgctggaagacgtcttccagcggcccgagagcgtagagtgtgtgcagaaggtgaacgaggtcgccgagaagtactgggacctgtactcgagcgacgacctggagcaggacctcccgggccacctcctcagctacccgatcggtgtcactgccgacggcagcgttaccgagctgcccgggatggagaacttccccgacacccgcgcccgcgtcctcgggaacaagtcggattacctcccgcccatcctcaccacatagagtgcacactgcaggcagcgccatggctgctctcctctctggcctcaccttggtgtccctgtgtttgtgtttgggacactggaggttcagattgcagtgttgatattatatcccccctccgtccagagggattcgacgttattgagtcataataaaatgcattgtgcacggtgggagactgggaggataggaattatagttgtttattacagtacgactgcttactgcatccagattgtgttgtcccttgtctggtgtagcttctgttgcttgctgcgttgcagtgccggaagtgactccagatttcagaacttaaacatgattgcttgttcaagtgtgtgctgctaaatgtcaaactgtcgatgtcatgctacaacaacaatattgataatctctcatctttctataaagacctttaaacctggt

SEQ ID NO: 27508 - DNA, 4462 bp, Zea Mays
ctgcctctctccctctccgcctacctctccttccctaccgtctcctgccactgcgcccctccaatagcgttgtcccttgccctcgcgcgccccgtgctcttcgtcgtcttcgccagcccaggtggcaggaagctacccatagccagcctcgtcttctcggccaaatccttcttcggtgcaccgctggccgccacctcggcctccgtcgctttgtcgctcctgtgccagtggctgcctccagctcgctcgaggtcgtcgctacggggaagaaggggcctttccgaccaaatccttctttggcgcgccactggccgccaccgcggcctccgtcgcgttgccactcccgcgacaaccggccgcctccaactcgcttgaggtcatcgcagcggggaagaaggggctttcccagccagatccttctttgacgtgccgctggccaccaccgcgccctccatcgcatcgccactcccgctagctcgaggtcgtcacaatggggaagaagggctgcaagatgaagacacacaagcgatttcgggtgacaaggaaggacaagatcatgcggcggtgcgctgggaagcaacacttgctcgccaagaaaaacaccaagcgcaagaagagactctccaagatggtattcttctttcctccactcttgtgccgctcaaattttgttcagccgctcattttgtcgcggaggtcgtttcaatagcagtaaatagaaatcatggctggtgcacctccgtgaattagatgctaatgtggaatgacgatgtcaatagcatttgctctcgtattttaattgcttgatagttttaacgtgacaacgttgctgaaaactagaaaggcgaaatgcaagggcgtgagtttgttttgctgatgtgctctggggtgcttcatttgttatttcttggcatatgtctcctactcattaggaagctcagtttattcctcgattttcaaatgtgtgtgagggccagtacccgatagatggcatgaaaaaagcttttggctaaaattgaacatgtcaaagttcacagattattatcatggtccttaatataacgtttgtttctgaaaatgaactattttattgtacacataaagttaccactactatttttgaaaaagctagaaaatagtcatgacaattttgagaataaggtgggtgggagtgggtgtttaatgttttgacctacgagtacttctaattttacttcattattgttagtcatctaatatatacttgttcctacttcattattaggcgtgggtgtttattctgtgttaataagcagttataaattatggggtgttaaagtagtagcacgtctttgttacaagattatagccgatcaagcatacttcgtttactacttggataacacaccaagcagaaatagctgaacaaatatccctacaaacagctcagacatcattgtttcagttcatgtccgtactctgctttgatcaaatacagttcccggtatccagtccatacattttagtttccagatttttgtttggataacattaagcccatactttttcatattttcagttagcacatacatttcatttcatccaagacatgctgaaaactgaatgtgactcatacaacgggctaggcatcctgttcaaatctaaaaacttagtcagtttggatcacatcatattttcagattttcagcttataagctgaaatttgacgcccagtttccagattttagattttcatttttcagttttttatttaaacagtttggatcacattcatgtttcaactttcgatttgcagataatatgcacgtagttttcatattgacatatattatatggtggtctgaatcttgaaaaattgcttgcttgttgagtgaagaactccttgccatggttgttgcagcctaaatctgtttatattacttgtagatattcagttgttattttgtgccttgctgctaccaaaattaagaaatgataacactatagcccacctagcattgttctaacattttaaaatagaataattggatctataccattaaaagattctaactttctgcataggtctatcgttggaaatgaagggacatgtcgtttttctgtccaacgagaatagcagttgtcttctgctaatattgtcgctggacaaatgaactctgtgtttttgtgtgcaagcaataattcagttgttgctttgttggtctggctatctcactaaccatttttgtggtgatttaatcttgaagcatcgattgtgctaaatagtttatcggatcctttatactcatgttttcccttgaactggacagaggtgccggatagggcttaatagttgaatcgaagattaggatacgttggtaggagtactagggagggatcacctggatcagtgcattaaagttagctgacagtaaatattattgttcttgctattctttcgagcaatgttcctcaaaccatgatacatatatcttgtaataagaaaatcagtgacctttttggtgagtgacaattctattatgatatttttgacgatggagatctaggctagcttgttcctgagttggtcctaaggataggtttcatcactttgtggcgttttattcatcttctagcttagacggtttagttattacactgagaattatattcacttggaaacacttgtttcagctggctatttacttgtagctaatagggagttccatttagttgactatctcacatatagttatccaaatggttaagatgtagtggtgtgttgttttgctttttggtgtgtgtcaatttctgcaggagatgttcgccgatctgtgggccaaaggcttcagtttgctaggattcatctgctttagctcaattgggatggccagatatgcggataccaatcttatacaccttatcatggccagatagaatctatcgccctagctcaatttgttaaatctgtctagatatttgcaagcatgacatcttcacaactcctgggctacttttacaggacatctgatgcttttatttggaaatgacctccaagaattcaggtcttattttttattacagtatggggttgttctaataagctactggcatatgatggtaatacttgataaattcgtatggatgagggaaacctaagtcagctgttggtatgtgcatctgtgattaaatctgatgggtttttaatcagaaaaattatgacaaccatcttataaattttaggaaatagatatattattgtacttaaaactaaattttctgaacagctcatcaaacttggaccttgacctaaactcatttcaattttggtgtcattttgaatagttatatgtacgagttgagttggataccatggtaaggttgctaaacatgaatatgctttcgaaaaaaggatgttaagtaacttagtgactctgcttaacactgtaggatttgaggctgccatagtatgctctctgaccgtgctaacgggaggaaggagatgatttaagttctccatgtttataaccagaaagaggaggatagtccaatcatggtaactaaatagtaggtagtaatgtttcacggtaaatcacagttctcgaatgcgatatgatctttgactcggagtattgaagactaatttagtttgagtttgagattagttgtttttgtcattaataaactcacattagcgtctggttacgagctcactactagattttagatctccatttttggtgtacttctgctgcatgtgcctcccatagttgcggatttgcaggtatcacctgattccttttgatttttggattgagatacagtaaaagttatctttgcctgtttccaccacactgtatcatacaggtaaacatgaatacaaggctggcttgatctggcaagtgctcgccattctatgggcccatcacacttttcgagtacactgtttgatcatgaagagcagtctgctgccactaaacttgaggttgttgatcatgattgtctgaaaatttatcggggatatgccttgggatggagaaatgtcacagaacacaggatgaagacgattccaagaatccacccatgtcagaagacgccttcacatcacggagtagagctctcagcaacaacagtgcaacgatgtttggacttttgttcacatatgggagtgtttaaactcctgcacctagatttagaaacaccaccatgtaaaatagacaaggcggtgcttttgcaaacatgatgctgccacgagacccgaacttatgtatggccaaacatgttaacatattttgtatgtcatgggctgttccagaaacattctgaaatacacggttccttctaaattctatattttgtcttgatagaacgcccgtaaaagtgcttcaatgttctagtttacatgaaaggtatatagcaatttactcaagaattctattgtctctataggacggctccacttattctagtaaaataaaaaaaa

SEQ ID NO: 27509 - DNA, 161 bp, Zea Mays
aaagtaaataggacataatgggtcagagaacacttgccttcaccaaacaaatgctcagggtcttcgatctcgtaggactcgaagagcttgatctcaggaccggtggttcaccaaatcttgatcgttgattcctcgaagctcgggaatagattgcaatctat

SEQ ID NO: 27510 - DNA, 1372 bp, Zea Mays
tacaggcaaaatatttccggtcctcaaagctcccgcccgccctccttccctccctccctccggcgccagtccaggcacaggcaggcttcagtctccagagatggcgaggaacgagcccctagacttcgagaacgaggacgatccgctcctccccgccccgcgccccgccaagaggagcaaggtcatcggcatggatgatctcctgctggattactttcaatctggtaaaaaggacaagctcaaagttaaggctgccaagtctaagcatggccccaaaggaggatatgattcaggtgaggaagacgacagggctacacagcaagagattacagtctgcaaaatatttgaggaagttcagcaaaagggcaaagtgatggatgctagagacgatgtacccccatggggtcaacaattttttagatgccaggtcgactctaactttatcttctgtttaccattttcagtccaccagatgctttccctttcttgatcaccagccactaagttattcatccttacagaaccccccctcaaatcttagcaatggcggagttgagaattgtcatctcctgcaatcattctctgcaattgaagatataggttttgatctagagatgcatcaaggttcattatgttcccacttcccactgtgaaatgttctattttttaaataacataaaacccaccagtgtttgaattggttcaaccttttgttctctttcactgtgttgtatgtttatatctgttagtcaatattaaaattgatcccctgttctatgtttttttgctttgtcacttgcagttaattttggcgtcttcctcatgtttttgtgtaggagaggggttcctcgaaggcatgctgttggatggatggcttctgaatttggttcgcatatgtggttttgttgaagactctgtagcatcgtggacgctgaccaacttgttgcattcacccaatgagaaattacaagtttctgcagctgacttttgggatggcattctttccttggatgaggctggtgaaccgttggtcaaccttgggtattttccaagttactctgttctaaaacgggctatgctgagctatggatatctatttgatacttcaggcactaaggcttcaatctctggaagcactgctgcaggtggccctgatgatagtctgcctcataacatcattgcttggttaagagttgtatctgcttgctgcaaaatcagttcacaagaagagcaaaaagacatactcaaacaaacaaggaacaagagtctacaacacacaacataaactatcttcagagtttctctatgcccgttgacttcaccatcttgtggtggaaattatgcaacaacttgcatagtatcaacatcacag

SEQ ID NO: 27511 - DNA, 1078 bp, Zea Mays
atctcttttccgttcgccaattcgaaatcgaatccgttccccaattcgaaatcgaatggggtcggtcttgtcgtgcgtgcgtggctgcgcgagcgacttgactgcacccgacccccctcctctcagtgcccacacactgcgcgccgccgccgggtcctcctagtgtttcgccgcgatgtcgctccggccgagcgagcgggagcagatgcgaaagggcaactacaagcagacggtggacgcggaggagagccgccaccgccgcgagggccagatgatggacatgcgcaaggccaagtgcgaggaaagtctccagaagaagcgccgcgatgggtttcccgcctccgccgccggtatgccgccgatggtccactccaccgcgctccagcagaagggtatgggtgacgtggtggcactccatttgctgggttcggatctgactttcttggtgacgggatggctttccggcgatggcgcatgctgtccactccaacgacccctccgtgcagcttgaggccaccacacagttcaggaagctgctttctatagtccccccaatcgaagaggtgatcagcacaggagtggtgccgcgattcattgagtttcttacacgtgaggaccatccccaactccagtttgaggctgcatgggcactcaccaacattgcatcaggcacatcagagaacactaaggtggtcgttgagagtggtgctgtgcccatctttgtcaagctactcaactccctcaagcgaggatgttcgtgaataggcatgcactaaattacaagagatgtgtcttattatgacccggggcagatccagaatttttctatgacccaagccaaatctaccaaattttcttctttttattttatcttaactattttgtaccatattaaatagagacttatatagagttacatggatcaagccctgggccacagatcgggtggcctggggtgtagatccgccactgattatgactatggatgagacttttgtgatgtaattgatgagactatagatttaaatattgttatgtgattgtgtgtgagatgttttatgtgaaaatatgttgtgct

SEQ ID NO: 27512 - DNA, 759 bp, Zea Mays
aaagtttccacaaggcacaggctctcaatcctacattgcaaaggcatactcattgcaagaaaaatttaaagataccgaacctagtgcaattgatcttttcaaggagatgcattgcagcaagaagaaagggtttagtgaaactgtccagaaagctattgttgatatggaatcaatggcagcaacaccaattgaagatggacaccattcaaagtcttcaacagaagtagtctcccaagtgctgcctaaatcaagtttattccttcagaatgtaggcttggcaacctctaacagaagctcttcaggaaatgtttcagcaaaggtgcagcaacttgagtctcaattggatacagagcggcaagaaaaagacgaactacgagatgaagtccaaagcttgaaggctaagacacaggcgtctgacgagaccattgctaagcaatctgatgagattgcagatttaaagaagtccatagcagaaaacaatagcctccttcgccagattttaagcatcaatcgtagccaagtgtctccttaaatatgcctgccaacttgatggtgtcaagatacatcacataccatatggaggactaaagttatatgagcttaagttacatgtttattaggatttatgttattggagtccaaatttgttttttgtttaaatacttgtgctcgatgaaattttggacggatgttatacttggaaattatataattttggtattgcaattggttttgtttgatgccatattttatgcatga

SEQ ID NO: 27513 - DNA, 683 bp, Zea Mays
gtagcataattgataaaaaacataatatcgattcaactaacagcccctgcgggaatttgggataattttatggcagacgtagaaatcgtattcatcgtcgtaaaaaatcatcacttgaatacataaatagtgtaaatagcaggcataaaaacataatcattgttggcataaacatggatcagatagttcgtcgctagaggacgatcctgaggccgctagatcaaaggacgccaccgaagccaccaaatcggaggagttggtcattgaaggatgctagagccacccacgcctcgcgttgtcgccatcgctggagacgaccgcgcctcgcacgaccgccggagcgacccgcgtgtcccatggccaccaccgccgctgccgaagcctaccacgtctcgcgcaaccaccgtcgccacccgcactggggtgcgccgccgcttgcccggccgcctcgagagcgccgccgcttgcccgcccgcctcgggagcgccgccgtcgcgtgatcctgggggagtgccaccgccggcccccgggatcgccgccactcgcacgcccgagagaaccaccaccgtcgctaaaacctaattccagcgacctgtgggtgtttttatagccacccgaatctggttcggctgaaccggatggcaccgggggccaggacttcatctagttattggaagcctaag

SEQ ID NO: 27514 - DNA, 1866 bp, Zea Mays
aaagattgcagctacctcccttttattttgccagagctcctctttttgctaaactgatttcattggtcgttcaaatagtccttgtctatgtcttttttttaccggttcatctgattattatctgtttctgttgttccttaatgacttgtagaccggtcgtcgaagcggagtagtgtggacagaatccgaggagggaaaaacgacttggatgcggcacgcctcacagaacttcagaattatagaatctttgcctccacatggaatgtcggcggtaaatccccaccaaggggattgaatcttgatgactggctccattcttcacttccagctgatatctatgtgttaggatttcaagaaattgttcctttgaatgctggaaatgttcttggcactgaagataatctcccagcgaaaaaatgggtctcccttgttaggaggacactgaataagaatcctggttcatgctgctatggtggctatcgcacgccatctcctgtcccggatccagttgtagaacaagatgctgattttgagggatcatcgagaaggcacgacagtttatcctatttgcatcgtcggtcattcaaccttagccggagtttaagagttgaagggaaccatatgctgtcacacccaagattggatcgtaggttcagtgtctgtgacccagttagcttgggaggcaggccaagtgattttgatgggaacttcccattcatgggatcaccagatgatcattgtatcgaggaggatacaagcaacggagcacatttttcacccttcccatatggctatggtgtctctgcacctatggaagaaaatggttatcatccaaatacaccgtctaggtactgcttggttgccagcaagcagatggtcggtatatttctcaccatttgggtacgcagcgaaataagaaatgatgtgaggaacctgaaagtttcttgtgtgggtagaggactaatgggttatctcggaaataaggggtcgatatccataagcatgtctttacaccacaccaccttttgttttatctgttgtcatttgacctccggtgagaaggagggagatgaactccggaggaactctgacgtcatggaaattctaaggaagactagatttccacaggtccgtggtgctgctgatgtcaagtcaccagaaacaattcttgaacatgatcgtatcatttggcttggggatttgaattaccggatcgctctttcgtactgctcagctaaagctcttgttgaaatgcatagctggaagcaactgttggagaaagatcagctacggatagaacggagatgtgggcgtgttttccagggatggaaagaaggcaggatttattttcctccaacatataagtactcattcaactcagaccgttattcaggggttcggcccaaagaaaagcggagaacgcccgcttggtgcgatcgcattctgtggcatggcaacggtctcatgcagctgtcgtacgttcgcggagagtctcgcttctctgaccacagaccagtgtacagtattttcatggccgaggtcgagagcatccggcacagaaggagaaacgcgggctatttcagctctaggatcgaggtggaggagctcttgccaaacccgtacagtcatccggcgtttacagcttccagtcagatggttgagaataatcacactgcacagaaactaacataaaggccagccggggccggggggagtcacgtgccgtgatctcaccaccacccaccacctaccgtcgtggcgacacgcacttgaatggtcatggctcctgagatagtgagatgtgattgagaatttaaggctggtggctttgacttttggaatcctaggtgaagactgaagagcaac

SEQ ID NO: 27515 - DNA, 732 bp, Zea Mays
cataaattgtttgtggatcatttgaaagcctaatactgagattgtgtggagcttgggaagttctgctactcgtaaacttgaggatcctgttgctaatgaccctctccagttgcttccgaaaagaacttaccagcccagtaccatcaagcggaaaagaacccatggattccttacacgtaaatcgaccaagggtgggcgcaaggtgattgcccggagaatcgcaaaaggcaggcacagaatttcagtttagcaagatcccatagcagcactggatgttttctgtactactacagattcgtatcgtgttccttgtgtgaacgacgtattttaagccttttgaagtttttgcatgccaccctgctgaagcatgaagctgagcccccgcgcaagcagctgaaacaaactcttgctgcgaaataaacaagtcaaaggaactggaaaattgccgcgccgaatgagttcatttggagcagctgcgtgccgcatttgtgtttgtttgtgctggaattgccacgtatcagagatgcgtgcgtggtctgagtgtggtcgcagtagcacttggccttgttttcagagtgggggtcaagggggggtcctagtgtaatactttcctctcttataaatcaccaggagagattttattctactattttctaggggagggagagagtatgatgcacctgctgccgttttctttcgcgacattgtgataatacaatcatgatagtgata

SEQ ID NO: 27516 - DNA, 1081 bp, Zea Mays
aggagccgactcgactggacgagatgcgagggagcaccgaagccgctgtcgcgggagccgttgcccttgacgtcgtcgctgccgaagtgcttcaaagttcaaaccggtgccactgccgcagccgtccttgtggccgctgccgccgccgccgccgccgccacacttcgccgccggcaagatgggccgcgtgattcgcgctcagcgcaagggtgcggggtccgtgttcaagtcccatacccatcaccgcaagggccctgcccggttccggtccctcgacttcggcgagcgcaacgggtacctgaagggcgtggtcaccttccgccatccattccggtacaagcaccagaaggagctgttcgtggctgctgagggcatgtacactggccagttcgtttactgcggacgccgtgctacactctccattggcaacgtcctgccgctcagggggatccctgagggtgccgttgtctgcaacgttgagcaccacgtcggggatcgcggtgtcttcgccagggcgtctggggactacgcgatcgttatcagccataacccagacaacggcacatcgaggatcaagctcccctctggtgctaagaagattgtcccaagtagctgccgtgccatgattgggcaggtcgctggtggtggcaggactgagaagccaatgctgaaggctggcaatgcctaccacaagtaccgcgtcaagaggaacagctggcctaaggtgcgtggtgtggccatgaaccctgttgagcatcctcatggaggaggtaaccaccagcacattggtcatgcctccactgtccgccgtgatgctcctcctggccagaaggttggtcttattgccgcaaggagaactggtcgtcttaggggccaagctgctgctactgctgccaaggctgacaaggcctaaatttgcgttacgcagcattagccatcttatatagattaaaaatatttttcctgcatggatcttaattttgtatcattctgatagcgatgaactgatgatactatggacattccagtttttgttgcaagctattgatgatattttttcttctttaatcaaacaaaaaaa

SEQ ID NO: 27517 - DNA, 3443 bp, Zea Mays
ggaacgatctgggccgcactcagctcagccgaagcagatctccagaacaacaaacccgcgaaattccattttccaattatcgcaggcccgcttctcaccaattcaccaaccgtccactccctcgccctcgccggtgcatctcgtcggcgtcgtgctctaccaccaccagtgcacggcacccctatgttcgtctccttctgctcccccatccttcgttctgcgcttggaacgttggatgtgggttccaccaaatcacgcgggagggcaaataaaccctagttaggccctcccgggatggaggcggccgcctccagcctctcgacgctgctttccaccttgcgcgtgaacgggccctggacgccgccgggaacctgggagtcagtcatacctgagagcggtgctgctcgcgtctctcaccttggaggacgccctcgcctgcagccgatctacgagctcgcatcggttactgatgatgctttgattcatctggccttgcatgcgctgtatggtgtcaaaacatcgttagatgagattgaggagctttcagcactgtcttcctcaaatccggctgacaggacctctaaccgtgtcccaaatgtgtggttacgttcctcgagcaccacatccatggggagtattctcaaatctttccgctcgacaggtcttgcggtcttcttcctttgcaagtttgtgcacttttatcttttccaaagtcgagaaatgaactgtgcaagtagagaagttcacgaacatgaagattctggagataaagacactaagcagcatcagccttacactctagtaaaccaagcatttgcagcagcagttaataaggtcctcgaaggctatttctgttcattgaatactttactagcatcaattaggcttaggcgttcagtgggccaatctggtatagcttccaagatttcaaatggaatgagttgtgatcccacttcagaggtcactcttctggaagtttatctacacaccgaggagttaagaaggcatgttaaatcccttggaaatatttgtttccctaagtttgcaggtcttacattgtgccaggagggtttgaatactgatgcaaatgtggagtttgagaatttcccacggggcaccgatttgctttcctatttgtatgtccatattcgtgatgctgatccagttcactatggtcttttgaagtatcttttcattcgttcctgtgagccatactttaacttcattaagtcatggatttaccgagcttctgttgatgacccttatgaggaatttctcattacacaaactgaaaataagggtgctcaaggaatctcttcagacataacagatgatttcatcctcttccccttaaagggaagaaaccatgtatctgctccatgttttctaaaggagatatgtcatcctcttttgcgtactgggcagcagcttcaagtgctcatgaaccttctaaagtattgcaatctggctgctactgaaggagatgtttatccctctcgtaatatcattcatatggagggggttctcccgtggtttgatacaccaattgagtcttcaatgaattcatttacattttcaaaaagtgctatagaggcattaacatgcaaaagggatgctatgtacaagttgatgatggagaagctccaacattttttctctaatgttgaggtgattgcttttgatactgcatcaaatttcctacataaaaggaccgaccttgtagatgcatctgtttcagatgctgagttattctatggggacagcgacgctgtactaccttgcaatatggctgcagatgaaaaagatgattcttcttcgaattcccaagaatcttcagataaagaagatcccttggaatcttcagaatgttcttcttatacttctatggatgacacagaagttgagagttctacagcatgtgaaaacttgtctagttccatgttctcattatactgtacaagcacaggtgaagcaaaaggctccttggtaaccagtaagctgctttcttcccaatccagttcagttgaccatggaataaattgtgcaatccctattgagtgtgagaaagatgacaggttgagttgcaaacatgtccttgtgcacccacagaatactaagcatactgcggtgcctgatggttcagaactggattatcagtatagccagttttcaccatttgacaggtttatgaagagagccagttgctcatttgaaagcatgaattcagttggggagtttttgtattctgatcataaaaggtcagtaggtaatgcagtttatccattacattctgaatcagggagtactaaactatcaaacagtaaaaactatgaaaagtttgttactataaatcagccatggaataccagtattccttacaatctcagtttgaaccccatactgaaaaatgcagcttgttaccatacagagagtgacatgcaacagaaaagcaagaaccaatcacttgccagttttgattttgagtcagtcatggatccatgtgaagtatattgtgcaaggagcccatcccttcttgttgagtctgtaaatggagcagcaacagctggacagcccagtactcagccttatgaacagcctgattgttctaccaagcttcttcaagctcagacaagaagtcagtcatcccttacttcctcaggagaaatgtcaacaggagatagtcttcagaaaaatgcttctggtggggcattctgggagatatcattactatataatgataaatcaaaagaaaaaccagctatggactttagttcacaatttgatatgccccttgatatagttatcgataagtgcattattcaagaaattttgcttcagtataaatatgttagcagcttcacgatgaagttgcttgaggagggttttgatctttgtgcacatctactggctctgcggcggtaccatttcatggaaatagctgactgggcagactcctttattgcttcaatttatcagaagaaatggtcatttgttaaatctgagcagaaaagatcggagatccaaggacttatggacttggcattgcagagatcttcatgcgattctgatccttataaggaaagattatttatatacatgagggagtcacctgtggattctgttgatgcctctccatgtggtcttgatttgctggatgatatcttgttgggttataaagctgaatggccaatgaatattgtcattacagtagatgcactgaaaatatatgctgaaatattctgttatcttcttcaagtcaggtttgcagtgttttccctgactgaagtttggagatttttaaaggagttgacacagttcatcggtcgttccagccatagcagatctgatgtgttgaagaaattgaattttgtaatgaaattgagttttatgcagccctgtgtggtcgattggtcgtttcttatctaatggtagccggtgatcta

SEQ ID NO: 27518 - DNA, 1185 bp, Zea Mays
ctcacctaacccactcagcctaagatccccacaggtgtcaggtctcatccggagtcgtcgccaagaaccacagccaccgcgatggcgcagatcatcgatggcaaggccatcgccgccgacgtccgccgcgaggtcgccgccgatgtggccgcgctctcgtcggcccacggactcgtgccggggctggccgtggtcatcgtggggagcaggaaggactcgcagacgtacgtgaacatgaagcgcaaggcgtgcgccgaggtcggcatctgctccatcgacgtcgacctcccggaggacatctccgagaccgcgctcgtcgccgaggttcatcgcctcaacgctgaccccgccgtgcacgagaagctaagtttgctttcagggatccttgtccagcttccacttcctaagcatatcaacgaagagaagatactgagcgagatttccatcgagaaagatgtggatggcttccatcctctcaacattggcaagcttgcaatgaaaggcagagagccactgttcgtaccatgtacgccaaaggggtgcatggagctcttgtcaaggagcggagtcactgttaaaggtaagcgggcagttgtggttggtcgcagcaacatcgtcgggctacctgtatccctgctccttctgaaggcagatgcgaccgtatctgttgtgcactcgcggacccctgatcctgaaagcattgtacgcgaagccgacatagtcatcgcggcagctgggcaggctatgatgatcaaaggtgactggatcaagccaggtgctgcggtcatcgatgtcgggacgaactccgtcgacgaccctacccggaagtccgggtaccggctcgtcggcgatgtggatttcgcagcggcgagcaaggttgctgggtacctgactccggttcccggaggcgttggcccaatgacggtggcaatgctgctgaagaacacggtggatggggcaaagcgggggatagtcgagtagctacgttcatctcacttctcgttgctgtacgactgtgttgcaaggatgtgagctgactcgaaaagcgtgtgttggttggtgtaacaatctgtttcccaagaataagaatgatagtcacagctgctttcctgtttaataaatgcagtgaagaaagaattttggctttgctgctgcaattacagttgaaacaaagcttatggtttt

SEQ ID NO: 27519 - DNA, 3364 bp, Zea Mays
tccacacttcgtggtgggtgggtggtagcctgggccctggtgtctggtgtagacgaagacggccacggcgacccgttgccgttgcacgccgacgccgcattgacttttgagccaccaagtctcgagcgatgcgccacactgcccgctgccactgaccactgattagcttcgcctcgctatacctatacatatccggcgggcggcggctcgacaggagcacctagcagccagcagcggacgcgcggacaagggcagcggcatggcggagacggcgatcacgacggtgctggccaaagtggcggagctggtggcgtgggaggcggctgtgctgctggaggtgggcgacgacgtgcgcctcctccgggacaagctcgagtggctccacaccttcatccgcgacgccgaccgccgccgccgccgccgcgacgacgagttcgtcgccgtctgggtgcgccagacccgcgacgtcgccttcgaggccgaggacgcgctggacgacttcctacaccgcgctgggcggaggaaggccgcgctgggctcccggtgcgcgctcgggtgctggtggcccggcgggtgcgccggccaggtcgcgctccgccacgacctctcggggcgtatccgccagatcaggaagcggctcgataagatctccgagaaccgcgccgactacaacatcgagcacacgcccgcgccggcctgggccgcttgctcctcctccgccaccaccctcgctgcctgggacgatctagaggagtacacggtcggcctggacaagtacagcgacatgcttaaggagcagctcctcgacgactccgtccccgcgcgcgcgctcgtggccatcgccggcgagagcagcattggcaagacgacgctcgcgcggaaggtgtaccagagcctcgaggtccgcaaccacttcgagatccgcacgtggacggtgctcccgcacaagtgccgcgccgccgacgttctccgcgacatccacgagcagatgacctcccagctgcggcggaccccgtccgcgtccaactccaagcaggccgtggaagacgcctgcgatgacaaagccttcgggccgggaaaggacatcagcaaccagctgtacaggagcatgacggggaggcggtacctcgtggtcatcgacggcagcgttgccgtcacggactggaacagcctacgagcttccctccccgacgagggcaacggcagcagggtgcttctgatcacggacttggaaggcctggaggtggtcggccacgctcaggctggccacacgtacgacccgatcgagctgacccggctgagcccggagagcacgtacgaggtgttccgacgccgggtgttcggcgcccgcggcgactgccccggccggtacaagtcgaggtactaccaagacgtgttccggatcacgcgtggcctgccgctgtcgatcgtcgtcctcgccggtatcctgcggtccaaggagctgcccgcagagtgggacgaggtgatggcgcagctggccccgccggcgcgcgagcagcaaaggggcggcagcggcggcagcagcaacagctggccccggatcatgtcgcgggccttcgacgacctgccgcaccacctcaagtcgtgcttcctatacctggcggcgatgcgggagagcaccccggtggacgcgcagcgcctggtgcgcctgtgggtggccgaggggttcgtgcgcccgcgccgcgggagcaccatggaggaggtcgggcaggggtacctcaaggagctcatctcccggtgcatggtgcagctggtggacaaggacgacttcggcgccgtgctgacggtggtggtgcacgaccggctgcacgcattcgcgcaggacgaggcacaggaggccagcttcatcgagagccacgacagcacagacgtgctcgcgccggccaccgtgcggcgcctcgccgtcctcaactccaccacggacaggtacgtccagctcagcaacgcgctccccaagctgcgctccatcatctgcgacctggtggagggtcgccgagtcaggtccagcaacttcatccgcaccagcgacctgagcttcctccatgcttccaagttcctccgtgtcatcgacatccagggactcgagctcaagaggctcccaaacgagatcggctccatgatccatttgaggtacctgggtctccgctgcggccacctagagaagctcccaagcaccattggcaaccttgtcaacctgcagtcgctcatcctcggcggccgccacgttctggaggtgcccgccgcgttctggaggatcgccacgctgcggcacgtcgtcgcgcggttcgctctgccgagcagggccctgggcaacctgcacagcctccagacgctacatggcgtgcagccccgcgggtggggcggcgactacaacccgctggggaaggccgccaacctccggtcgctggagctgggcgagctgacctccgagcacgccgatgcgctcgaggccgcgttggagaacctcgacctcctggagcacctggcgctgcggggcgacccgctgccgtcgagcgtgttcagcgtcccgagcctccgccggctgcagagcctgaggctgatgggcgccatggatgagccggaggggcccagctgcgcggaggacgtccggtacatccggccgaacctgaccaggctatcgatgtggaataccgaggtggggcagaagttcgtggacatgctggccgagctgccgagcctggccgagctgacgatgatgtacgactcatacgacggcgatcggctggcgttcgtggagactgggttcccgagcctgcagaagctaaagctcggtctaccggagctggaggagtggacggtggccccggggtccatgccggggctcggcacgctgacgctgtgccggtgcgccaggatgcagatgctcccggaggcgctcgccgggatgagggagctggaggaggtggtgctgtacagcatgcccgacatcgtgagcaggatcaaggaggacgaaggccaggattaccacaaagtcaagcacgtacccgtcatccagactatatactgatcatccccatctggtgaatggtgattgacccgttgtcaacactggctgcttcaactcatgagcgactatgggtttaaatttggttcatgccaaactccgaaaaaacaatatgaactttgtgttgtggaccaattggtgaacccgagtagcagagtgagcgatgtgtttgggctttatattttcatgtgatggtgtacttattagaagtgaaacatatgtttggacttgtattcttgcaagacttttatgtttggacatatatatttttaaatttgaactcgttgttagtgtttgatttctacatgtaaactgttg

SEQ ID NO: 27520 - DNA, 1156 bp, Zea Mays
ctggaatctagatgacatcatatcgagaactctcaaagcatagaggatacatataaccgctatcagcaattttctggagaaggaaggaatataaatgacgatcgaaatagaaacgataacaaggatgaagcttcttcagatttgcagttgatgctgagcaagattgcgacctggtctccccagagcaatgctgacgaatcagatgtagatgagctggagaagctggaaaatcttctgagaaatgctttgaaggatacgagatccaggaagattcagatgttggcgaaacaaaacagcggagctagtacaagcggccagaaaagtccggagcaaggaacggcgtgagcacggatctgtccagcgtccacctacctgggattgctcttgcttccccttgccgatggatgcttgtactgattatgaccttgtgggttgcgagaccctgtgctagctttgggcctgccaacctgcagtgtccctggaggggacggagctagtgtatgtagtttgatgttccctttgtgtgttgtgatatgcagcctacctaatggccagagcttggtgctgcaaatcctgcagctgatctggttgcgtttcatgcttgacagtatatacagcatactactgtgttttagttcctacagacacttgctcagatgaaacaactgggctaggaaaatctatcgagcaaaatgatggtattgcataatagttcttgggtgttcactaggtttgtgaaacgtggtgccttgacctggtatgtgatttgtgcgatgatgtcgtctatccatgctggagtggagttcatgccagcgcgtggtttatatgtagaagtagaagtagcagctggctgtcgacatgccgagccactttgctgttgtttttgcatacccactggtcttgcctgaacatgtctggttttctgaagatgtacacgaccataactgaatgaagcagtaaaagctgcatgtaggtaacaactgggtacaaaaagagatgcattttcatatggacgaacaaataatggatcgtcggagatgggccgggtttggggggaatcgaagaacctcactcacctgcaactacgtgcagcgaggccgtgggcggcgagccggagaattttaaaccaccacagccgcgtcgaagtggccggccg

SEQ ID NO: 27521 - DNA, 1198 bp, Zea Mays
gcaaactgacggcatgcttcactcaggttggacgaacaactcttggaggattgttggccttggggtacaatgttgttgttagctttaagcgtacatgcacatctgtcaatatagatcaattactgatagctgcagagaccattgacactctaaatgagacctttttggtattaaaaggtccaagcagaaagattgttgcagcagaggcttcaaagcttggtataaagggaccatggatcacaaaatcatacttagaaatgatcttggagagcaaaggggttccacgacttaatacaccaccaccggtatcaagcaaactgctaactgaaagtcaagaaaagaaaattgctgcacctaaacctattcgtgtttctgctgaaaacattacaaatcttgatgacttgatgcaaccgtggacgagatccccgcccaagaagttggaacaagaacacgtattggcaaaatggcagtttatctcagattcttcttcaagaagtaacatccagctggctcctctgccagattcttatgacctggataggggccttctcctatcagttcaagcaattcaggcattgttggagaacagaggataccctatcattgttgggattggtggtcctagtggatcgggaaagacaagtttagctcagaagatggcaaatataattggctgtgaagttgtaagcttggaaagttattacaagcctgaacaagtgagagattataagtatgatgattatagctcattggatattgctttgctcactgagaacattatggacataaaaaagaggcataaagcggaagttccttgcttcgactttgaaaattttagccgaaaggggttcaaggagcttcaagtatccgaggaaagtggagtggtcatctttgaaggtgtgtacactttacatcctgctataaggaaatttctggatttgtggattgcagttgttggtggagttcattcacaccttattgcaagaatacagagagacaagaatcgtgctggcttttctatttctcagactgaaatcatgaccactgtgtttccactgtttcagcaatacattgaaccacatcttgtccatgctcatcttaagattcaaaacgattttgatcctgtgctctctcctgaaagctcactttttgtgttaaaaagtaaaaaacaggagaattgtcatgttcttcatgtatg

SEQ ID NO: 27522 - DNA, 1371 bp, Zea Mays
atgccagagcaaacccataggtccagtccaaatccaatccctgttgccatcagaatttcaggggcagccatggccgaaaaggagagcaacggagtgcgggtgtgcgtcaccggaggagccgggttcatcggctcctggctcgtcaggaagctcctcgagaaaggctacaccgtccacgccaccctgcggaacaccggggacgaggcgaaggcggggctgctgcgtcggctggtccccggcgcggcggagcggctgcggttgttccaggccgacctcttcgacgccgccaccttcgcgccggcgatcgctgggtgccagttcgtcttcctcgtcgccacgccattcgggctcgatagcgccggctcccagtataagagcacggcggaagctgtggtggacgcggtgcgcgcgatcctccggcaatgcgaggagtcccggacggtgaagcgagtgatccacacagcctccgtagcggccgcctcgccgttgctggaggaggaggtctccgcctccggcgtcgggtacagagacttcatcgacgaatcttgttggacttcgctcaacgttgactatcctctccgaagcgcacacttcgacctgacggccatttgatttgcagaagtacatactgtcgaagctgcggtcagagcaggagctcctgagctacaacggcggcgagagcccggcgttcgaggtggtgaccctgccgctggggctcgtggcgggcgacacggtcctcggccgcgccccggagacggtggagagcgccgtggcgcccgtgtcccgcagcgagccctgcttcggcctcctgcgcatactgcagcagctcctggggtcgctgccgctggtgcacgtggacgacgtctgcgacgcgctcgtcttctgcatggagcggcgcccctccgtcgccggccgcttcctctgcgccgccgcgtacccgacgatccacgacgtggtcgcccactacgccagcaagttccctcacctcgacatcttgaaagagacggaggcggtggcgacggtgcggcctgcccgggacaggttgggcgagctgggcttcaagtacaagtacggcatggaagagattctggatagcagcgttgcctgtgcggcgagattaggttcccttgacgcatccaagctcggcctacagaaaggataaaagctcgaagcttactcataagcaccatggggaacttggattgttcgctgtccactatacgcgttcgaaatttggaaactagacatactccaataaaacaagaggtaaagaaacgtgggctaactgatacgcgttgagcagttgagctagcctagtttagtccacctgtgtgcagggtttaaaacttcgacgaaattttatgacttgcg

SEQ ID NO: 27523 - DNA, 2811 bp, Zea Mays
acctgatcttgccattcttgctgtgaacacatttgttaaggattcacaagacccaaacccattgattcgtgctttggctgttaggacaatgggttgtatccgcgtggacaaaatcacagagtatctctgtgatccacttcaaagatgcctcaaggatgacgatccgtatgtacggaagactgcagctatttgcgttgctaaactttatgatataaacgctgagctagtagaggacagaggatttctggaggcccttaaggacttaatatctgacaataatcctatggttgttgcaaatgctgttgctgctctggcagagattcaagatagtagtgttcagccaatctttgaaatcaccagccatacactgtcaaagcttctgacagctttgaatgaatgcacagagtggggccaagttttcattttggattctttgtcaagatataaagcagcagatgccagggaagctgaaaacatagtggaacgagttacaccccgtctccaacatgcaaattgtgcggttgttctttctgctgtcaagataatccttctacaaatggagctcattacgagcacggatgtagtcaggaatctctgcaagaaaatggctccccctcttgttactcttttgtcagcagagcctgaaattcagtatgtagccttgaggaacattaatctgatagttcaaaagaggcctacaatactcgctcatgagattaaggttttcttttgcaagtacaatgaccctatatatgttaagatggaaaagctggagattatgataaagcttgcctcagatcgaaatatagatcaggtgctcttggaattcaaggagtatgccacagaggttgatgttgattttgtgcggaaagctgttcgtgcgattgggagatgtgcaattaaattggagagagctgctgaaaggtgcatcagcgttttgctcgagctgattaagataaaagttaattatgttgttcaggaagctataattgttatcaaagacatcttcagacgctaccctaatacgtatgagtctatcattgctacactttgtgaaagtctggacactttagatgaaccagaggctaaggcatccatgatttggataattggagaatatgctgaaagaattgacaatgcagatgaacttcttgagagcttcttggaaacattccctgaagaaccagcattagttcaactgcagctgctaaccgctactgttaaattgtttcttaagaagccaacagaggggccacaacagatgattcaggctgttctcaataatgcaacagttgaaacagataatcctgatttgagggacagagcttacatatattggcgacttctgtctactgatcctgaggctgcgaaagatgttgttttggcggagaaacctgtgatcagtgatgactccaaccagcttgactcatcacttcttgatgagctgctagcaaacatttctaccctttcatcagtttatcataagcccccagaatcatttgtcagccgtgttaaggctgctcctagggccgatgatgaagagtttgctgatacagctgaaacagggtactcggagtccccatcccagggtgttgatggggcatcaccttcatctagtgctggtacttcttctaatgtacccgtgaagcagctggcggttgcatccccacctgcaatgccagaccttttaggtgatttgatgggtatagataatgctattgttcctgttgatgaacctgcagcaccttccggccctccactacctgtcttactgccttcgactacaggtcaaggactgcaaattagtgcacaactaacacggcgtgatggccagatatactatgacatatcttttgagaatggcacccaaggtgtcctagatggatttatgattcagtttaacaagaacacatttggtcttgctgctggtgaagcacttcaggttactccactgcaaccaggccaatcaacaaggacacttttacaaatgaccccgttccagaatatcagccctggtgcaccaaactcgctactacaggttgctgtgaaaaataatcagcagccagtgtggtacttcaatgacaaaattccgctgcatgttttctttggtgaagatggaaaaatggaacgagctggttttcttgaggcctggaaatctttgcctgatgacaatgaatttacaaaagaattcccgggctctgtcatcagcagcatagatgctactgttgagcgcctcgtagcatcaaatgtgttcttcatagccaagcggaaaaatgcgaacatggatgttctgtatctctccgcgaagatgccccgtggaatccccttccttatagaggttacagccgtggttggtgttcctggtgtgaagtgtgcagtcaaaacaccaaatagggagatggttcctctcttctttgaagctatggaggctctcaccaagtgacgacaaacttaatggatctggatcggtggttctacaaaaaaaataccagtcgatgagctgctataggtgtttggacgtggcattttatttttcacggaagctggtgtgaattgtagtttttttggtattagattacagtatttaaactgctagtttcctggttccaaagttttttcaccagaaatactggaggtgttcatgccttgcatgatttgtacatcttaccatgttgtatgaagcgatgaaattgtaggtgacgaaaaagtagaataagcatagattaactggtacgattgtggattgttattaatttccctgcaacccaatcactattttaatggtgatgtatctatatttttcaaatggac

SEQ ID NO: 27524 - DNA, 2159 bp, Zea Mays
tctggcctcattcattggcctcaaccctcaagcatcggctgtgcggacatgctgcgctcctgcacctcctcggccgccgctcccagattcaccgcgccaggacgctcgacggaccgggtgcccgccccctggccgcccttcgcagcggtccccgcctgctgaaacccctcccgcccttagctgtaggcctcgcggctcggcgcggtcgaaagcagctggtgcgcgatcgagaagagtccgccggcttctctggtgcgggctgcggggtgcggtgtttctgaggtccgccgcgccgcgatgaggcgaatgcagcagtgagatgagatggtagtgatcctctactcccagaggtgaggtgcaggtgtaaatgcagtcagaaaattcggcatgagccccctctctgagctggtgtggtctccggatgaaggcttgagcattaaaattgcggcgtctagtcttagcacaagaaaggcttctcttcgttggaatgcagatacattgagcatattgatatcttcacctcaacgaagtggttctggtccaggtgaaaagaacggtgataccataaatgataacctagaggtatcagaaaagatgccatcacaactgcggattcgcagtgacagctcagtgagagtaaccgtggatagccccaatagtacaaatgttgacgccctacaatttacgtctatgagatcgcaggagcaagattcaactaaacttgtagagtgctgtgaagggattaatgttatgaacgaaggtaaagaagagtcagaaaactgttgcgtggataagctggaggacatggaagtggggaattgtcccaccagatgctgcaaggatgcttcccatagttcagcctccaggaaaaaagtcgtgcctagcatttcagaaaaccaggcttgctgtgcaaccactttctgcaatgaaagatcttgggaaactaatgcatggcgtgctcggttagtaaaggcagtttgtcagaaagaatctattttgccaacgaacacagagaatccaattttaccttcttccataggaatttcatgtgatgcagtagagttctcaggcaaattggtaggttcccaaggcaagtttcaaagcctgggtgtaagtagtaatgctctagaaattcattctcatgacaattgccaagatccggttctgcacgaaagccataaggatgagcctgttattgctagaggtgagtcagcatctggtgttaatattgttgcaagatgtgagtcggtacctggagttgattccagcaattttgtgagaggcaaagaaaaagttatgtacaatgacagcaattgtggtaacaatacaagggagggtgatgacagcaatgagagcatcgagagctgtacaagtacaaaagccccaaagcgcaagcatgcgcagtgttgtgcagccacgatgccttcttctggaaacaaaagatttagaagagaagacaatgagagttcttgttcgggattattgcaaaaatgtggtacatctttcttcaactggatgtcatcactcacgaatgggttacccatgctagatggagccactgctgccgttccacttgaacagaagttttcagcaagtacaggagatggatctgcagcaccttcccagccacttcaaaacaaccgcagcgttcctatgcaattttttggcttcaattcgctcttccagtccctgtatactcgtaatgttatgataacttcaggagataattgtcgtcaaccagaaagcaactgtgctggacatgtgttcaatagactgaccctggaattaaatgatagcaattctatgttgaacaaagaaattggcatgggtagagaaactcttgatctggctactcagacttcagctgctgaaggatttcagatgatttctggtggctgtagaggaaatgttcagagtcaaattgatattttccaaatgagaccagaaagaaatatgaaactgcccagttccagtaagtttagctctagatctctagaagaaaaacaaaatcagtgcacagctgcctgctcaaatgatgcaacacaaaataaaggtggtttgagggaaagcttgtgggtaactcggcttttgccaaaagcatcagtagaattgatggagggcacaccatgcaatgtagagaatgctgttagtccacaggc

SEQ ID NO: 27525 - DNA, 682 bp, Zea Mays
tgatgagacacccatggatgttgatattaaaattaatcttgatgttgatttggaaagacagataactgcagcaattgatccaaagctacttcaacatttggtgaatgctctcttcagaggtacattaagcataaatgattctgatctgtctgaaccatcagatgctgaagtggatgctgtaggatgtatttgtgcttttcttcatgtcacattcaatacattccctctagagcgaattatgactgtactggcctaccggactgaaattgttcctgcactgtggaacttcataaagcggtgccatgcaaaccgaagatggccatttttttcgaagtttgcatcttcattacctgctgatgctcctggttggctccttcccatgtctgtattctgtcccatatacaagcacatgttgaagatcattgataatggggagttttatgagcaagagaaacccctttcccttaaagatttgaagtccttggttcttattttaaagcagaaagtgtcatccaacccttcaggccttaagaagttgtcagtggagaatgtcaagatcagagctagggttgggttgtctgaattgctcacacagttgcaagactggaacaaccgacttccattcacttctgcaagtgatttctattcccaagaagcaacaagcgaaaattttgtgtctcag

SEQ ID NO: 27526 - DNA, 2681 bp, Zea Mays
cgggggccaagccccccccccccccccccccccccccccccaaaaaaaacacccactcaaaaggccaaagcccgcgcccgggcggagccgccgagccgctatcccaccgcgacttcgtcgccgtgctctcccgctgctccacccgcgcgcacctcgagcagctccacgctcacgccctcgtcgcgggggcgcgccgccgcgcagcccaccaccttccacctcatccgcttcgccgccctccgcctttcctgcctcgcctatgccccgccacctcttcgacgccacgccccaccccaacgtcttcctctactccgctattctctctgcatatgcctccgccgcagccgctgcctcaccttcatcctacgcccacgcccgcgacgcgctcgcgctcttccttcgcatgcttcgtcacggtcgcccatcgcccaaccagttcgtgtacccgctcgtgctccgcgctgcctgcgccgtcgacgtccgcattgtcaggtcgatccactcccacgcctgcaagagtggtttctgtggatatgaatacgatgtcataaggacctcactcctcgattgttattcgaggcacgctatgatggccgacgcgcgcaagctgtttgacggtttgacagagaggagcgtggtctcctggactgcgctggtgtccgggtatgcaagggcaggaaagattggggatgcgatcatgctcttcgagcgtatgaccgaaagggacgtggctgcatggaatgcaatcatcactggctgctctcagaacaggctgtttgcagaggcggttgggatttttgggaggatggtgggcacagggttgaggccaaatgcaaccaccatttcttgtgtactatctgcttgtgggcatcttggaatgctgaagatcgggaagttgatccactgctgcgcgtggaggacctgtgttggttttggctcatccgttctgaatgggttgattgatatgtacggtaaatgtgggaatctggagggggcaacgtggatattttatgaggtttcagatagaagcctaacagcttggaattctctgatcaattgtctggcactgcatgggcacagcaagtgtgcaatatcagtgtttaatgagatgaggggtgaaggggttgaacctgatgtgattactttcgttggactgcttaatgcatgcacccatggagggtttgttgatgaaggcattaagtactttgaattgatgcagcatgagcacggaattgaaccagagattgaacattatgggtgtatcattaaccttcttggtcgggcaggccggtttcaggatgcattgaatgttatcagcaatatgagaattgaatcagatgaagtcatatgggggtcattgctcaatgcatgtagagtacacagaaatgtagaacttgctgagttagcaattcgaaagttactagaattggatccaaataatgcaaactatgtggtgatgctagcaaatgtgtacagtgaaggtggcttgtgggaagaggtgaggaaagcaagaaagttcatggaggaggagaatataggcaagaagctgcctggttgtagctggatcgaggtggaccgcaagatacaccggttttactctggtgatgatgctcattctgagtcagagaatatatatgacactcttgaggatttagctgcctcaatggaattatgaaaaaaatatactgccagctaaccatgtttccagaaacttgcatagctgcataactttcataaattgtcttcattattggaaggtcatgaacttaacttctgtgtggtaaacaaagtgggcttccctaagacaaacatttgacctagatcgcacatttattggaggtacacaagaagttcttccatcaaagccttctatcaagctatacttcatggcaagagtacaaaggtgtaaaaaaggaaaggtgataggagaagctgaaggtggaccgaacaaaactgccatctattgccatttagtttcagattcacagaaggcagttccatatttttagcctactcagcttgtggaattccattacagatgctagtatcaagtcaaccatgctgtactcaacaagaaacttcgaattggaaggtgcgggagctgtttggacgaccaataagcctcctaattcagttgaatgtacaatgatgcaagtcaggatcagttatagctgctggtattattactagcattggaagtgccaaagcgttaccttggatgaacggtggtgccactgtcctaagattattgtgtccgtgccgtaccattcatagctgtttcctcctcttctttttttagcttagctgcctagctgggttcttcttattggatctatcccagtcgtctccaacctattcttccaactcaacttttccagttttcctcgttttattaacttgtttaccaattccattgatttttttgaaagggtatcgatccattgttggtccatgccatcctttgatcgtaacacttggtgaaaaggagatgctttgatcgaagagatcaagattcaaggctctggatgtagttacgtgatggccgtcatttccatatcatatcatccagctcgtgtatggtcacatggtaggatcaggtcggttggaacatgggtaaatgaccgccgtacgttgccactgcaatcctggcagggatggtggaggtagaaaaggatggtgca

SEQ ID NO: 27527 - DNA, 845 bp, Zea Mays
cagatctgtcgcaaactcgcaacccaatacgccatctattcccgtcgctgtcgtccacctgtttttttcgttgatccgcagccgccccttccttctcccatttcggcgtctcgaagccagtagattattcatttctcgatccacaaatccctccacactctccatcccgaaccctgaaatcgaggagcgcgggaggacgccgcaaagcgcgttggctcttagggtttgccggtagggttgggaggctccgatccgggcgcgcaggcatgaggattcgggagctccgagatgggctggaggtggaggacgacgagcgggaggagcagggatcggaggttggcagtggttacggggaggttgtcgcggttgtgcgactgcgggcgaagcgcgctatcgttggtgccggcgcgagggtcctgttctatccgacgcttctctacaacgtgctccgcaaccggttcgatggcgagttccgctggtgggatcgcatcgacaagtatgttttgctaggtgctgttccgttctctagcgatgttctgcgcctgaagcaacttggtgtaagaggagttgttacactcaatgaaccctatgaaactctggttccgacatccttataccaggctcatggaatcaatcatctcaaaattcctacaagagactacctgtttgccccatccctggagcatatttgtcgtgcagtggattttatccattgcaacttgtcttggtgatgccatctcagctttagggtgctaatttcgtggtgtcagttcagctcagggaagtagtggtagtgatcagctatggtttgtgtgatgcatcgtattctttgatattatatttgg

SEQ ID NO: 27528 - DNA, 444 bp, Zea Mays
gctgactactgctttcacatctgttggggttttctgccaacttctaccgagttacactggttagactgttggagaaactcccatcatcagtctgtacaaaaacgggtatttatgcaatgctgtacactgtgttaaacatctggcaagtggttcactggtggacgcatctccaggtccgagcgtaaaaatcttaagttttgagcataaaacccctcggttataagcgtaaataccgagccaatatgaggttcatatctatggtgggttgtattcacgatcctatttttatgttaattccgaaaaatatgggagtcacatccatggggtttatatttttatgcagatccaaaaattatggcagatttgtggtggtgtagtattgtatggttaagacttataagacttatgtatcgtgtggttgagagttgaaacttatttgtggat

SEQ ID NO: 27529 - DNA, 1837 bp, Zea Mays
aaacgatttcgcggtgctcgtgcttcgctgcccactttctccacttcctcctcctcgcgagctcagctcgcgcaccgccgcagacagcgccgccgccctctcctcctccccttccgctttgccgccacccactgctgccggccgccgcaggcaccccatggccccgaccgggcggctcctcgcggtagccgccctctccttcctatgtctgcaggggccgtggggagattcaggcagcgcatttgctcagagccagccgccgcttcaccggaccgttcgcgcagaggcaaatgacggcggcggcctcatgccggagctcccgcccagcggcctcatgcccatgccggagctctcacccagcggctctcccacgccatttgtccccttcctggcgcccgctccgctcgcgccattctttaacaacagcacgccaaagctctcaggaaaatgcacgctgaactttaccgctgtcgacaaactcatgaccaccacagctgtcgactgcttcacctcgtttgctcctttcctggccaatgtcatctgctgcccgcagcttcaggcaacactgaccatcctcatagggcagtctagcaagcagacagggtctctcgcattggatcccacggtggccaactactgcctgtccgatgtccaggagctgttgctgagccaaggcgccagcgacaaccttcacagcctctgctcggttcacctctctaatgtaaccgagggatcctgccctgttagcaccgtcgatgcgtttgagagcgccgttgattcgtccaagcttcttgaagcctgtcgcaagattgactctgttaatgagtgctgcagccagacatgtcagaatgcgataaatgaagctgcccagaaaatctcgtccaaggacgcaggtttgacgagctacaccgggagtcccaagactgacagctgtaggaatgttgttctgagatggttgtcaagcaggcttgacccacggtccgcgaaggaaatgctgaggcagatttccaactgcaatgtcaatggagtttgtcctctaagctttccagacacaagtaaggtggcaaaagagtgtggtggaacaatgacgaacagtactgcatgttgcaaggcaatgttaacttatgtagcccatttgcaaaagcaaagcttcataacaaacttgcaagctttaaattgtgcctctttccttggggcaaagttgcaaaagatgaatgtcagcatgaatgtctatagctcttgtcaaataacattaaaagatttttcactgcaaggtaagttattcaagacttatcaattgattacgcataagggtcatatttatcttctggctctgcattttgtggcaactgaactgatgaagtatttatttaccttttcaaccggtgtgtttgaatgactggcccctactggatttgcaaacagttggatctcaagaatctggatgcctccttccaagtatgccctctgatgcatctttcgacagcacttctgggattagcttcacatgcgatctgaatgacaacatcgcagccccatggccatcttccatgcaagcaccatcttcatcgtgcaacaagtctgtcaatatcccagagcgacctgctgcgacatcggcacaaagtggtgtgaaccacaagaacctaaagctaagactgcttgcctctttggtctcccttcttctggtgctcttggtacaagtttagcaaggtccagttgccctattatcgcgatgattcgttcaggagagctaactggaagtcagtgaagcgctgagttttttgcgatctcgcggtcgcatcgaagtgtaatcactttggttgacagtactagagcc

SEQ ID NO: 27530 - DNA, 2543 bp, Zea Mays
tcgattttacattggggtgaggactcttgggaagccctccctgtacgtgactactgggacctccaccaagctcttcaagttccaggatcagttcctctgtattgggcaatctctagacctctgtagattatcagcctgattcacaacttgttgcaggtgcaagaattcgactgcagattttaatcgtgattgacacgattcctggtttgagggcatctgttggtgtttcgagctaacaggctcctttctccctgctcgaagtttcacttacttcaacatgtggtttctatggatccagacttccaaagttggaatctgatcactcgcgtcagtgcttctcagctcccttgtttgccgttatggaggagcagaactcgtggctcaggaccaagttctccaatactgtctatgctagggtggatccccggagagtacctgttgctccgcttagcaaggatgttgagcggaaactgcacaaattcttcaagatgaagaagactgtatcgatgcctgttgatcgggatgatggagacacagggactgcattcaagcactgtgctagcttgccgctagttcgatcccagcctcagcttgacagggaaaaggtcaacaagcccgagagggcgagcctggagattccttcaagctcccagatgatctcagagagttgcaagactccaaaagcaaggagcctggtcaagaccccaagttcgatgatgctcctgagctacttgaacaagtcaccgtcaaatcaagggcatagttctcacaaggcttatggatccagaccgagatcgaagtccccccttcctagtattgtgccttccgaagtgtttagggaagcaaagtctagcagccagaggtttgcaagccctcctccacagcgaggaggatctgcaaagagtatatatggcaagtcatttggtaggcaggtctctgatatgggtcaaagtcctagatggcgctcaactccagttgtatctggtaagcacaagtctcaaaaggataatgcttggacaaggaaatacagtggtggaaggagggttagtgcagtgaaccctgctgatgatcgaagggcacagatggttagaatgaaccaggcagtgcagacgacagttgattggacactcgatccgtccaagctgctcgtggggcacaggtttgctagtggagcatatagccggctgtacagggggtactatgatgataatccagttgcgatcaaatttatccgccaacccgatgatgacgacaatgggaagatggctgcaatgcttgagaagcagtataacagtgagatcaattcattatctcacctgtaccacaagaatgtgatcaagcttgtagcagcctacaaatgcccaccagttttttacattattaccgagttccttcctggaggctcaataaggtcatacctaaacaatccagagaaccaccccatccctctagagagaaccatatccatcgctctggatgtcgctcgtggcttggagtacatacattctcaggggatcgttcaccgtgacatcaagcccgagaacattctcttcgacgagaacctctgcgtgaagatcgctgatttcggcattgcctgccaggaggccttatgcgatgtgctcgtggaggacgaaggcacttacaggtggatggcgcccgagatgatcaagcagaaggcgtacaaccgaaaggtcgacgtctacagcttcggactgctcttgtgggagatggtgtccggtagaatcccttacgagaacctgaccccttaccaggtggcttacgcagtagccaacaggaaattgacgccaacaatttccccagaatgtccaccggccctcagatccctgattgaggagtgctgcgccttgcggcctgacaagaggcccgacttctggcagatcgtgaaagtgctggaacagttccactccgttctcttgcagggtggctgcctcgacataccgaagagcggccccggcacctgccaggatcccaagaagcggctcatgcggtggattcagaaactgaagccgaagcatagcgcctgaataactaaactcttatagttgtagcatcgttgcagccgcagtttttgtcaggttgggtatgctcagtagtttagatctcgattcaaggaaccagcgttccaaggatgctcttagctgtgcatccgctgatctgcaatatagatcttacagtacatggttatgcttttgcgtttttgccttctcccttgttgaatttatcatggtaccgtagcatgtgcctctcactcgttgaggtggaagcatcaggaaaagcaaaagggcgtatgcttaatacaattcttgcgcctttccgttctgttattagcagctgccctgccgtgcttacttgtcgtgatgctgatatctgagacagcaacttctggtggctgcttgacttgagctccattatccttgaggtcacaaactatggtattttcagtttttcaccatgtcatgtcgacagtatcattctttttgtcgtgttgagaggtttttctgaatctggtttcgtatccattg

SEQ ID NO: 27531 - DNA, 881 bp, Zea Mays
agaaaatgttcactccccttcctcggcattggcgtcacattcgcagccgtctcactcctctcgcacagcatccgcttctcctgccaaaccctagcacctccgtcctccgaccccctcagctccggcgatggcctccaccccgcaccctccgccgctcatcggcaagtcgggaaacctcacggtgttcttcacgccatcggcggagcacgagagcccggggtccgagttctctacgcccccgacgagccctcgcgccgaggactcccctgaatcaccaccggcgcagacagcccctccgcccgcgcctgtttactcagtatccacgccgcagcttgtcaagatggtctccccgccgcttcccgccgagaagctctcccgaccctcgctggtccaggtgccgccattgcagttcgggaaggcttcggcaggatcagatggatcgctgcttgcgttcttctgggacgcggttgcacgcatgcaagaagcacacgcgagcttggacgagcacatctcgagatggttcgggctggaccagtccaagtaccagtgggcgctcaacgactattatgagaggaccgggcaggagatagatttgagcaacgttggcactcgttagcagcacagttgtaaaaattcagaaagcttgaaaaagtggattatttctagtttttatgtgtgtaactaagctggtgccgtgtcaagctgcatatagaatccttttggttgcgtgaagactgagttctctttttctgcacccggaagctcttggttgtaacaaatccatatttagcacctttattgtagcttcgttgtggataaagaaaaaccttgctgaccttttttttattgtaccttcattttcattttcgcattgttttttc

SEQ ID NO: 27532 - DNA, 3796 bp, Zea Mays
ttctaccactgtctcctctccgtgacgcacgcccgagatcctctccgcgacacacgcctccctctcctctgccccaccctcctccccacgccatcggcgccgccatcatcggatccggcccaagatgcctccgccccacgcgcccgagtcgtcgaggcacactccttcccgcctccgtcgtccacgcatatctccgcctcacctcggcgcccgagtcgtcgcacgcgttcgcggtggtgtccatcccggcaccggcctcacgcaccgtctacagctcccaactctgctcctctcagttctccctccgcatttcgccttctctcccttcctctccaagcagcgtcctcctcgcctagatccgtacaagcggcaaataacctctccggcggcgagacagatggagtcgacctccggcgaggatgctccgaagcacaacccgattccgtccgcgctcgtctccaacctacagtccgtgctcaccgcccgccgcttgtccgcagccgaggtcagcaccgccgccacagctagcgaggttgaggccttggcttaggaagcagaggcgttcgctgcccccacgggagatgggacgctggcgaggcccatcgtgctactgacctatgccggggggatccggtcggcgggtctcgcggcgctcgtcgacgccctcgttgccgccgaccgctgcgacgtccacgtgtgtgcccccgaatcgtacgtgctgcgacttagaaaaccaaaccacagcgggaccagtgctcggatagggtccgacgacgatgcaagcaaggagtggcgcgcggccgacggggcgcagatcggctcctgcacgtgcagcgcagccgcgtgacagtgaagcagggaggccgcgataggtggcgcagggagggtgcgacggaggcaaagtgcaagcacctggggacttcagaaagaaagagtacaagtctactactgcagaaagcaaggagaatgccaatagaagcagatttcatgtatggatcgggtaatgacctttttgtgttctcctcaactcattatttagctacatatcttattaaatcttaatctttggtcattagctaccagcttgcactattattgtgaaaatccattaactttagtcattgaaatggttagactatcaccacgtaggtgatattagtggcattaagtgattaatctgtggcaaatcctattatcaactattttcttggctaatcattacaatatataatgaagaatactatggcttgaagggatatttatacaattggctatgtatacggtctgcccaggcgcccaacaatgaatgatgtggtgaaggaacttgagatcatcagatagaatgaaggggcacaattgttaaactcagcgtctttatcagttgaacaatttggaaacaaaaagagaagagatccttatgcatttgtctatggatgatggaagcaacaacaacacttttgactacaacagtgggagttcaattaagttgttcacccaagtagataattgtctccactctttcaacaagttattggagttattatatatgtctgctccatatgaatgccttttcattttagtatcacatctgaaattaccaaccttttatactggcagtgtgataagcattgaataaaagtttttttatatgttgaatattcaacaatatatgtataattttatatatacataaatataatattctcatacgcgtggttgctccgttggtatattgttgaaaggttgttttttacggtacatgtgctgaaatggccatgctttgatctgcctataggttgaaccatataagctttctctcagactcgattatgctgcttacatgatccatttagctgtctttggatttttggggtaactctccaatatctcacatgaggttctttgtgatagctgttacttaatctgtggtgatctatgtaaatgtggcaacacttgcagttcctcgagcccttgtgcatggatatatcgtttagttgtgtctaataatttgtaattagtggcaacatctttttgttattttggttttatctgatttttattgttataagatctcgattgcaaactggcagttagtacacctttaggttttcctttgtcgtatcaagctaataatgtgtgaagcagggttcccattctgatctttagttttttgtgattttaatagcaataacctttttcgcaaaaaagtaacaaactttatgcagtatgcggttcgtatagttcccagtatccttttggacttagatttagttcgatatatggttatgtttattgacagaatgcttttagctttgcagataaaatcttgagcaaaatgggagaaggtttgggttttctgcaatctgtcgtctcctcttctgctgggtatctccattattattctaatgaagagggctacgagttggattttcgtaggtacatttgagcgtgttttggaatgctgggatcgtgaaacacgtgaatatgttgccataaaagttgtacacagtatccacaagtactgtgatgctgcaatgattgagatagatgtgctcaatcgccttgtagaaaatgaaaaatatagatttctgtgagtatctcagagacctaattgcttaaagtataaccctattctgtttttgacttgacagttcctcttcaatttgtcagctgtgtttaaattcagagatggcttgactatcgtaatcatatatgcatggatgtgttactttatgtttgtttgtgtttaatatagaaggctcccttgccttcgttcgatcatgtggtatttgaaagtgatgtctctataaatgaagtaaggcagggcaatgcttatgttactgttgtcagttattagatttttaaaccaagcatatgtcaatgtgtcctgtttcaatagggtcttattataggacgtgatgccactgaattaggatgtttgttcttttgctacctttgttaaacaacatcagatcattcgtattgtatccttcctcggattgcttcttttgttctactacaaatatgctcaacatggcaggcaggggtatgctcctaaattttttattttgtgcattgtgaaatgattgttctaacaacatcaagtttgtgttcttcatataatctatctcaaattgctctgtgttttgctggtctcgaggtcaagcctggacccactgtcaagtgtgtgcttggacatgactttgtcctgcactttctagtgtaaatctcattgtaatgtgtacttacttttctctgttggattttctctgtatacttacttggatttaatcctgtaggctacacttggggaatcaaagaaaagtgaaagtgccatgtcaaagttgatgaccagaagcttgctattggaaccctctctattgaaaaatacccctagatagaaattgatttggttttcaataaagagtgtgagctgtcacacacatcgaaaactacacgtgtatttttctttggttacaaggttgagcaaccaatcgaggaagatgaataatggatcttgattctgaagatgaagagaaggagctaaacattccagtaatcaaggaaaatggcaaaggtgatgggaaggaggaccagagaagtgaagagaaggcagttgctgcagcttcaaaatcaagtcttgggcttgaaaaaaagcaaggatgagtatgagtctgatgattctaatgagggagaaggtgaaaccggagaatgagcagatgcggctgttcatggacaacagcatcaagaaacctgcaacatgcaacctgattttaagaaatttgccacctgcaac

SEQ ID NO: 27533 - DNA, 2751 bp, Zea Mays
gtcgacgcgaggtgtttaattctgcgtcgcttgtgcgatgagtgcctaaattgagtggagcttggtgggatttgtctggattttgggcttgatgcgctccagccgtactctgacgcgacttttatttagtacccgctgcgctgttgcttgattttttcgtttggatggaaactgtgtcggtggaacattggtgctctaaggaaacgaacctagtcactctcgggattgcaggaattattatcccctggcgctcaggtaagcattgacatattctgtttgcctgcagatcgcaagggtaagaatggcaatcaggaagcagcagcaatgaagaacctcaaatctattttgcctaaggaggtgtttgatgctataactgctagtcaacaagaatcaggcacattgagtgttgatttttttaggaatcatgcatctccctcttggaaaactgatgatctagtcaccgagaagagcatggatgtcaatgacaatgctaaagctgaaaatagtttgctagaacattctgtgccaacaaatagatcacccaaagatccagatgaacatcaagttgacaaagcagcaaaagtagctcgaaggaaacttagggagaaaaggcgtgagaagagagcaatggatttggttcataaagatgatgaagcacgtattaagctggaaaatgctgccattgagcgatcaaaagctgtcgattctgctgtgcttggaaaatacagcatatggcgaaaagagaatgagaatgagaattcagactctacagttaggctgatgagggaccaaattattatggctcgtgtctattctacgcttgctaaatcaaagaacaagaacgatctatatcaaaaactgcagactcgaatcagagaaagccagcgggctgttggagaggctaatgctgatgctgacctgcatcacagcgcaccagaaaaaatcagagcaatgggtcaagttttatcaaaggctagagaagaactttatgattgtacggcaatcactcagagaataagggctatgcttcagtcagctgatgaacaggtcaggagcttgaagaagcagagtacatttcttagccagttggctgcaaagacaattccaaacagcattcactgcttgtctatgcgtttaacaattgattactatatcctgccccttgaggaacggaaattcccaaggagtgaaaatttagaaaacccaaatctctatcactatgcacttttctctgataatgttttggcagcctctgttgttgtgaactcaaccataatgaatgctaaggaaccagagaaacatgttttccatcttgtgactgacaagttaaactttggagccatgaacatgtggtttctgctgaacccacctggcaaggccaccatccatgttgagaatgtggacgaatttaagtggttgaactcatcatactgtcctgtgttgcggcaacttgagtctgctgccatgaaagagtactatttcaaagctgatcgtcccaccactctctcagcaggttcttcgaacctaaagtatcggaaccccaagtacctctctatgctgaaccacttgaggttctatctcccagaggtctatccaaagttggataagatactcttcctcgacgatgacatagttgtgcagaaagatttaacagggctgtgggatgttgatcttaatggaaaggtcaatggtgctgtggaaacctgtggggagagttttcaccgttttgacaaatatcttaatttttcaaatccacacattgctcggaactttgatccaaatgcatgtggctgggcttatgggatgaacatctttgatctgagggagtggaagaagaaagatattactgggatctaccacaaatggcaaaatatgaatgaagacagggtcctttggaagcttgggacacttccgcctggcctcttgaccttctataagttgacgcacccactggacaagtcatggcatgttcttggattaggatacaacccaagcattgaccgttcagagatagacaatgctgctgtggttcattacaatgggaacatgaagccatggctggagctagcaatgaccaagtaccgaccatattggaccaagtatatcaagtatgatcacccttacatccgtggatgcaacttgagtgagtagatagtcgtgctgaaaaactgacagatgaggaagagcttattggacagaagtgttccactaccatgtccttgcggtgcgttattcgactcagcaaagtggtactacctcaagctcttgattgctttcctcccctcctctcccaagaaaaattcaccggtggctgttctgacgagtgatgtattattatagcgatgcgttttttaattcaattattagtaatatgcatttatattttccgtcaaaattagcaggagaaaaacttataaaatggatttgtggggctggtgtcgcgtgctgcttagaggtatgcctagagaatcgagtgttgccggaattggatcctttttttgtatcagacgataaagtgggagtacaagccaaagcggaaggcatgaatcgaatggattacaggtttaaccctgagtcctgaccaatgtgaaactattttacctacagtatcaagaaatgctggtgtccgttttatgataactgatctcgtagctaatcttgtgtttctcggtcacgtgttacatggtgctagcgcctgagagattggattagtcaatttatttcacaaactatgacattttcttctagcaa

SEQ ID NO: 27534 - DNA, 2232 bp, Zea Mays
aagtcatacccacattttttactaaactgtgtcaggcttctgatttatatcatattaggttgaaccagagatgagtacggttaaaatgtatcaggtaatctgagggcctagttaaaatgtagaaggtgctactctggggcttgaaccattgtgaatgtattcagtactagattacttgtccaaaattatcttccttttttagatgggaaccaacccatcacctggttaaaatgagtttggttcaggctctttgacgcttggaggaccaagagatgagtttggtcccaagaaacacaagtagactgatgggtatccaggcacctggcccagtcggcatcagtgtagatgattagctcatgggtggagcgtcgaaggtggaggtcgtagttgatagtactccaaagataccgaaggatctacttgaccacacccaagtgtggctcacgaagattgttgaacgacatatgcgatgtcgagcctggtgaaggtgagatactgataagcatcgctgcatcggcgaggctacggtaggcaatggggtcactgacaggagcgccatctctagagagcttggcctgcgtgtccaccgaggtcacacagggtttgtagttcagcatgctagcccgcttgaggatgtccaggatggcaggatgtactgccactactggaggaagaggcccttggagcgacgctcaacgacaattccctgaaagtgatgaaggggccccaaatccttcatggcgaactaatgctgaagagcggcggtgatccggtgtaggagagccgaagagcaggtagtgagcatgatgtcatcaacacagaggagcaggtatacagtgtcattaacacgtcgatagatgaattgagatgtgtccgacttggcctcgacaaaatcaagagagagcagatatgtggtgaagcgtctgtaccaagtgtgaggggcttgtttcagaccatagagggacttgttgagtttccatacaatatcaaggtgaacatgatcaacaaagccagtagattgattgcagtaggtctcagtgagattcctatgaagaaaggcattcttgacatccaattgatgaattggccaaaaacaggagagtaccaaagtgaggacggtacgaccggtagtaggcttcacgacaggattgaacatctcgttgtagtcaacatcagaatgtcgagtaaacccctggagaacccaatgggtcttgtaccgatccaaagagccatccaccttccgcttatgtgtccaaacccacttgccagtcactacattgccacttgggggatagggaattagatactaggtgtgattggcaagaagggcctgatactcttcctctgtagtacacaacgtcaataaggatcgagacatgcctatacgtgatgtggtagcaggcaccagaatgggactgagcgagtgatccaagtaaggaagtgatcatagcgcttgttgaggccgcagaggaggttgaggacgagcatgtgattgaagacagaagacgggctcctcgaggtcagagagggaggctgccatgcgcttcatttgacgacagtattcggtgacagagaggttcccttgcagaaagttcgaaaagcaacatcaaggtggagagcacgagcctcacggttgtcgaggaactgctcctcgatggcaacccaagcctaacgggcagtgccaccatgccaacatcctacaactcaacagtgacggtccccaaggatctacgagaggaccacactattcatctgccaccaggatgggatagtgagggatgcagcgttggtgaggacatggtcatctatagggcgtagcgctggacaatgtggctgggtatggagtggctttggcagtaaaagatatctacgctgatgcctttggagaaagaaatttgggctctaaccttgtgggcctgatggtaaaggatggacgacaaggaaaggtgaatgccaaaggttactacatttatgagaagggtgcgaagccaaagccagaccctagtgttaagcatgtgatcgaggagtaccgaaagcaggcaaacacaatgcctggtggaaagcctgttactttaatggatcaagatattttggagatgattttcttcccagttgtgaatgaggcatgcagggttatggatgaaaatgttgtaattcgagcttccgatcttgatattgcttctgttcttggaatgggctttcccaaatacagtttgaatttacttttttttc

SEQ ID NO: 27535 - DNA, 927 bp, Zea Mays
cttcaactagtcgcgctgtcacggtgccgaacagcgtgtcatcgccttcccctccctacaagccaaacgcgaataccacccccgtgacttcccgatctccggcgatggccgcgcggcgcctcggatcccccgcatctaggtggctgcgcccgtccgcgctgctcctcctggtcgcctctgctctcctctcggccccgtcgccggcccgggccctccggttcgacctcgagtccggccacaccaagtgcgtctccgacgagatcaaggtcaacgccatggccgtcggaaagtaccacatcgtcgggcccgaccccaactcacccgacgcccagctccccgagtcgcaccgcatctccctcagggtgacgtcgccgtacgggaacagcatgcactacgcggagaacgtgcagtcgggccacttcgccttcacggcggcggaggccggcgactacctggcctgcttctgggctcccgaccacaagccgccggtcaccatcgggttcgagttcgactggaggagcggcgtctccgccaaggactatcccagcgtcgccaagaagggcaaggtcgatgaaatgcaggacgtgaacaggcgaacgaactcaaggatggcttggctagggttcctctcccttggcgtctgcttatcagtggcaggtttgcagctgtggcacctgaagaccttctttgaaaggaagaagttgttgtagactgtagttggcccatggttcacggtagacctcagcgcaggtgtaacctatttttgggtgaactgccgatctgttacggagcttgaaatcccatgtaacaaacgttatgtcgtacttgagaaaatatgctttagcctgtccagttgaaattataagaaacttgaaatagatactaaattgtcttccattcaatagttcgtgttgcaatttggacttc

SEQ ID NO: 27536 - DNA, 1523 bp, Zea Mays
accgtcaatccgctacgccacagcaacgaccaaccggagccgccgccgccgccgccgacggggacggggacagggaaaccaccaccaccaccaccggccatattaacagctgcgcgtgcacggtggagttctacttccgcccgcgattcgactcgactcgactgctcgttccgtctcgaccttcaggcgggtaagcaggttgaccgtccgcgaattcaccgtatcccgggatacgtatgggttccaaagcgtccttccgcgtcacgctcctcttgctgctcctcgccgccgcctggggacctgctgcacaggccgacgacgctggtattggtaacaggctttgccatccttttggttgtcttctaatcacatcttggactccactccattatctgctgctagctgctgcaccttttttttgactacttagttaaaacccggtttccaaaccgttattagcggctaaaacttagctgagagatctagagccggtggtctatttgagaggtttggaacgggtgatctaataggccatctaattgtttgcctatatctctcaaatagctgttacttgttatctgctccaacccaattcttccttactattagttgttgttggaccatacccaattcactgccctctcactttttctccatcttgcacagctgagctcccggatcatattgctattaccttgaaggagcaggtttcttcgaccaagattcctgtccgtctcaagagtggcagcccgctgtgctcagcctgtgaaaacttcacgggcaaagctgtcagttatatcagtgagaaacagacgcaagataaggtcatgggattccttcatgacgcttgctctcagtcattctcgtttgaacagaagtgtgatgaattgatggactcttacgcaaccctcctgtttgccaagatcacggagatcaaaccagaagcgttctgcaaacagtatggcctgtgcaggggcacggctcttttctctggtgtgacaagtgacagcacatgtgtgttctgccaccacctgcttgatgaagttatgtccaaactgaaagatccggacgcggagtttgagataattcagattcttatcaaggagtgcaataagattgaaggccacgtccagcagtgcaagcgactggtcctgcaatacattcccctcatcctggtgaacggcgagaagttcctcgagaagaacgatgtttgcgcgctcgtacaggcttgtccagccacccataagaagactttcagctcagtcttgaagggagccttgttgctgagtgacgcttgaaggttggagaagaacacgcaaagcgtttagcagtggttggaaatagtgtgtccaagtgccgtgtttgtacatataattgtcatatgaatgcatgaagacgtgtcttgtgccctgcattgttttcatcttgtatcataattcataaacacgttgtatttatggacatccacagggggtgaaggttaaaatatatttgtatcataattcatataagcacattgtctt

SEQ ID NO: 27537 - DNA, 779 bp, Zea Mays
gttaagtgaaaaaagtataagagacggggttttttctgtgaagagcccgtctctacacgactctctatacatattatctcttaactacatttatgatttagtggctctgagttatatcatgtggtattttacatgtctctcttatatttggaaaaccaatctaaaggtttagggttatacatgcccttagggcttaaaaagttaatcctcatcgacatatatgcagattgatgatataaacttagctcttcacggatgctggccagtatgctatccggtttggtgatgaggggcaaagccacaagtttgctcccgcagaagatgtcgaagaactgcatgttgttcgccagctgactttgcctgaaagggcagtggctcttgctctcgcgatttccttggacagtgattacttctctagaagaggtggctggggacttccgtttctgatagccacagagtagacaaatgaaccaccctcgcccacactcaaggaaaaaactttttttggggctctcaatttcccaagagtgcaagtgtatgatatgagtggcttttagaattgctaaaactcaatcattactacgccattgtcacattagttggtaaacaggatgttgttgatgaaagggatgacttttgcttcatcggtgcccagtcggtgtcccagtcttgatcagcttgaacggatgtgttgcctttgcctcagcggtgcccagcaacgacgtgtccgatctcgtttacacaaaacgtgtcgttggaataataatgacaagtttcac

SEQ ID NO: 27538 - DNA, 174 bp, Zea Mays
ccttcaccaaacagatgctcaggatcttcaacctcataaaactcagagagcttgatcatttggtcgccgacgcttgatcgtcgattcctcggagcgcggaaacaaatcgcgatctaatcgcaatgcgaagcgaagacaaacaggaacaaacaaacaaacatatatgcataagaa

SEQ ID NO: 27539 - DNA, 4994 bp, Zea Mays
cgaacaaccaaaacccagcagttccgccgtcgcggaattccgaaagcccgccgtcgccggagacgatcgcgcacacttcgcacgggcacgactgtggccaaatggcgccgaagaagaagcagccggactcgaagcagaggcagaagcccaagtcctcgtcctcctcatccgcagccaccgccgcgccgcgcctccagatctcgtcggagaacgagcgccgcctccgccgcctcctccttaactcctccgcaccatccccgtcacctgccaacgtctcggaagtccgcggcgagtcgagggagcagaaggcgcggcggctgcgtggcgtgtacgacaagctcgctctcgagggcttctcttccgcgcaaatcgagcaggcgctctccgcgatacccgattcggcgacgtttgaatcggcgttggactggctatgttttaatctgcctggcgatgagctccccctcaagttctccagcgctggcgacagcaccatgtcgtctctcacaggagctgaaggttctgttaaagtactgtccacagccaaggacaattgggtgccacagagtcgtgaacctgaggaggtgaaggtgagcaccgaggggttggaagttagaattggtgggcggagagatgagaatgtgtcactggatgatgggcgattgtcacaagctgcatggattcgtcaatacatggaacaacaagaggaggaagaggatgcaaattccaatgattcctctacatgggaggatcactgcttacaaagttttgaagttgtcgaagcaaagccaagtaggcggaagagcaaggctgcaaaaaagaattccaagcatggaaacttgaaggaacagataagctatcctaccaattctgtatcttcaaattctgaaactgcaaatgttgagggtgttcagaatgatttagaggcaagtgaggaaagatctgagagtctaggcaatattgatgaaggatctgatttgaaaaaggaaattcctaaggatattgataaaacttgtgcaaaggaggtagacgaagaggtgatagagcttgataacatgttctttgaagactcatctgcttgggaagcagtggctccagaaatcttgaaacagcaacaaatagagaaattatcacatgatggttatggccatcttattggaaacatagatgatatatggaagaagggagattctggtaaaatgccgaaagctgttctacaaaagttttgtcaaaaacttggttgggaagcaccaaagtataataaaatatctgagagagatggcaaatttgtatattctgttaatgtgttgcggggagctactggccgtggtaagagtcggaaggctggaggcttgacgataatccagttacctaaactacatgaagaatatggatctgttcaggaagcacaaagtcgagttgcagcttttgctctatatcaattttttgctgaccttccactacgtcaactgcttactgagccatactcatcacttattttaagatggcaagaaggtgaattgtcatctacatcaagggtgctggttacggaggataggcgaagatctggctttgtagatatgttattgaatatagatgcagatacaattccttcatctgaaatagaaaattctgatactgatgtcatatctatggattctgggaatactgaaggcagcaaatctgtgaatgagaagagacagactaccatgacgagttgtatgggattgaaatcagcagagcgtgcagagagtgcaattttgaaaaagcagttggaagataaaaggaagctaccaaattacttgaaaatgctggaagcaagagcttctctaccaatagctagacagaggcaacacttcctacagttgctgaaagagaacgatgtagttgttgttagtggagaaactggatgtgggaaaacaactcaggtgccacagtttattttggatgacatgattgaatctgaacttggaggttcttgcaatatagtttgcacacagccccggcggatagcggctatttctgtggccgaaagagtatctgatgaaaggtgtgaaccatcacctggatcgaatgattcactggtcggataccaagttcgtctcgacagtgcacggaatgagaggacaaagcttttgttctgtactactggtatccttctcagaaagttatctggaaacagagacttaagtgatgttacccatgttgttgtggatgaagtacatgaacgtacaattttgagtgacttcctgcttattgttcttaagaatcttgttgagaaacgctccaatcaacaaggaaggaagttgaaagtgattctcatgtctgcaacggttgattcaagcctatttgcacgatattttggagaatgccccgtgatcagtgttgaaggaagaacacatccagtgtcaactcattttcttgaggatgtttatgagaaaatggagtactgtcttgcattggattctcctgcatcaggagcttactttgcgcagcatggggaaaagtggaagcatgctagcagctcagtgaacaaccgacgaggaaaaaagaaccttgtcttatcctcatggggtgatgagtcaacgctttccgaaggctatgttaaccctcactatatttctgattactataggtcatataatgagagaaccaaccaaaatctaaaacgcttgaatgaagatgtcatcgattttgatctattggaagacttgatatgctatattgatgagaactgtcctcagggtgctattcttgtttttcttcctggagttgcagagattgacttgttgattgatagattatctgctttagttagatttggaggggcatcatctgattggatccttcctttacattcactgcttggaccctctgatcaaaggaaagtgttccagtctccaccagataacttccgcaaggttattattgccacagacatagcagagaccagcattacaattgatgatgtagtatatgtagttgatactggaaagcacaaggagaaccgttataatccacacaagaaaatgtcaagcatagtagaagattggatttctcgtgcaaatgcaaaacagagacggggtagggctggtcgtgtgaagcctggtttatgtttctgtctgtatacaaggcatcggtttgaaaacgtcatgcgtccatttcaggtgcctgagatgttacggatgcctttgactgagctgtgcctgcaaataaaatcacttcatcttgatgacatcaaatccttcctgctaaaggcagtagagccccctaatgaagaagctatttcctctgcagttgacttgttatacaaggttggagcttttgaaggacatgaagagttgtcacctcttgggtatcatctggcgaaactgcctgttgatgttttgattggaaagatgatgctttatggtgctatctttggttgtttatcaccaattctgtccgttgctgctttcctgagttataaatctccatttctctctccaaaagatgagaagcaaaatgtggagaaagcaaaagccacattattgaatgagaaccttgatggatctagttctgtaacagataataaacaatccgatcacctgctaatggtaattgcatacgacaaatggtcccgcatactgctacagaatggtgataaatctgctcgtcagttttgccattcattctacttgaatagtactgtgatgcacatgatcagggacatgcgtcttcagtttggtaccttgttagcagacattggacttatagatcttcctaaagatactctgaggcacaaggtgggcagtagaaaaaataatctcgagagctggttttctaatatgtctcttccattcaatgcctatgctcgctgcacctcggttattaagtcggtgatgtgtgcaggtctataccctaatgtggcagcatctctagagggtgttgatcctggagctctaggtggaagaaagccatctgatgttctgttcagtaaggaccgtcctcgatggtatgatggaaggcgagaagttcatatacatccatcatctgttaatcacagcttgaaagctgttcaatatccatttttggtgtttcttgaaaaggttgagacaaccaaggtgttcttacgtgatactagcgtcgtttccccctactcacttcttttgtttggtggttccatggtaatccaacatcagacaggagtggttgttatagatggatggttgaggctgtctgctgctgcacagactgctgttttattcaagcaacttcggatgactcttgatgctgttctaaaagaactgacaagaaaaccagagatggcaacttttgttgacaacgaagtggtcaggtccatcattcatttattgttagaagaagacaaggctcgataagcatgaattcatggcttttgatcagtatcggtttctgccgatgtgcacgttagtctgcacaggattcttattgcacaatgtggctgattgctaatgtggaagctgcaaagcggaaaaggagtttaatatattattcggctggctggttgttttatatggaacaagtttgtgtcggtctagtattagtgtaatacccttgtcctaattttggagcttacgtgcatcaacgtacagagcagataaaactcaaaagcctgaattgccgtcaattttccatctgacactttggacagaaaaaatgaaaaaaaatgaagagggaaaaaccatatacatatatgaaactgtagcaaatactattatagatggcagttagtgatgatgagagttgcattaggattcctgatatttagcgttgcacaccttgcacttgttgtacctcgtgatagttgcaattgaaaaattttggaacccaaccgtacgtgcatctcgtacaaagtactgtccgttctgaattacttttttcttgagaattttccgtgcttatgacaagtgttttagtactgtaaaaaagtgactagtacaggcgtacagctcggtaggtttaggacgaatgatatt

SEQ ID NO: 27540 - DNA, 1373 bp, Zea Mays
cttcataaaaagttatggcccttagggatgggattcattggtcactgcacgtgcagctgaactcctaagtttaaatcttgaaaccatggagaagttgaaggaatcagaagagctattggaacgatgccttgcagtcaagaaaaagattctacctgaagatcatcttcaggtagcttatacgttggtacacctggcaaggttaacattgcacagagttgtaaaggatcgggatgtaaacagcgatgtaactgcatattacctcgcaaaagcaaaacagttcagcaatgattcaatcaggattacagaaggacaattaaattcttcaagaaaagatcagaataaaattaacaacacatcaactgcagatacagataagagtgcagcaataattctttttcaagcacttcatgtttttggactcattgatattgcagcgaagcagttgctagggcaagggttggtactgttgctaaggcttccactggaacatttgaagcatggattcttcaaaattgaagctgtacatataccaggcacacctcggccatttatatggaccgacacatataccatatatgcccgatatagcgcactgcaaatccattttaaaaataagtttggaaaggagcaagactataattctgttcaagatgctctgcagaagtgtgtttcactttacaaagagcctcatacacgaaggttggtgaaaaatgctgccaagcaggactacatgatatgcctgacgagcctgatcgatatggttcagagcttgtttcccattccacacataccggggttgcaggagttgctttgcgaggccgaacaaattttaggagagctagaagaagagagtactaggaagaagcaatgatacgtaggaaccaacacccatatgggtggaagcatttgttaattgcaagttgtgagccatatattttttcagttggtcgagatcgcccacctatatgggtggaagcatttgtttgacgaggtgctgaatcgagtgacgggttaaagagtttaatgcttgtttgcgcagtggtgttatgacgtggtcttcaacatagagtcctagtttctcggtggtggtggtccacaagatagatcatgttgctgaaatcttggatgctttctaaatcaaaatccttgacattggcgaccaaaaaaaaagatccctatcaatggcggatggccaaactgaaccaaggattggttttggcatagaagctcttcctaaaagttgtgctggctgtttgcgtaattcttttagatattgtggtcttagactatctctagcaacttactcatctttatctctatatttaaactccacattataaacaatgcactttacaatacaaaacaatattttg

SEQ ID NO: 27541 - DNA, 1514 bp, Zea Mays
gtcacccaccgcggcaatggagtccgacaccgagcgagacgtccacaactcctcccgctccactaaccctagcggccaccaccagcgaccgcttcggttagtcaagtctacggcgttcaagcgggaggagcgccgcaagcgcaaggaccgcaagcggcagaggcacctcgttgacgagctcgtgcggtggcaacctctcggcgccccgacgcccctcccagccgccaccggatccgtgtccccctcccaagcgcagcccgatacgccttggccgtgtgacccgccgccgcctccggaccccgcggaagccgactcctggagctggggcccgcccgccgtaccctcgccgacgccgacgcaacccacagtcgacgtggcgggcgcggtccccttgcaccctcaggtcgtcgccgtaaggtcctgccgcgcgttctttgaatcgcagttcgaagaggacgaggaggaggagaacgagggcagtgcggctcgattcttcagcgagctgctgggcagcgacgcggcgctgagggggttctacgaggcggagcgggacaaggggcacttcctgtgcctggtgtgcgaggggagcggcgccaggctgggcaagaggtttgccggatgcgccgcgctcgttcagcacgccgggtcgatcgcccggaccaagtggaggctggcgcaccgcgcgttcgccgactccgtcggcctgctgctcggatggggcgcaggccggattgctcctccgccggtaccgccaccggcagctctcagatggtagaaatggagctgtcgtgactcctgatgactgcagtctactgcaacaaggtttgtagttttctcgtaactacgcgttgttacagagtggagactgatcaggatggaaacagtggctagcatggtttaatcatcttgacctcaataatcatcacattgcggcatatctgatactatctcgacctgatgggctggggttgctgccttgctggccagacgggttctattttggtgtccggttatgatgccgaagatgtgaaatcatcatcctcgatttttccgactggagcaataagctggaagttcttcacagagccaaccataacccgaccatgaacattcaaacaccagcaccgcagatcctcaagcgaacgtggtgctttaatgtacagaaccattgtggtgtcgacgtgtcgtcatttacagggcactggataccgcagtgtattcttctcgatcctcttcaggacacttctcccgtttcaacattaccgaatgggtctgtctgtttgtttccttgcaaaccacggtctgtatcagctgattggcaccttcatcatattgtagctgcagagcattagtgaacctttgttctcgtgaagtcagacctgaaagcaggttgctctatcaatgaaggttttgggcacctcgtcagcttaactccgtgcggtctggttctcatatctgagccaggctggccagaagcgaaacaatcattcactgacgaagcagctctaatgaag

SEQ ID NO: 27542 - DNA, 1565 bp, Zea Mays
tttttttcttatttggagggggcattagggaagcgcatacgttcatataatatatatgatatctgaatctgaattttcagaagggaactgatgatctttgttccagacaggagtggttgttatagatggatggttgaggctgtctgctgctgcacagactgctgttttattcaagcaacttcggatgactcttgatgctgttctaaaagaactgacaagaaaaccagaggtatggtgtattttgtgttaatgaacatgcaagaatggccagttgatgtaatggaaatgcgtgcagctgaagcatctattgtccatctccgcatgcagttgcttaatttctgttcactgtgtcataaaattgtatatctttctttgtacaaaacctgcttgacatcacagaagatatgggctgcaagcctgcaactccccttttctaattaccttatctgattgtcttatttcagatggcaacttttgttgacaacgaagtggtcaggtccatcattcatttattgttagaagaagacaaggctcgataagcatgaattcatggcaatcctatcgatactaattttttagtaaaaacactatcggtccctaaaattttttagtaaaaacactgtcggtccctaaacttttaagtgtatcatccggttcctacactcctaaaatgcacatcgagctttctttggtagggaaacttgtatgattgctcgtttgaatcattctactgcatatcactaataaaatatattttttctagccccttttttccgtccacgtttgaagaatgataatgaatagacatacatacaaactacattcacatgttaatcaatgaatttatattaaatctaaaacgaattatattttggtaaatgataatgaatagacatacatacaaactacattcacatgttaatcaatgaatttatattaaatctaaaacgaattatattttggtacggagggagtaataattcttgagttgagtagtagtatcatctgtttggtaatttcattatgatatgataattttaactggccaatgaggatcaatattttgtaaatgtgtccatgtgattatgatttcttgcacgattcgaaaatgtaggagaaattacgggttggcatcttatccattttatttgttgtattgggtgtcttaatggggccaccagagacaggacacagccacctgatgttgagagactggaaacattctaattgtgtttctatcgaaacaaaatttgaaagtaggggactgcaaaataagggtctgttacagatccgtcatcccctactctcgaccaagtaggggactgcaaaattcactctaccaaaaaccactcaaaataccactaacaaaagaaggacctgaccaaccttccgctagaactacttagccaaccccttgaacgaaacctgtcaaataatggtagaaaacatggtgtctagtatgtaagtttgaagatacgcttttcagctactgttcttgttgctaatgtacgcttaatatccagatgatagccttttttaggatataattatgctattcagttgca

SEQ ID NO: 27543 - DNA, 200 bp, Zea Mays
cttgaacttcgcgtatggtactgaaccttctttacatgcctagcttttttttgcatttgatgcccaatttaccatgtcactacaacgagaaccacgacaagaacaagcatccacaccgaaattgttgggacttctgtcctatcactatcagtgcacggcaataggaagatttcccatcagtggaagctggaatacaaagg

SEQ ID NO: 27544 - DNA, 3227 bp, Zea Mays
attttcctccgcttcttcttgattcactggtggtgcacagatcaagggaggaggagaaggagatggcgtcgcccttgtcttcctcctcctccagcaccagcaccagcaccagcacgctcctccggctgatctgcctctgcaccgccttgccagtcgccctgcaggcggcggcggcgcgcccgcccaacgtcaccgtcggcgccctcttcaccttcgactccgtcatcggaaggtctgccaggaccgccatccagctcgccgtcgacgacgtcaaccgcgaccccgccgtgctgagggacaccaacctcagcgtcatcttccaggacaccaagtgcagcggattcgtcggcacaatccaagccctggagctgatggagaggcatgtggtggccgtggtgggcccccagtcctcgggcatcgcgcacgtcgtctcccacgtcgccaaccagctgcgcgtcccgctgctgtccttcgccgccaccgacccggcgctcgcctcctcgcagtacccctacttcgtccgcgccacgcacgacgaccgcttccagatggccgctgtcgccgacgtcgtcgcgcaccacggctggcgggaggtcacggcggtctacgtcgacaacgactacggccgcggcggcgtcgtcgcgctcggagacgcgctcgaggccctgcgcgccagggtctcctacagggccgcgttcccgccgggcgccgaccgcgccgcgctcgccgacctcctcgtgcgggccaacatgatggagtcgcgcgtcttcgtcgtccacgccagccctgactcgggactcgacgtcttcgccgccgcgaggtcgctcgacatgatggccaccggctacgtctggatcgccaccgactggctcgccgccgccatcgatgctgctggtgctggtgctgctgctgctgctggtaatatacagggtgtcctcatgctgcgccagtacaccccggactcggacgccaaggcgtcgctcgtctccaggttcgcggccaaacagtacatcaacgcgtacggcctcttcgcctacgattccgtctggatggcggcgcgcgccatcgaccagttcctcgacgacaacgccagcggcggtaacgtctccttctccgccgaccgcaacatccgcgacgccaacggcagcgcgctgggcctcagcgcgctcagggtgttcgaccagggcgagcagctgcttcggaaggtcatgctcgccaacttcactggcgtcacgggcagcgtccggttccagttggacgccgatgggagcgggggcgcgaccctcatcaaccccgcctacgagatcctcaacgtcggtggcacgggcgtccgccgggtcgcctactggtccaactacacgcgcctgtcggtggaggcgcccaggctgctcgccgacggagggccgccgcccaactccaataacacgaccacccagcagcagcagcagatgtacagcgtcatctggcccggtgacaccacggctaagccgcgcggatgggtattccccaacaacggcaagccgctgcggatcggcgtgccgtaccggacgacgtacaagcagttcgtgtccaaggaccggtccagccccgacggcgtcagcggctactgcgtggacgtgttcaatgcggcggtggcgctgctcccgtacccggtgccggcgtcgttcgtcctgttcggcgacggcgtcaagaaccccagctacaacgatctggtgcagagggtggctgacggcttcttcgacgcggcggtgggcgacatctccatcgtcacgaaccggacgcgggtggtggacttcacgcagccgtacgtggagtccggccttgtcatcgtgtccacggtgaaggccaagaactccaacgagtgggccttcctcaagcccttcacgccggggatgtgggccatcatcggcgccttcttcctcttcgtcggcgccgtggtgtggatcctggagcacaggttcaacccagagttccgggggtcaccgaggaggcagatggtcaccatcttctggttcagcttctctacgatgttcttcgcgcacagagagaacaccgtgagcactcttggccgcttcgtcctcatcatctggctcttcgtggtgctcatcatcaactccagctacacggccagcctgacgtccatcctgacggtgcagcagctgtccacgggcatccagggcctggacagcctcctctccagcaacgaccccatcggctaccaggtcggctccttcgcccggagctacatgatggacgagctgggcgtcccagcgtcgcgcctccgggagctggccatcgacggctacgccggcagcctgcagcgcgggcccagcaacggcggcgtggcggccatcgtcgacgagctgccgtacgtggagctcttcctctccaccaactgccagttcaggacggtgggccaggagttcaccaagagcggatggggattcgcgttccagcgagactcccccctggcggtggacctgtcgacggccatcctgacgctgtcagagaacggcgacctgcagcggatccacgacaagtggctcagcccagggacgtgcgcgtcgcagagcaccgacggcgtgggcgccgacaggctcaatctgggcagcttctggggcctcttcctcatctgcggcgtcgcctgcttcgtcgccctcctcatctacttcgccaggatactctgccagttctgcaagtaccacggccacgggaccaccgacggtgccggcccgttccccgtcccggagaggagcctgcggcggcccgccaggctcaccagcatccgggacctcatgtcctttgtcgacatgaaggaggccgaggtgaagagggccatccggagcaggtccgacaggcgactcgacgggtccatgggcggcaggagctacacctccgaagggccgtccttgtcacggccgtcctccatgtcgccggtgtaagacgggccggcggcgttcttcttcaagacacgttttttgtttgtgctgatctgacttaggtagttggagcctggaggcgacgatctgaaatcgatgaaaccgtgcgtatgcacaaattgctattcaacgaacatacacacacacacgatctttcggaagatagaatctgtaggtgctagtatgcaacgtagttctcccctagaattgcaggggtattatgtacaaaagtttcaggtttttatggacagctaaagttgaaatgagaatttcttttctatacatata

SEQ ID NO: 27545 - DNA, 883 bp, Zea Mays
ggcattttgatggatgcaaagcagacttggttgtttgcgatggagccccggatgttaccggacttcatgatatggacgaatttgttcagtcccagcttatactcgcggcattggctatcgtgactcatgtactcaaagttggtggaaaatttgtggcgaagatatttcggggtaaagatacgagtctcctgtactgccagaggcgtttgcggtctgtgagaactactcacctcctgaagggttcaaggaggaagacctataccacctgctagagaaagtgggtactccctcaggagctggcgatctagattgcagaagcggatggctggagggaccaaacaaggtgtacatcccgttcctggcctgcggggatctgagcggctacgactccgaccgctcgtacccgctgcccagcagcacggacggtggctcgtaccggagcctggaccccgtgcagcctcccatcgccccgccttacaagaccgccctgcagatgaagaaggcttccagccacggcgccggcgcggacgccatcaagccgtccgcagactcctgagccgcagaccgtttccgtttaccaccttgcgcggtggaagttgctttcgctgggtcctggacctggctctctagtctctctctacagaaacagaaccttcatctacgaaactaaaaaaaaaggaaaaaggattggaaacattgttgtggtaattttgagctggggatctgtgcagcacgtaactggttactgctgattaggctgagatcactgtttgtgtcctttgcatatttttgccttgtcttcggcaaccggaattccgggtgggcagcgtctcgtgcggtcgtgccctcaaggggcagcggcagtcccgtctcttccttctcc

SEQ ID NO: 27546 - DNA, 1691 bp, Zea Mays
ccagggcccacctgcagtcacaaaggctctgggcagtgacctctgcggccgcctcctctcctctcccagtccgcccctcccgcctcgttctctccgccatcgtcgccgccgcctccattcctccaccagtccaccatcgccacctacgcccaaccaaacccaactccatctcttccgactataaacgcaacccaccaccgctgccgcgaacctctgcgctccgaataccccagacccccgatcctcccaatggccaccgcattttcgctgcgcgctgcggccccggccaccgctccccgcgccgtctcccgatccacctccgcggcgagggtcgtgcccatggcatcggcactggcgggacgcggaaggctggtggcgcgtgcagcagttacaccatgaggtcttgctgtttgaagctcttcgtgaggccttgatggaagagatggaattagatccaacagtgtgtgtgtttggtgaagatgttggccattacggtggttcttacaaggtgacaaaaggtttggctgatacgtttggtgaccttcgagttctggacacccctattgcggagaactcgtttactggcatgggagttggagcgggaatgaaagggctgaggcccgtcgttgaaggcatgaacatgggattcctgctccttgcttacaaccagatctcaaataactgtggcatgcttcattacacttccggcggccagttcaaaatcccacttgtgatccgtggccccggtggtgtgggtcgtcagcttggagcagagcactcgcagcgcctggaatcgtatttccagtccatcccaggcctgcagatggtcgcctgctcgactccttacaacgctaagggcctgatgaaagctgccatcaggagcgagaaccctgtggtgctgtttgagcacgtccttctgtacaacctgaaggagaaaatcccggacgaggagtacgtgctctgcttggaggaggccgagatggtgcggcctggggagcacgtgactatactcacatactcgcgcatgaggtaccacgtgatgcaggcagcgaagacgctggtgaacaaagggtacgatcccgaggtcatcgacatcaggtcgttgaagccgtttgatctgcacactattggcaactccatcaagaagacccaccgcgtgctgatcgtggaggagtgcatgcgcacgggtgggatcggcgccagccttaggtcggccatcgtcgacaatttctgggactaccttgacgcccccatcatgtgcctgtcatctcaggatgtgcctacgccatatgctgcgactctggaggatgcaaccgttgtgcagcctgcccagatcgtggctgcggtggaacaactatgtgcatagattgtggcctgggacgtttgggagactgttgttgccatgaaaaagccttccgtttgttagttttgtgctgtaacaagcattctttggagacttaaggtgtaggcttatagtcgttttgttcttgttttaagaagtataatccagcttcgtagctgcacggactcgatcttcttgttcctaaatctgcgctatgcaatgccgaatttgatggttcgaacatttcattgttgacagaaataatcattgtactccgatgccatgaacctgtagcctccagctgcactggtcagtgaaacacccatgaacaaagtatttgcactaagtg

SEQ ID NO: 27547 - DNA, 1349 bp, Zea Mays
aatcctcggttttctccgagtctggggctgccgcgcgccctgggccgcacaaaattcggttggtgagaggaagtgacaggcagggcagcgcgaaagccagccacggggacggagcggctagcgagcaagcgaaacagcactatacaagtcgtcttcttctccgtcccttgggccacctggtgttcttctataccacgcgtccacgccactgctaagctgctccccgttcgccaggtcggcgaccaggcgaaacgtgctgctgcaagaagaagaataggtacacagacagcatgtccggagttcaggcgatgccggcggccgtgggcgtggcggggctgagagggtcagggttggttagcagcagcagtaccggcttgttcgccggcgactgcaagaggaaggctcgtcgcccggcgtgctcggcctgggccctcaggcagagccggatcggcagcaggagcaggagcaagaggggcctcggcatcgtctgcaacctcgcgggacagtacgaggattccttcgacgacgtccagcgggccgtgaggaccgtgctgacccagctctacgagctgaacccgccgagctaccgctggttctacaacttcgtcgctgtcaacaagcctaccgacggcaagcatttcctccgtgctctcggcaaggagaggcaggagctcgcagagcgagtgatggtcaccaggcttcacctgtacgggaaatggataaagaaatgcgaccatgccaagacgtacgagaagatctccgacgagaacctggcgctgatgcgggagcggctgatggagacggtcatctggccaaccgacgacagcagcacggagaagatcggctgatgcctgatgcctgcggaggcgccgagtcctttcgggttgctgatcaagcttagctccttctattagcatgtagagcagcactctgggtttctctatcagtcagtcagtcagccagccagtcagtgggttgtatataatcggagttgtagtagacagtatacatttctctgggcaggcaatcactgtttgaggtgttaacagtgccgttttgccctcccaattaagcctctacagtcggtctaagtgaagcaaaaatgcttaccttgtagtagctaaatttacatgtgcggggatatacgttgtaatagaatatttctgcgccccgtacgtggctgtttgatgaaagcattctgtacggtagtcaggaaccctcttctacctgaaccagtcgcgagcgttcgatcgggcaaactggccaggatgacgttgctctcagttcttgttgctagttctgcttcttgcgttgatatatagggtcctgccctgcgtcgtcttcgtctc

SEQ ID NO: 27548 - DNA, 1340 bp, Zea Mays
ggcgtattggtgtcgcgtctcgcgtaagcaagtggggaagacttcatcgccgtgcgcgcccgccataccgcgcaccgccacctccatcgcgcgccggccagcccccgctcctccacctccactacacgcgccggccagcccccactcctccacctccactgcacgcgccggccagcccccacttctccacctccaccgcgcgccggaagcccccgctcctccacctccactgtgcgcgccggccagcccgctcctccaccgcatcaggaaggcgagccagagatcgagcggcccgagaaaaggaggaaacacaagcttaatcagaagccgaagcccagggagctcaatccaatggagtggatcgctgaagcccggcaccagtcggcgcggccgcgggcgctgccgcattggcaggcagtgctgatgggaatcgggatggactgcatccgctaggcctctccatcgaccagtgggttcccctgctcaagttgtattgatttgcgtgcgcgcggtttctgccaatctggcgacctgcttcagaatctgatcttcaagacacattcagtgaagatttgttctcaggttgatctgtgcaattttgaaggcactcatggtgtcaagtgaggactggcaatttccaccagcgcgagacgttgatggtgtccatcttactgtatttagttgggttttagtacctcgtacctccaaaaggtttcagttaaaggacatgtcctggagatcaaagattcagctctgatgatgctaaggatgtagtccattaccaaacaatctcaccaaagagcttagctaaatctgttctcgaggaaggtggctggtcaaacttcatgttctcaagggaggatactcagaataatattgatgttgccattgtttttattggctcaaagctgcaatcgtcagacatatctaaagataagcaagttgatccagctttagcagacacactgaagtctggagcaaaaaaaagtggtggctgtattctcaaggaacatgagaccactgagctctggagtgaatgaaggacgtcgtctttggaagtcagacatcacctagagctagggtgtccattcttgacatgtttctcttagtgataggtggatactgtctagctaggaataaagtcttgagggattgatggacgcatgcatctccaattcctgtgtgttgtattactactggtacaatctccaattcctgtgaacttatgtatttggactgtgaatttgtgatatgaacatatatcaatgtgtttgaaatctgtattgtatgtgatattctgtattggatgtgatattatctgtgtctaatttttcatttct

SEQ ID NO: 27549 - DNA, 247 bp, Zea Mays
gctcgattcgtggatgcctcggctccacggtattcgtcgggtctcatcctcgacgtcggtcgctcctggtgccgacccccagcttctagtgtcacatgtcttctcatcgtcgctccctgcgccagcgctcatactcgccatcagttgcgccatgtcgctgtgcctccttgtgcacgtctcttcgggcgcttgccagcgctttccctgctcaccgacggctcaaccgttgtttccccgcgagctcgcc

SEQ ID NO: 27550 - DNA, 1408 bp, Zea Mays
cagttccgttccctcccaaaccctaactcccgaatcccctcgctctcctctaatggccgccgatgccgacgcagccgaggtggagcggctttacgagctcggcgagcgcctctcttccgccaaggacaagtccgagcttgcggcggactacgaggcgattattgcagcagtgaaggggcagagtgtcaaggcgaagcagctcgcagcgcagctcatcccgaggttcttccggagcttccctgcactcgccacccgcgccatgtcggccatgttcgacctcgttgatatggaggagctcgcgatcagaatacaagctattcggggttttccacttcttggtaaagatactgaatttgtgtcaaaaattgcagatgttttgggacaactccttacaagcgaggaaaatgtggaacgtgatgctgttcataaagcactcatgtcccttatacgagaagatgttaaaaattctttacaacctttatttaagcatgtggagcaaggatcagagattcgtgagaagattatttgttttcttcgagacaaggtttttcctcttaaagcagagctactgaaacctcaagcagaaatggagagatttataacggatttggtaaagaaaagtgtgcaagatgtaactggttcagaatttgaactattcatggggtttctgcgaagcttgagcatatttggggattctgctcctagagagtcctttcaagaactaattgaaattattcaagcacaggctgatctcaactcacaattcaatgtttcggacattgaccacattgaaaggtggatttcatgcatgtatatggctcttcctatcttcatgagaggagcatcagcaagcaagttcctcaattacttcgttaagcaaattgttccagcattcgagaagattcctgaagaaaagaaactggatttgctcaagactattgcttcaagttcaccgtacgcgacagctcaagattcacgtcagctgcttccatctgttgttcagttactcaacaaatatatgcctgggaagaaggtggacgatatcaaccataattatgttgaatgcttgctgtacacttatcatcatttggctcataagactccaaacacaacgaacagtctatgtggttacaagattgttactgggcaaccatcggatagacttggagaggacttcacagagcattacaaagattttacagagaggttaactggaacagaagagacggtaagagcagcctcaaagcgactaactcagggaatggcagatttcagcaaggcaatatcttcagcaaaaaccgaagaggaaaaaactaaaattaaaggcgatcaacaaacttcaacaaggacaatgaggtcatataacaatatattggcaatggcacagcaccggtgctccatcttctgc

SEQ ID NO: 27551 - DNA, 5208 bp, Zea Mays
ggcctcgagcctggttaccacggacaggagatggggtgctactcctgcaaggaaatctagtatgactgttctgggaaaagtcccaaaaccgattaatttaccaagtcagaggttggaaaacaatggtcttgatcccaatctggaactggttccaaagggcacccacacctggggcagcaaagcaccatctacaacaccaaacgcatggagttcctcatcaattctgtcttccaagaacgatggaagttccacttcatctagtcacttcaatgtccggcccacctctggcggaggctcaaggccatcaacagctggaagtgaatcacttggttcacccaatgcttggggtgcaaattctcgcccatcttcagcatcaggcacatttccatcatctcatctaccaatggccacaaatcgtccccaaagtgcggaaacaagacctggaagttcacaaatttctcgatttgcggataatgcttcagataatgtgaaagcatcgataaggactattgatagatcggaatcttcatcacgtgggcctgggttcacattaagtactggtgatttcccaacgcttggctctgaagcaaacagtcaacgagggcatagttcgaaagggcgcccaacttctagtttgggtaaagaggtgtcgcaaggtgaacaagtgaagagcctagcaactgtaatttcaccatccaataatcaccctgttgatatcatgaagacagagcatcatgcacacactggaggtgctcctgtcccagccacaagtgtgccaaatgaaggcttgcaacaacagccatatccaccaaattttcctatgcctcctctgcagtttgattcatggcgtgcacctcctggtcacccccctgagggaatgtggcatagaggaccagtgccaggtgggccatacagacctgttggcccccctggtagtttccctgtcgaaccctttggttattatggccagttcccacccaactccgaagctgcaggaaggcagggctcagggcatggtggatatcacactaaaaatgatgtgtatcatcctatgcctcataattcctatattatgaatcagcctgttattccagtcagaccagtttatcagggtccagtgctgtatgatgggtattatggccctcaagcaaatttcaataacaccaatgttagagatcctcattttgttggaggtcctggaatactaaatcaattcccaaatcagaatgacaggtttcaccctggacatcctcaaaacagaccaggcaaacatgaaacggtcccaagggagcagctggaatctgataagctacatgtctttcaccaagaacaccctgggagtttgcatgataatccagatcgtctaggaggttcccgtgaatttgaaaggaatgtgcagccagcaccgccacttcttccacatcctgatggaaaacagactgatatgaacatgagggcagatacaagggacacctttagtgagactgaaagaaccgtggtacttacaaaatcggtgcctaaccagagaggttcggttggtatagaccatttgtctgtttatgaaaacacacgatcccatcacagagaaacttgtgatggcactctgcgcaagaagttcaaggaggatagctcagttgtacttgaccagcatcctgtcattaagaagaatgcagctttaatagagaaaattgagagtttgaacaacaaagccagaaatgtctatgcacagaatctcccagaaccagcttcatccaaggaattcaagaagcataaaaaaactactgatgtttcatctaatgatgtcatcagtacgacatgcacatctgatcaggcagtttctgtttcacatatttctgctgtggtgcagagacgaccaaatgtgaccattgagggtacaattcttggaccggcacattcacatttaactgaatttagcaaagctgagaagcttggtgattcaattaacaatcatttacataggagagttgattcttcgagaaacagttaccatggtccttgtaaagataggccagctaataaattcggaagttgtggacgtggagaaagttacataactaattcattaccagtagctgatttggggaatgatatccatcatggccaacaacctcagattgcctcacagctgcaacctgtgattgtacctgatgatatgccagcttcactcgattatgagtctcagaacaaaaagcaggatgcagcatcaaatgctcaaaacaatcagcgggcaaaaatgaaggagttggctgcagaacgtgcaaaaaggatgaaagctgaggaagaggaacggataaagaaccaaaaagcaaaagcactcgcaaagttggaagaattgaacaggcgatcatcagtacttcagaagaaatcaaatgatacaaaagtagaaactgatgatgcacatgataagcaacagattggacttgatgtgaatgctaaacttgacacttcaactgaacaacatgatgttgttacgcctgataggcttactgctcttctgcctcctaatgatcccaatcatactatggttcagatacaggcccagtctactgcacaatcaaatgctttagatggtggcaaagcgcatgatgctcataccacctcatctttggtcaagaacacacacagcaacatggagcatgttgtgcagaagagtatctcacagtcgcataatatcagtatggtaaagactaagcaaggctacaggaaaagacaggttgtttcagaggagaaaatttctggcgagaaggcaagtgcttcagtaaccactgattccagtgtgcagaaaaatgttgatgttcccgtcgacacagtaacggctgttgttgcaccacatgatgatcccccaactcagaacaagaagggaacccggcatttgaggagtaagaaaaaggtagatgatgcttcagttatttctaaacatccacctgtggtgtttaatgaacagaatacagtgaaaatctctaccgagccaaaaacacatactggtggtgttattatcagtagctctattgttccgattgaaggtactattgtaactgttggaagtataactgttggtggactttcacttacagctatgaatcaggagcatgttaattcagcagatggaacaaatagtactgaaagtggcctatcaagacctcagcaagcaagaaaatctggaaagcatcagcatgttcttcggcctgttgagaagccacatgggaatgatggtgtcttgtgggcaccagatatgctaccattgcataatgagcagtctgatggagccatgccgactgcagcagtagctgacgtcactcagccagctgggaaagccatcaatgatggagagaatgtgacaagaacaaagagggctgaaatggaaagatatgttcccaagcctatgtccaaagagctgcaacaacataatccaagccatgataaggaagcaattgataagcccggtgctgctaaatcacatcctgcagccgaacccaagaaaactagcaaaggacatgggggcaaatctaatccttcttggcgcaagcgggatccagatcaacctgctatggtggcaccaaattctgttgaccaagcagacaactcttatgaatcaaaggaggttcagaactgcaccgatatgaatcagcctgttgaacttggcaaggaagatacacagttaaaatccaatgtagatgctgctgctgagaatagctcagctccagctcaaactgttccactatctgccggtggtgcaaaagaacatagtgcggctaacaggcaaaggcgacagcattttaaggctcaaagaaatgaagcaagtagctactcaaatgagagcaaagttagagagggcaagaacgactctgtctatcaatcagcatcaccggtgattgattcgaactcatccaatcacaagaatgtgccaagatcagatgtgaaaaacagcggcatagtttcacattctagagcctggaagccgaaaaccaattcccatcctcagaacagctcagacggcaagattgctgttgaagggaaagtggattcccatggtggtaggcttgagctgaacatgcccaaaggatctgatacaattacccatcaagacaccagcagtaaaccgatgaaaaggagtgatggcaccgatgaggcctcacacagcaaacaggagaacctgacacaggaagatggtaaccagaagatcgagactggacaggagcaggctaatcctgcaccgcgtcgccaaggccagcccaatgcaaggtatcacaggggaggtggggcacacaggggaaggggcggttatgacactgggaggccaaaccatggcacaaacgcggagaggtggaagggtggcagccatcttgaataccagccggtcggatcccaaaacaaagctggaggcgacttccagctgagtcagggcatggaagatcgaaccgaggggcctcctgcatctggacaagcgttcggggagcgtggccacagcagggggctacgcccagcaggccgctttgtccggcgaaacactgcctctacgtctaccactaattctcaccaacatgaataatcttccgcggctgccacatccgctgagctgcaggaaaaaactcgccttcgtggtggcgtttcacaacatgtaggtaaaatgtgccttcgtggtctgtacagggagcattcccaaatctcagccccctccatcgctaacatgttttggggtttgcagatttggatgcacttgggtgggcggttggtgtccgtcgtcaacgacgagtctacggtggtgagcattaggatcatgtaacggtattagtctttgccccaaagggcacaccctggcccctcacgtgtcacgtgtgactagattttttccagaggaacatccacccttgtttgggatgcaacgttggaacgtgtgctaacagagttgtgtttgagaactgggtttaaatgttgttagcctgtgttgctgatgggaactgagagtgttggtttttgcccaactttcatggcatgtctttgtttgattgttggctctgttgttcatggcaatcgctttggatcctcgcgaccaaagaaaaaagtagtagctagacatgtagctgacaatttgcgtaagccatgtcagtgctaccatttcatcttctaacgtagcagtggtctacaacatgtaagtgatgggtctttgggtgtcgtggtctccgaaag

SEQ ID NO: 27552 - DNA, 998 bp, Zea Mays
gttgatacaaaataagtcattctatatccgctgcatatacgctagcggtcaggctgacgttgaactgggtgggtgggcgctataaacgtgtctcgcctcaaaaaaaaaaaaaatggcccgtcagctcttgtgcaatgggctggaaggctgaatccgacgacatattggaccttttgggtcaaaacatgggcctgtcgtaccgggaatccacggcctacatgaggcaattgcttcgtgtccattgtgcctctcttctcgacggaactcgagtcgggtgacgggtccgagaggtggacggagtttcggacttggaggtgatctgacctgtgaagggctgagggcggaggatggtgggggaacgaggagggatgggtcggcggcaggagcggcaggccatgatggtgacgttcgcgttggcgctgctcatgggcatcgccgtctacttccgcatctgggcccgccagtccagcgacccctccttcaccgccgacgaccgcgaggagctccggataacgagttgcagaagcggcagaccgaatcactgaggcagcaatgcaattgcactctccattgaaaactaggcaaggttaagggcaaggaaggaatgccttttgtttgtccagcagcaccagagggaggaaaactagattgaggtctaggaattaggacgtacgaaaaggattgagaacatagctctggtagaccaagaccatagtgaccgtctgttataccaatggcgagctgcatatttccgtcccaagtgatcagttgcagtttcatgagtgccaatgcaaatcgcccaagtcaaaacgcaaaagatggcaccatggcagatatatagttcctgtttcagagcaaggattcagtttgtgggtaattttgcagtggcagtttgcattttccgagtacctgaccatctgtaaatatgcgttgtactcgggatcaaatttataacactttataacaacaaacaagttacagatcaaaccggataactg

SEQ ID NO: 27553 - DNA, 5580 bp, Zea Mays
ttccaagtaaatccagttctccctcgtctccgtcgctggctcgtcccggccccgcctgtgcgccgcggcccaggaatcatgccgagcaagtggcaggtctggggccagcccgacggcagcatcgtctggctccccgtctccgacgcgcccccaaacccgcctcggccgggtccgcttcgtcccgctcctcgtcatccgccgctgcccgacgaagcgccaatcgaagaaaccctatgcccggacaccgccggcggatgccgtatctcttctatggccgacctactccttcaagcgcgggagcagctgattgaaggcgatgcgatggatggattggctcagagtgtcaatacggctggactgttctccaccgggtctgggaggccactggctgtcagccagagagccgtaaggagggccagtgcgttggttggcgaggaagtggacgaggctactgataacaataacaagaagagaaagaaaccatttggttgtgatgctggtctggagggtgaactggcaaacttacatgttccatttggaggtggtgtgcataaagataacttcttcccaatgttccaaagtggatctggtaaggcagtcttgctcaacaaggactcaattcagaaggcaagagctgttctagaagaaaatgttgagaatgcagctggtgccaaacagccaatgttccataccagtacgggtagatctgtcctagtcagcaagagctcaatcgataaggcgagagctgttttagggggtcggatgattgcacatgaaggagatgtaggaggtgtggatggtatggaacagtttcctgtgtctcaagctggttcaggaaatgtggaaggtccaggtagaccggccaatcagtctctgatatttcaaactagttccggaagaccagttttgatcagcaaaagatacgtcgagagatctagggctctgctgatggatgaagatgttaaaaatattcgacaatgggatactggctgccagctcccaattttccaaacaggacttggaaggcctgttgctgtgaaacatagttcaattaaaaaggcaagcacaattttgggggatggagatgttaaaagaagtggtaatggacataccggtgtttgtaccacacctttccaatttgaaacaccaaaatccgttttgatgagtagcagtttgattattaatggcatgacagttacaccagaagaaaatacttcagtgcgagaaaaatgtttcaacgatgatggccaattgccgttatttcagactgggtcagggaggtcagtcacagcaagtaagggttcctttaaaagggcaagttctgttctggagccaagaaatattgcaaaggaattggaagatgaatctcatctcaatgatggttatgccacctcaatatttaaaactggacttggaaagtctatcttaccaactgagaactcaagagaaagggcacaatttgtattagaggctaaagaggctgtaaaacaagtaattagtgacattggagctggctttggtgaaaatccaatgttccattctggaaaacaacagttttcacctgaaaatgatacttcaagacctagggccagtacccccatggagcaaggcaaatttgcaacaaaaggatatgaagactgtggaagtccattgccaatgtttcaaactggatctggaaaatctgtattggtctgtgaaagctcgatgcaaaaggcaagagccgttcttgaggaagaagagcactacaagttggttaagatggacaaaaaaattgcagcctcagcttcaccgctcaagacaagccatgcaagaacagtaaacatatcttcaactggtgtttctagagctgctaccttattgggcttggaggagaataccctttcaacacaattttttggacatgtgagtgataagttaggtacggagataactgttaagcggggaaatccagaacacatgcttgatgttgcatctgcacatgcaatttctagtggcactcataagggttttatttatccaacagaaaaccccacacatatggataaacatcagcagtttggattttctaaaagttctacctcttacgttggtgagcattctatcaggttcagcactgcaggtggccgatcaatggctatctctgtcgatgcactacaacgtgcgaaaagccttttgggtgattcagatttagtggtttctccaaatggttcaattggtcgctctttggcatcagctatagagaatctaccaaaaccaactatttctccgaaaggagatgtatctaacctatcatatggaactagagcaataggatatgctgtacctgacacccctgtgactaaaacaagtgctaatcagtttcatatgggaagggaatatcgtccagtcaatgaaattccaaaggtccccaagcctccctccagatgtttatctgaaggcgacaatgcgagtaactctaaagacaagacccagtggcaccatatgccagctggaccattggttgacatcactaattacatggctacatgttctggaaatacggactgcttagcaaatggaaagagaattattggggggagaaactccgtatctccattcaaacggccccgttcttccaggttcatcactccaataaaaaacaacaaactatcttctgctggagaatccatagtgccaccaatgcagatcagtccctgtaggacaatgctatctgtacgttatcctttccaacatcaaaggaaaaattataaagaatattttggtggtcctccttgcttcaaatatttgactgaacatgtgactgatgatgtgaagctcatggatgcaagaagagctgagaagtttagatttcagcatatggatactggtgcagaagagtttcagaaaatgctgctcacatgtggtgcttcattgtcatgtgcaacaaaagaatgggtcagtaaccactataaatggattgtgtggaagcttgcttcacttgagaggtgctacccaactagagttgctggtaaattcttgacggttgacaatgttcttgaggagcttaagtaccggtattcacttgatgcatcattggatgtggcacttctggaacaactagagaaaagaaagcttttcgtagggcagaagcttcggatatggggagcttctttatgtggttggtctgggcctgtgtcatttcatgaggtgtctggtgttgtcaaattagttgtccacataaatggcacctatcgtgcaagatggaatgatgccttaggattctgcaaacatgttggactcccactggcattcaggtgcataaaagtttctggtggtagagttcctaggacactggttggaatcacaaggatatatcctattctctaccgggaaaggttgcctgatggtcgttttgttgtgagatctgaaaggatggaaagaaaggcgctggaactataccaccagagagtatctaagatcacagaagatattctgtttgaacaacaagaaaactgtgacagtactgatgataacgaggaaggggctacaatttgtaaaatgctagagcatgccgctgagcctgagtttatacttgcgggcatgactccagagcagttgaagtgtttctcatcttatatagaaaagcaaaagattgttaagcaaaatgaagtatctgagaaggttgagaaggcccttgttgttgctggccttagttcaagggatgttacaccatttttgaaagtgagagtgattggccttgtcaataaacattcagcttccacatccagtaacaaggaagggctaataacaatttggaatccgactgagatgcagaaagataatcttgtggagggacaagcttattctgttatgggattggtaccttcgaactattgcaccgaaatcatgtacttgcatgctagaggatcatctacaacatggaagcccttagcatcagctcagactacagattttaaagcaattgaactcttgaaatttggtgaggtgccgatttcaagtgaatttgatattgcaggtcttattttatatgttggcaatacttatttatgtaacaacaagaaaaagcagtggctttttttaacagatggatctaaatttgtctctgggcaagggtgtgaagagcaagattgtcttctagctgttagcttttcgtccgcaaccactgatgaagactctacattatttagttacactctctctggaaatacagttggttttagtaatctggtcaaacgacagaaagacgagacgaggcaagtatgggtagctgaggcaacagagagctcaagctacactctttccaacgagattcctagaaaatctcacctaaaagaagctgcagttttggctgagagatgggcttctagatcttatcataaaattcaagagctaaaagaaagggttttatgtatagttggcaacgctggtgtctgaattataataaacggtaccacctgctgtttttggaaatggtgcaagattttgcttgggggttgtcttagctacaccattatttctcactgatgttggttggttctggttggagcctttttaacgcaatatgaatggcccttgcaaaaaacttcaagagcagcaagatccttgcacaaacttcaaaaatcaacttgaagatgtacacatttgaagacacgaggcttcagggctgttttctaagtctgtgtataaagcctttttcagagggtcgattaactttgagccgtggaaaaggttatggagatcttgggcgccgcctaaatgcaaaacttttctctggctagccattaggaacaaatgttgaactgcagacagataggagaagagggctttctcacctagaggcctgccccctctgcgatcaagagcaggaaacagctcaacacatcctaacgagttgtgtttttgcaaggcttttttggcacaacattatggctcccttcggtatgggtacctcaccccgagtcagaatgaacttatcctttgcagatttgtggcgaaaagtgagcaacaatgtgcataaagagaagagaacaggaataaacaatgctattatcttggaggcctggtgcatttggcggcaaagaaatcgtacggtttttgaaggagatttgccagctgttagcaaggtgcagcaaagttttctagaagagctaacatgtttggtcttgactggggctcatcaccttagcattttagggataattgatactcttagagcggtcggattgggctctcttgatcatatgtaatttttgtttcagtttcgatgtggtgtgggtgatgatcttgctcagcaagatcctcatcttgtaggattttcttttctctctaatataaaatatgggacgcgttcgagaaaaaaaaacttcaagagctaaaagaaaggcttctatgtatagttggcgaccctggtgtctgaattataataaatggtgctgcccgccattttttttggagatgatgcaagattttgcatgggggttcttgccataactacatgtctacatcaatatttctcagtggtacaattagaagatcaacaacccacattggcacattgtatgcacaactttcagaacttcg

SEQ ID NO: 27554 - DNA, 1716 bp, Zea Mays
cctctcgacccaagtccgcaggccgcgggcatataaagcccatccactagcccatttcccctctgcttgcttcgcttcacctgccccctgcccacattttccttccttccctcccgtcgccgcctgaaaccgcgacagcaagggtcgtaggagcaaggacgacgacgagaaggctcggttcggctcttcccagtctctccgagggaggaaggagaggatcggagggtgcgatggcgatcgaccacgagtccccgttcaaggagctccgcctcaagaaccgcaggatcatgccaattcaaatgcttcgccatcgagcaaagcgagtcaactgacggaaacatggttgtccgtgcagggcggcggcggccctgaccctgagccggaggaggaggaggaggtcgccacggcggcgtacgcggggcagtggccgcgctggctgcagccgctgctttcggcgcgcttcttcgcgcactgcaggacgcacggcgactcgcaccgcagcggcgagtgcaacatgttctgcctggactgctccgccgcgggcgcgggcgcgggcgcgcgcgccctgtgctcgctgtgcctggcgcaggcccaccgcgaccaccacaccatccagatccggcgctcctcctaccacgacgtcatccgggtgtccgacatccagcgcttcatggacatcgccggggtgcagacctacgtcatcaacagcgcccgcgtcgtcttcctcaacgagcggccccagcagcagaggcctggatgcaaggccgcgtcggcgtccgccaacctctgcgaggtgtgcgcccgcagcctcctcgacaacttccgcttctgctccctcggatgcaaggtcgtgggctgctcccccgacgccgccaaggccaggagctggctcctccggcccgccgtcggcggcagcggcgacggcgactccacgtcctcctcgccgctgcgcgacgcccagaagaggcagagcttcaccccgcccacgccgcagccggcgaagcgccgcaagggcatcccgcaccgcgcgccgttcggcagcttcatcgtcgagtactagctccctctctctccgtctccacggcggcggcggcggctgcattggcagtggcactacacagcacacgcgcgggcaatgggactgggacggccaccacttccttttgccgtgacacactctggctggctggctggtggtgcttctcgaggtggatgccattcggtcgctgctggctttgctttccacaaagggaggggaggaaagaaaggttgaggaagaatcaaaacactggcttttcatcactgttgctaggctctctgatatagaaatatatatgtacatttttagccttgtcctgtttcaaatcatcatagtggagcattatagctagctagctttttttactagattattcgtctgaagaaaagaaaccatggttcaggagatgaccagctagtgcaaggtacttactttatactagtaataagctatggtggtgggtgatgatggctgatggatgccgaaccacattgttggcacttgatgattagtgtgccaagaagaggaagcaaggaaatgccgtcacgttactgcccgggcaaggttgcgttgatgcaaagccactctgaatgcgactggccggcatcgctaaacgccctgattattattcttgttcattctaatctaatcctgggccattgaaccgggccagtttg

SEQ ID NO: 27555 - DNA, 703 bp, Zea Mays
tctatactaggattttaatgtgtacacttgactcaaaggtgaaactcatgaaaagattcagattcaaatttggaaattcaaaataaaaagaagacaaactaggaaaaagaaaagaaaagaaaagaaaaaaaggaaaacatggcacgtgggctggcttaccacatttcggcccatcagatggaaccaccgcgcggcccaatctgcttaccgcgagtgcgctagccactctgcggctgaccgtgcgggtccaccaggcagttcctcaactatcgcgcccccgtcttctccgcacgtcacccgcgttcccccacgcagactgggtcgtgccgctagctccgggattccgttgcggccgccccgatccccatcacgccctcaaataccaggctcccacacgcgcgtgcactcgtgctcccttttctccgctgccactccacgcaaattcttgcgccgtcgcgtgccgcacagagaaaacccgccgccgtcgtggtgtcgcgtctaccccgctggtgtggccatgatagcagaccagggagctcctgcaaggttgccggtgttcatgcatggcctagattggagctattggcgctcgggtcgccggtaattgctcaccggtgcttcaccaccgccatgggtccgccacgcaccatagttacgttcgcgcgatccataatcgctggtgagaactccacccttacctttg

SEQ ID NO: 27556 - DNA, 2114 bp, Zea Mays
taataccctcgtttccaattaagaaaggatcgcaggccattaaacaagcacacacgggaggcctacaaagacgagaggggagaggagaacggtcaaggctgccgcgcgcatcgtcatcagttcactagtcagtcgaggtcgaggggcggacgaggagctgaggagagagaagcttcaaggagttggggacttgggggttgccgagctgtccgtctttcccctcccctccacccaccagctacctcgggagggcaaggcaaacatctgcggcctcctttcccgaacccgggttggatggagcgggacttcctggccgcgatcggcaaggagcagcagcacccgcgcaaggagaaggcaggcggaggcgcggaggaatcagtgtgcgggcttggctgccatgcctgccgaattccttctgacggccggcctgccgtgtacgctcgattcgggcgagagttaatgcgtgaaaagccacgatggagagtggccgaacctttcggacagccgcgcgtgtcgttagttgatttcgagctgcctctgcctctgcttctgcttgcttgctggtgggaaggacggggatgcttaacggatccatctctggcttacttcggggcagcagccgtcccggcgatggactggtccttcgcgagcaagccctgcgccgccccggcgctgatgtcgttccggtcggcggcgagggaggagccttcgttcccgcagttctccgccttggacggcaccaagaacacagcccctcgtatgctcacgcaccagagatcgttcggccccgacagcacgcagtacgccgcgctgcaccgcgcgcagaacggggctagagtcgttccggtctcgtcgccgttcagccagagcaacccgatgttcagggtccagagctcgcccagccttccgaacagtaccgcgttcaagcagccgcctttcgccatcagcaacgccgtggccagttcgactgtgggttcctatggcggaacaagggatgcggtgaggccaaggacggcacaactgacgatcttctacgccggttccgtcaatgtgttcaacaacgtctcagctgagaaggctcaggagctcatgttcctagccagcagaggaagctcagcccccgtggcctgtaagccagaggctcctcctactctcgctccagcgaaggtcacagcgcctgaggttcttctgcctgcgaagcagatgctgtttcaaaaaccacagcatctctcgccgcctccatccagtgtccctggcatcttgcagtctgcagctctccccaggagcgcctcatctagctctaaccttgactccccagctccaaaatcttcggtcccgttagctgttcctcctgtaagccaggctccgccagcaacactgatcgccactacaactgcagcagcaataatgcctagagctgtccctcaagctaggaaggcgtcccttgctcgattcttggagaaaaggaaggaaagggtgacaactgccgcgccttacccatcagccaagagcccactggagagcagcgacacgttcggcagcgggagcgccagcgccaacgccaacgacaagtcctcgtgcacagacattgccctctccagcaaccatgaagagtccctgtgtttaggggggcagcccaggagcatcatcagcttcagcgaagagtcccccagcaccaagctacagatctgatcgtgccgtgcccagtgttcatagatttgtccaggctgaccgatgcagaaaaccataagaatacttttttccactcaagaggaagagattactatcgatgccgttgttgtttaccgtgatgctgttttgccgtgttaggttactgtactgctggtacagatggtagtgccccccacccacctaactaacaagagagctgtcacttgcagactcttgatttttttttgccatttctcttggaaatgaactcagatgtgttattctagcagtaatcaaattatacaggcatacaaattctgcgccatttgtatggccaaagtgtaatacacttgttcttgaattatgaacctctctcaagctgcagaatgcaattctcgatggtgttctcataatctcattggcagcatgcgtgtgtacacagt

SEQ ID NO: 27557 - DNA, 935 bp, Zea Mays
ctcaaggcaagtatcgccgtcgccgggaacccagcagtgacgtagaagtttccagaagtttgcacacacgcgctccccaaggccccaaatactccctgacgcccttaccctcacaagtcgcagccaggtctctctgtccgccgaagtcctccctcgtcgcgagagacgagtcgcgttcctgttcgccgcccccgccgcccatctcccaatccggactcaggagatcgactcctcctctcggttgaggttgaaggggaaggaactagaaggctactcaagggatggctgaggatgcttctcacggggccagcagctcgactgtgatacctgctgatggtccagagtctaccatcgagatcaacatcaagaccctggattcacaagtccacaaacttcgcgtggataagaatgcgcctgtttccgttctaaaagagaaggttgttgaagcgactggagttccattggatcagcagcgcttgatttttcgaggaagagtcttgaaggatgaccacctcctatcagaataccatttggaggatgggtatacattgcatctggttgctcggcgtgcagcagaggcccagacttcttctggggcttctgaaggaaacacaaatgctaatgtaaacgttactggaaatggaggattgttggatgatatttccaggagtgttcgggatcttctgggttccttaggtgttgcaatgtctggtggtgtcactaacacggcattttcggttcctttgactagcacaccagaagggcccaataatgtgcctggaagaactcagccaatgaacccagcacaacctggattctcagttctaaatcatcaaatacaagtaacacaacttcatccgccaggagctattcctcgcaatatgattctttgacaactctttcggagtacatggatcgcattgacagagtactac

SEQ ID NO: 27558 - DNA, 738 bp, Zea Mays
actcatgggagatggaggccccctccctctcaacaaggcaaggttgagcgacctacccattaaagcttcccttccctctcccttcgaggatgccacaatcaaggcagagaataaacagaagagggaggcagaggctctagcagcacgcaagaagtgtcgtctggcaatgaagagggagaagaaggccgagcgtatggctcacgcagggccagggaggagtatctccccctacaccaacaaggaggataagacctccatggcctctagtggatctgtggtcctggtgttggtgggggcctcagctcaccgcgctggtgccactgctgaggctagctccaacgctccgatctaggaggaggaaccaacggtggagcccctgcgcttgtggcgccggttgagcatcgcgatgggggagggtaacctgcggcagcgtcctctgtgcctgatgcgttgactgggcgccatgaaggaggaccaccacaagcttctttagggacgattactttgtcatagaagatccccttcaggcgggcgcattcctccaagtaagccatgtccctttacaaggtttttcatccttgcctctagtttttcattcggttgtcttgcaagtgtgtacgtgtcgcataagtccatgaaggacataactcgtatagcaaaggagggcacctcgccttcctaggcgcttgtgccactacaagagctatagtgatttttggcggccagaaaccaccgaaa

SEQ ID NO: 27559 - DNA, 3193 bp, Zea Mays
gcgtctccctccccacgaaacccccttccccaaactacctctgctgctctccttgatccccaattctctcttctgcctacttgcctccatctcggcctccacctccactcctcgcccccgaacatccggcgctgtccgcaccccgactcctctcgtcctttcgcggtcgcgatggtggcgtccatggcgtcgccgtaggggcgatcgatctaggagaaagtgctggagaatgtggcgtcgtaccaccagcaacaacggaggcagaagctacgcaagagcctcacctacaccggcggcgagctctcgttcactgtctgggcccgtggggatgaccccacctccacgtccgtcgaggcacagaaggaggacatgcctcttgagcacgtcttcaaaatcatcagatctgatggcaaaagtgtgtgtttatggttcctgagtcagatgatctttcttcagttttagatattggtataaaagataaaaactagaatgctatgtctgtcaaaggagctttcttcagttcaggtactgctctgctttattagccatccagccgatggatattttctatatgtgtaccgcccctgcactttcaaacacttatgttcaatgtttacaatcacattttttcttctcatagatttactatgtggttgtggtcttagtttggcttgtaggttaatttgtatactcatgtcattttagtttttctatgttgattcagtatgtcttaatttagttaatttcaattcttgatgctaataatatggatagattgtgacactactttctggcttgagcagaaatgggtttgttgcatatagcagaatatagttgtcgtaactggcaacaatgacccctctatggatgatctgaaaactattccgtggtcatgtagttaaatatagctgaatatacattactatgttttattaatcttatttggtttttctctcaaaagaacacacctctccatctttcagtgcttggtggatcaccgtctaaacgatccaccaccagaaccgccctaccccaagatagctatgtgcaggttcaactactcatttagatattggtacagcctgtaatagactttggtacaataggatttggttttgctattcacttagtttttagttccaaacaaccaacaaattgcatgtcctttaggaaaaatatcacatgaatatcagtaatataacactgataataaaaaatgcttcgattctatatatttttcatgttataaggttgaaaacattctgtctcacggatcagaatgtgtacaaggcgacatactgtgtttacaaatatatttaaccataataaaaacatatttggaaactgaatatcatttaagtccaaaaatgtttttgctgactgttcattaagctagagtaaagagtaaacttagcatttcttttctatatctctctttcgtgctcatgccgccgcagtctcctccatcccacctttcctacgcaggcagctccatctcagtcgttgtacccattcaacgccgagctggtggcagcgatgcaggagatgatccagccgaggtgtacaagtacatgttagtggacgtcacctgccaaagatacacagtttctactgtttttcagttggagaaaatatttaagacaacattttcatcgtttgttctccatatggggcttgtttcacgccacttgaaggaaggagggaatgatggtgttaagttcggacaatacatctacacatctatgaaatgtacaaccacgatgtagagcatagagtttctaaagttgggtaagctgtttggctgttttatagaaatttgtatcaacatcaacatagatttttagtcccaaacaaattggggtaggctagatttgaaacccaacaagaagtcaccaaaaagagaaagagagataaaggggaggggaaaagcttttgagagaactaaaagagaaaatgcctaatcacggttcgggcacgtggatagcttctttccaagcatttctatccaaacacaactcctttgggtgtgtggggtgatattagaagcttcatgttaggtgtttgatactttcttgaatataggatttttgtgtgtgtggtgtagtataaataatgtccatagttgaataccaaaatgtggatattgtacagtgggagttatggctgccttcttcattgcttgatcttagttgttggttgcaatcttctaacttagagtatgatgcttgaagagatttggatgatgttggagatgtgctttggtgtagttcatctctcccgaatcaaggttcataccccactattttggtttcctaaactgataggcacaactagaaattatcgagtgatgtctaactttcctacctgtcttgcaatgcagagtctggtttatggggctaaggtagaggctgccatcgccattggattcaatgacttcattacatatgctctgagaggcattgggttctaccagaaggataacatggagatcaagaaggccaatggcaatggcacactgatccctgagcagatctttgaaaagactaggagaagttctagatgaattgatgcttggctgaagagggatgtcagatttgtacaatgctcacccacaaagaataatacatttctccaatgtccactgttttgaaaaatacctccattccaatgtttaacattctaacgatgtctgaatttattgtaaagagacacatgattgttcattgttgtaacttatgtacaatatatgcgtgtgtgaaataaagatcatcttggagcaccggcatcaatgttatcaatcttctcaaatttcaaattatcctggtctcttcgtgaaaccataaaagtttattaagtcacttatctgagtggtctaaaagtctagcatatttttgttcctttgcctgtcgagacggatcagctggcatgaataatatccggtgaatactgcaagagctattcatgatcccccgtgaactagctggtatgatataacttagtttgtgaagtgctaatgccacaaacaggaaataggatgatacttcatgtatatttttttctttcttgaaaatgaactataggatactgtttacaatccataccaagcttctgcagttatcaacatttttctatgttcaaccttgttaacatattaagacgagtttttctttcatttttcaaaaaaataaatcaa

SEQ ID NO: 27560 - DNA, 1192 bp, Zea Mays
atgaaagctatcaaaaacttaagggtgggaggtatttgatttgtttgacacaaagcacaatggaattttaggatttgaagaatttgctcgtgctctctcagtatttcatcctaatgctccccttgatgagaaaattgacttttcattccggctgtatgatctcaagcagcaaggctacattgagagacaagaggttaagcagatggttgttgctacacttgctgagtcaggaatgaatctttcagatgaaattgtagagagtataattgacaaggtttgctaaagttgtgcatttatgttatggtatattcaatttatctgtatcgtgcagtgctcctccagtgagctttatataatatttaggacaccaagtttgacctgaaatgtcgcatgaagataacaagagggagtatgtgttagagtgttgtgtgtctttctctatatcttctctactatataaagcactagtttccaccgtcgtcgtgcccggccccacacacacacattaaatggtaaagaagtaaaattattcacaaatggactattggagattcaaactatggttgttggcattatgcccacttttacatccacctagccaacagaacatacatgtttttgtgttttatattctatactcaagtataaatggaaaccgtagcaatatatgagcactttgctagttcaactacataatactgttccatacttacatttccgaaagagtatttgggagcactacagtaaaccgaggggccttgttggtaaccattatttgagtccaggatatgatgcagaagtaggcaaatgtagttggacataccattctatcaattttgattactgtttggtgcatccttcaagaaagtgcattagcatttatcgtttattttatttgagaccagacgacgatgaagagtatttgcaagcactgtagtaactgaggggtcttgctggtaaacatttataaaattgagacgtgccaaaacagatgctgtctttcttatttgagtccagcagatgacagacaaatctaatgggacacaccattgtaccatttttggttgtgttaagtttggtgcatcctttaagaaagtgcattagggtttatctcttattttctagagtcacttgcgtcaagaatcaagatcactagatgccttgttttaaaggcgtcgcctaggcgtccagg

SEQ ID NO: 27561 - DNA, 1433 bp, Zea Mays
gagaaaagatcgtaaccctaatcggacaaaatcgggctatcttcttcctatatatcccgtcgccgctgcctcggccgtttcatgtccaggtaaaaggaaaaatcgccccatcccctgactatcactggctcactgcccttccacctacaggttccaggttaagtttaagattgataaagattgccgtcctctccctgagagtagtctcaagcaagccatcaaggaaaattacaatgcaaagagcaaatttgatccagagctcaccacaaaacaagtccaaaggttacttttgctgtttaagcctgttagtgcacctcaatctgtttcaaataatcaccttggagaaaggcgccactatgaaaaacgaaggaagccacgccattttgaagaaaggcggcctattgaagcagcgcgtcggccacgatttgatgaggaaaggcgccctgcggttagacatgttccttttgaggatccatacagggcaccacgctatgctccagttcctgttgactctcagcatggccattctttggctagtgatcaccacagatattatcaaccagcacttacacctgagcctcggcagcttcctcttgttctagagcctcgatatgttccgccggccctagatcatcatcatgtgccagagcttcgacatgccccacctgcatattatcgcactttggctccatctggtgattcatactatcggtctgttgagaatctggtgcctgagcgatatgcagacagaaccatggctgacttgaccactagagatccaattattagggatcacacagcactaccaggggaggcacttgctcgagcagaccgcttggatgatctctaccgttctgatcgtgtggaggaactctaccgttctgatcgacttgttaaccgtgctgtggaccgccctcatccagcctattttacagctgcttatgagaccaaccctgcttatgctgaaacgagcattaggcctgtctctgcaagggtcaatggacccagtgcggcagtttcgtcactctattccttcagtggtggcccagtatatcggtaatgaatgatcatggctctgttgaaagccttagccagactaagaagacagggtattcgtctctttaactgcaactgttgtttgccttagcttctattcggtattttcttaaatatccttccctggatgaatgacattcgttatcaagacttgatggtctaaactgtcgaaattatgtactgtacttggcgtgctttgaagctcacttcgttctgtgaatggatcgatgcacgtattggtagcatttgcttgttctgcccttcagattggttgctacttgctaaactgagtagggctacctcatgcagtggtcatttcttaggatctgtgtatatgcttatcctaatatacaggacgttagggttgatatctgacg

SEQ ID NO: 27562 - DNA, 189 bp, Zea Mays
acgccgcggaagaagagcacccaagagatcctcaccaaatacgaattcaaagggggtcgctttcttttcttcaccaaatacgatggtttaccggactccgtgttcctccgccgtcgcgcgtgcaggacgccgcggctcacgcgaagcagaagctcgtggagcggccacccgcgccgcttggttcctctc

SEQ ID NO: 27563 - DNA, 1719 bp, Zea Mays
catttttttaatgacatttacttcttcagtttaggagtacgtcgcctctcatcccggctctcgcctctcgctccccagccatccatggcgatgccaccgagccgttcgtgggcggagctgcagcacgacctcctggtgtcgatcatgacccgcgtgggcgcgccggacctcctctggggcggcgcttcccgcgcctgctcttcgtggcgggccgcggcgcgggacccactcgcgtggcgacgcgtcgacctccgcgactgggtcgccctcacctccggccggcgcgccgcgagacctggacactccagctctcgcgtatccgtccacgccgcgctcgtcggcatcctggaggtcgccgccaagttggccgaagggcggatcgaggccgtgttgctccccgagtttgctgatgaggaccatctcttgttcctcgctgagaggtgaaatcttctccctgtccctttgaacttggctggctgttccaggtggggaaatgcccgttgaccttttaattagcaccttattgatgctataagttaattaggttatggtactagtaggaggcgttattgtattcgcatcagatccacccgaattcgcttatttaatggtagttttcatcttaggtgaatgtgtttatttttttcatttctgttgtaggtgccaaattcctgcaagcttgcatatggatgttttgctgattttttatgagtttttgcgatgttcatttgtaatgcttatcgcagggaaaatatatgttaattgtagtttcactttctttatggccataccaatctgaaaaagatggtgcccaaacctgcactatttcagccttcctagcacctgtatgacttacgatcagttctgcaaggcgataggtggacttcaatcgcttaaaggcatggcagtggacgagagtctgattaattatgatgtcctcctgcatgtgcaccagtgctgcccagactttgtggagctgaaggtgtctgcactgtacgtggatgaagagatggcctcagtcatctgcaactctcttcctcgtctgaagaagttggagataccaagttgtgacatgtcttccgctgcgattataaggttccttgattgcctagagcagctcgagcacctggacatctcaggttacgagacatcagccatctcaagcccggttcttgagaaagcttcgcggctcaaggtcttcctctggaactcgaaatttgagcttggggagttcatggactgctccaattgtggagaacacaacattaaccctcaagaaccctgcaagtgcatgatggagcacaaggtcatggactggctggctggaccttcataagcttcctgaaccaaaggcgtctcttcttgtgtcttgttaaatcatgacgttttcctggctgtaaaattccaacctctgtcaaagttggtgtctgagctgtatgcacaaggaaatatgctacttcaaatgtttagcgcgccttagagaggtctgcaaccttttaatgtaacaaattgttgtatcaagtgttaatggaacctcttctttacaccaatgagccgatacgaaacatctgtgcctattttgaagcgatttcacctcggagtcaaaccttgttgtgtggtgagtttttgcttcggctatgcgaagattaatccatttctttttttagaggacaggaggggggcctactgaaaattttatttaaattaaaaagaaaacaa

SEQ ID NO: 27564 - DNA, 218 bp, Zea Mays
cgccaatacgtagaggaactcggccacgacgcaacaatccgactacgcactccttgtcgtgaatgattttccggccaccaggttctgctcgaagaagatccgcatggtggcgtttctatctctctctctctcctccgttgaccgcacgctacggaagacgcaggtgcaggccggccgtcgctacttgctcggctgtgtggaggcctcgcgacgacttg

SEQ ID NO: 27565 - DNA, 1106 bp, Zea Mays
ttggggctaaaccgcacgacccactcggcccattccaagtcccaccttgcgtacgtgagccaaacgctcctggtcctggcagtctccatctccacctagggttccggcgatggtgcacggcggctacccgcgccgcgacgccgccgtccgccggcccaagtcctcgtcctccgccgtagttgccgaccgcaagcggaagtggaccgccgccgccaagaacacctcacttaaaaaccagatccgttccactgagcgctttctccacaaggaccttcctgatgacattagggttgctcaagagaagaaactggaagaactgaagaggcaacaagagcttcagaatcaactcgttgttcagcgaagtacagttgagagatagaaagataaaattctttgagaggcggaagattgagaggatgataaggcgccttgagaagcagcaacgttcaaatggtgatggtttcagcaataatttgtcaaaattgtgagaaaatcttgaatatgtcagattcttcccaaagaatgaaaaatatgtctcgcttttcactggagggaatagctcagatattattcaagagaggaataaatggtgtaaacatatcaaggagaatctcatggctactgcagcaaactaaaaagatttagaagagctaacaagcgatgatgataccttggatgtgagtgatgatgactttatgtctggaagttcaagcaatgaagaggctgatgatgagtggactgacaaaagtgctaaggaaccagcttccagtgcttcaggtagggcagcatctggcatgtcaagcgatgaaaagaaccaggcatggtgaatattcccaaagcgcgtgaatcgtggtgcgtggaacgaacctgagattcccagcaaagtttgactttccagcatggtcaattcggagagaagaaaaaaaaaacacagcatgtgcgatgtgcctgagcaagttgattgatctgtaccctcactcctaatgtaaaaaaaaaaacccgactctgcatccatttgttcacggatatcagtatatcactttacggtggaccagatattgccggtctaccgaatgcgtgttccattttcgccgtgtagccgtggt

SEQ ID NO: 27566 - DNA, 1952 bp, Zea Mays
acacatccgcccctggtctgcccgtcgcgctcgcgcctccgttctctccccgttcgccgctcggttgcttccgccgccgcttcccctggctgcctcgtgtactggtcgagctcaagcgccccatttcgggctgggtccgggaacctcgaatctatctcctaaccctatcaagctagctagctgcgatgccgagcttccctccgccgggcgccgtcaccatctgcgagatcaaccgcgacctcgttgcggtggatgccctctccgacgaccgcgccaaggacgcatatggggatgtcctcgggatggtgttcgccccgattccgttccagccggaggctcttcttctcgccagccgcgagcctgctgctcctgccgcggaccaagtcgagcctgctgacactgtgcccaccgctggtttggcagccaccatatccgacttcttcaggcggatggtcttccctccactagacccaaatctgctagaagaatttgacacgcagaaagtaagttggaatccatacaagcattgcttagcattcgtgtctgggaagaaccaggttactgtccaagactttgaggactcagatgctaaagaaccatgcattttaacaaatgatcatcaaacggatgttaaggctgttgagtggagaccaaatagtgggaagatgattgcagttgcctgcaaaggagggatatgcctctggtcggcatcatatcctggcaatgtcccattcatgaaatctggggtcacttcttcttcctttagtgccttccctagaggttctggtggtcagtggatacttgtggatgttcttcgtggctcttctgctgagctcgttagtgcactttgttggaaacctgatggaagatacttggcatctgcctcatgtaatagttcatctttcacaatttgggatgtgtctcaagggttgggaactcctatacggcgtggattaagcaatatatcattagtgcggtggtcacccagtggagattaccttctagttgctaaatttgatggtacttttcacttctgggagacaaacacatggacttcagaaccctggtcttcgtctaatggatatgtgtctggagcaaattgggacccagaaggtcgagttgcattattatccttttctaactcgacgacgcttggttcaattcacttctcatcgaagccaccatctttagatgctcacctcctaccagttgaacttccagaaatttcctccctgattgttagccgaggcatagagaaattagcatgggacgcatcgggggaacgtctggcactgtcgttcagagatggaaacgaaatgtaccgtggcctgatcgcgatatatgacgtgcggagatctccactcgtctcactatcactagttgggttcatccggggacctggagaaggagcaaagccgctcgcctttgcttttcatagcaagtttaagcaggggccattgctttcctgttggagcagtggctggtgctgtacgtatccgctgatacttcgtcctcgttgactccagtcgtagcacctcgccggttcaggactgaatgttgctgacgacttggaagaccgaacgcttcgatgtgcctgctaggagaaatgcaaagctcgagttgctgcattgtgacgttgtggctcgagaaatggcgcccttttggacagtcatctccagatgtgtttgattggatatgtatgtatgcttatgctgattttagcggggttttttttccctctggccatacatggatcgcccttttggacagtcatctccagatcgcccacgctagtttttttttattattttagaactccagcaggcagaagcatgccatattgccccacgggttgaaccgaggaggccttctctctaccaccatcaccagatgcaaaatctgggatcgtcagtgctgtcaaaaaaaaattatagcaatctgaaaacttcatt

SEQ ID NO: 27567 - DNA, 1482 bp, Zea Mays
attcgccccccgaggggatcagacctgagacctgaagtggatctggtactagcgcttcatttaaaagtagtggaattttatggccgctgctaatgataatatcgttctttttccaagctgccgatacaatattgaaggaaataatatttatagatgcttctaagaaattgaagtgtggctcggttgatctttttgttgtcaattcatatggctctgcttatcaagccctttttatgtgtatcttgctgcctttcctgtcaaagttatggggagttccattccatgtgttaccaacctacataaaagatggtgcagcctgctttttaaatatgggatcaatatctggttgtgaaggggcaccacttctaccactactatttgtgttggttaacatgggattcaatatatcattactaaacctactaaagatctcctcagcagtcatatcttccttggcttctacattctcagttccgctgtccatctacgctttcactctgccactgccgtatatcggtgcggcgtcatctctgccacctggctttgttgcgggtgcagcggtactcaccaccggcttactactatacagcctaccacaggcacaacattatgggaattctttccacaacaagaatgatgactagtcagcattcatttcttcattggtttataatcacccttcactccaagatggtgcgccatctgggttcgaaaggttggagcagaagttctcctgagggccaccagactgttgtatgttgtatgaaacatatcatatatatatacccaccaataaaggtcggagaagagcatggacagtggttagacgggaagaaaaccagggagaagagcaggagcatcatcaccacagggacgaagagaagaaacagcggtggtggcggaaggggtggcagcaccaacggcaggcacaggaggatcactgtcgccgccagcaacatcatcagtactctcttgctcatcgccgccgccctgcgctcgctgtgatggaacttgcttgtgccaacccccaatggctgcccggctccagtctttttctaggctttcatgtgaggaagttgtactatgtgtgagagaaagaaaatgttagttgcccccgatgaaggaactggcaaggtatatgtacatggccagcttgaatcagcaggccagatggggtgttttggcatgtgtgactgctggactgggcatgttcgatccttttctgctttccagttccagtacagagactgcactgactggtcgggggtccgtttctttctgggacgtccgaggaatcccttgtctccctgggatgcggcgggggagggccatggttggcctgagtttgtcggcgtaacatcctgtcctgtccatcaaaaaccacttcccgctagcttttataggagtacgagcttagagatctgcggcagcattccctgcgtctcgaatcagtatgcctctcctatatcaataatttatttg

SEQ ID NO: 27568 - DNA, 1155 bp, Zea Mays
ccatgatcgctcgccccctacggtctctcctctgattggtccttgccttctcacacggatcgctgagccccatccaacagctcgtatcaaccgaaaccaatgccacgcaacgctccagattgcagtaccgccctccacacaacgaaaacacaaacgcacacaagcacacgacgcaagggtgacgactgacgagagggagagagagagaggcgaggaaggagggagagagcacgggggattgatcgaagatggatgccggagcaaaggtggtgaagaaggccgcggcggggcgtcgcggcgggggcggccccaagaagaagccggtctctcgctccgtgaaggccggcctccagttccccgtaggccgtatcggccgctacctcaagcagggtcgctactcccagcgtgtcggcaccggcgcccccgtctacctcgctgccgtcctcgagtacctcgccgccgagctcctcgagttggcggggaacgcagcgcgggacaacaagaagaaccggatcatcccgcggcacgtactgctggcgatccgcaacgacgaggagctcgggaagctactggccggcgtcaccatcgcacacggcggggttctgcccaacatcaaccctgtgctgctccccaagaaaaccgctgtcgctgctgccaaggaaggcaaagagaagaagtcacccaagaaggccgccgccgccaagtcgcccaaaaaggtggccgcctcgtttaaagtttaggcaaacaatgtggtgcatgttttgcaaaatgcctgagttgggttgttcgctgctgctggattaaagccgttcggactactgctgtctgtagaaaaaacagaagccggtggattaaagccgcaacgaacatgcttgtcatttctgttagttgatcactagtactatatagtccatttgggatgattacacaacattatgtggtgttaatgccaactgggtatgggtttggctgtattggtgtcgacatttctcttcgatgaacaatggcagtacaattggcctgctgttcaataaagcccatctccttttctactcctcggttgtagataatggaaatatggtagccggatatcattcatctatatatcttctgtttaaatttgttattagagtaattcatcaaacttggagaagg

SEQ ID NO: 27569 - DNA, 1872 bp, Zea Mays
acggacggcgaaaactaaaaggcaaaagctgacggacgggacaggtgacaaatccacgcggagtccgctgaaattttggtcgccccatgcccgttctagacgccatggacgatgcggcggcggcggcggtagataggcacggcggcttctagaccgtctccgttttctgcgcgttggccgtcgggggaagtacacaataaacaaagcaagagcagaggtccaactgggctgctgcgtcctctgcctcttctccttcctgtcgttctgcgctgccccgacccccgagtgcccctggtcttgtccaactctccctgctgacctcggagcggagcggagcggagcaagcagccgccaggagggaaggatccatggccgggagatcgcggtacgacaaccccttcgaggagggcggcgccgacgaggtcaaccctttcgcggaccaagctaagagaggaggatcgactgctcagtccggctactctggtggcgcgttctacacgacgcaatcgcaacgccctgctcctcctagcacacgcctttcgcctcttcctcctgaacctgccgacttctacaacgacttcgctaccccagtggatatccccatggacacaaacaaggacatgaagacaagggagaaggagcttctggccaaggaggccgagctgaacaggcgtgagaaggaaataaaaaggcgagaggatgctgcggcacgaggtggagtctcagagttcatcctggtatcgtgttggaagagaagaactggcccccgtttttccccatcattcataacgatatcggcaacgagatacctgtccatctgcaaagaacgctgtacgtcgcgttcgcgtcgctcttagggttggtcttgtgcctgttttggaacataatctgcattactgctgcctgggcaaaagggtcaggtcctaagatatggtttctcgcaatcatatacttcatcctcggatgccccggtgcatactacctttggtaccggccactataccgcgcaatgaggaacgagagcgctctcaagttcggatggtttttcctcttctacttgattcatatcgccttctgcgcgtacgcagctgtttctccttcaattctcttcgtgggaaaatcgttaaccgggattttgccagcaatcagcttgataggcgacagcgtcattgttgggatcttctacttcattggctttgcattgttctgcctggaggctttgctaagcgtgtgggtcattcagcgcgtctacctgtacttccgagggagcgggaaagaagcggagatgaggcgtgaagcagcacgcggtgcagcgagggcagcgttttgatgaaaaccgtatatagatgatatatataggcacgacttacatactgttcataatagtttgaagtgctttaggtcaagaggcatgtgtgtacagtagggttggcgtcttgtacatctttaaggccggtttggtgaaacatggaaatggaatgaatccataaaggagagatccgttgttattcaaaattaaataacaaggatctcttctccatgggtcccatccattttcctctccaccaaaccagccctgagttcctatcgccacggtgttttgagccctccagattgatcaatcgtggtacatatgacagtgttagtatatggagtaaatacacatggacgggtaaacctagctagactctttgttccatatgtgcatttttgtgtcaccgccttgtatcaattatttatagacgtaatgaagttgtaatgatgttctcactcgagatttttgagtggggaaattgcaaaagcatacttatgtcaagggagttgtactcatacccacactccaaattaaagagctttcgtttttctctctct

SEQ ID NO: 27570 - DNA, 1913 bp, Zea Mays
ctggaggaaagaaattctgattaccgaacctttgctgtttgggtgatgctctatacagcctacgacaaagcctgaaagataacaacaacgtgctgcagagttgggatccaactctggttaatccatgtacatggttccatgttacttgtaaccctgataacagtgtcatcagacttgatcttggaaatgcacaactatcaggtccattggtgccacagcttgggcaattgaaaaatatgcaatatctggaactttacagtaacaacataagtgggccaataccacctgaactggggaacttgactaacctggtcagtttggacctgtacctcaacaacttcactggcggtattcctgacaccttgggccaactatcaaagttgcggtttctccgtcttaataacaacagtctttctggtcaaattccgaaaaccttgaccaatatcaacactctccaagttctggatctatcaaacaacaatctctcgggaggggtgccatcaagcggttcgttttctctctttacacctataagttttgctaacaacccaaatctttgcggccctggtactacaaagccttgtcctggggctcctccattttctccaccccctccatacaatcccccagcaccaacttcatcaaaaggcgtgtccagcactggagcagtagctggaggcgttgcagctggcacagcgttgctgatcgcagtgcctgctattgggtacgcattgtggcggaggcgaaaacccgaagagcaattcttcgatgtccctgccgaggaggatcccgaagttcaccttggacagctcaagaggttctcgctgagagagctgcaagtcgccacggacaattttaacaacaggaatgtcctgggaagaggcggttttggaaaggtgtacaaagggagactaacggacggttcactggtagccgtgaagagattgaaggaggaacgcacccccggcggagagctccagttccaaacggaggttgaactgattagcatggcggtgcacaggaaccttctccggctccgtggattctgcatgacccctacagagcggctgctagtgtatccatacatggctaacgggagcgtcgcatcgcgccttcgagaacgcgcgccaaatgagccccccctcgaatgggaaacgagggctcggatcgcgctggggtcagccagaggcctgtcctacctgcacgaccactgcgatcccaagatcatccaccgcgacgtgaaggccgccaacatcctgctggacgaggacttcgaagccgtcgtgggtgacttcggcctggccaagctcatggactacaaggacacccacgtgacgaccgccgtccgtgggacgatcggccacatcgcccccgagtacctctccacggggaagtcctccgagaagacggacgtcttcggctacgggatcatgctcctggaactcatcaccgggcagagggcgttcgacctcgctcgtctcgcgaacgatgacgacgtcatgctccttgactggggctccccgatggagcggcccaagatgtcggaggtggcgcggatgctggagggcgacgggctggcggagcggtgggagcagtggcagaaggtggaggtgatgcggcaggaggcggagctcgccccgcgccacaacgactggatcgtcgactccacctacaacctcagggccgtcgaactgtccggcccgaggtagggaggtagatgatcgccgtcgggatccttgtcgtctgtgaatatgacagcggataggtagcttggtggttggtcctgtctttaatgatagctgcgaaactgtagatgaaattgtgtgctcgtcttctgtaacctgagtacctgacatctctgacattttttttctgatattagagagccgtatgacaccagcctctgttgagcc

SEQ ID NO: 27571 - DNA, 1636 bp, Zea Mays
acagatggtttttgatgctgctttgagaacatgtgggcagaaggaagtgctctattgcttaatgtgcactgaactctctacctatggtaaatggattgaagccaagaacattctagaaatggcacttgaaatgagggtctctatccagagtttcccatataagcagataatttcagggctctgtgaagttggggaggtggatcttgcacatagccttctcaagttgttaatagctaaacgacatttgtttgatccagcagtgttcatgccagtgatagatgcattaggtgataggggaaagaaacaggatgttgatatgctgtcagcaaaaatgatggaaatggctgaccgtaatgatggtcttggaactgattctggtaagattacccctggaagctgtaagcatgagcatgacaggaatggtgaaagcgattggcgtaatcttttgcacagagatgacagtgcccgcacgattatgaaaattacaaagagagtgcggacagggtggggtcaaagaggcaatgtatatgagcataaacagcaacagggtgatggcttttatgtactcgagaacactggctaagcgttatgtgatcttatcaaactgtccaagtaggcaagtactgcagcgctataattttgtgctaccatctgagacacagcttttgttctatcatggattcttcatcactgtcgggagctcagtttatatctggtttggtcatgggcatcactgggctctcttcagacatacctgtggtggtgactgcgaacaacattgcaacgaggctgtcgctcccctcagcggcatcgtcaacctcaggtgtaaggtgctccgcgacgcaacggtgacaagggaagttcagctatgcatggccgtgcggagagaatggaggctgcaccggtgacgaggttcatgtccgtgcttcggcggtgtgcgacaagcggcaacccgaggcattggttaaccgcgcaggcatgagactttcccttcttcggtctaaactgcgtcagcttttgcgggttcttcacctttagggatcagtacaaggactatattgttaaacacctccgaaaatataaatcacccccgttgaggagctcaagaatcgcccttgaaatttcgtctctcagcaagttccagcgtcgacgatagaagccaacggcaaagcaattgactgggccatggagctttatttggcttcagcatgaaaaggacttccttaatttatgtccctgtgaaaggtgaacataggacttccttaatcgttttcagaatcagttacattcctggggacatcacacaacacctcctctggattagtatcttgtgtcgagaaaacacgtttgtagaattcagctgctcactttgatcaatgcaaactgaaccatcctggcgttaaagggcggtaaatttaggccctgttcggttgtaccggaataagccatgattcattccagctcatcaaaatctatataaattagagaagtaatccggctaggaattaatccggggctccaatccaaaacaaccgaacagggccttatttgctcgttccctttgtcgtgctttggcctggaagaaccatgtatccaatcaccagccagcaatagcgtgcaaacactgatgcattgt

SEQ ID NO: 27572 - DNA, 1291 bp, Zea Mays
tgactatgttctgaaaacatatttgtacaggtgtttggaaaagttgaagagagagacatgttcggagaggttggtgctctgtgtgacataccccagccatttacttgtcgcaccagtaccctatcacagctcttgagaataaggaagataagattaacagagatcatgcaagaacacagggaagacagcaatattatattgaacaatctatttcagaagctaaagctgcaggaaaatttaccagaattaaatcaactagatcgaagattcatgcacaagtatgagctattccatgctactcgagaagcatggttgttacctcaaccttacttacaatacactgagcacaaatttgaagacattagtaagaaggccccagcctttggtggagatcatggttcaacaaaactagcagcagaaacaatccagttgagggtgccacagcaaggaaacagtcatgaccatggtaattttggggcgacagataggatggcaagtggagatgacaaacgtaatgatcttcacataaactgtgagaccaaaaaaggaaccaaggaattttgcattcagataaaatcgaaagattgtgaagcagcaagctattggcaaacaagccctgaaacagtgaagctgggttcttcccacagtacattggatgccataactacgagagaaaatcaagatactagtaacataaaatcatctaacaaaagagttacaattcacgcagatcctcataatgcaacaggttctttagtacaaaatgggaagcttatcaatctgccttgttcactggaggagattttcgaaatcggaagtcagaagtttccaggtttccaccctacaaaattggtcagtagagactatgctgagatagatgacgttagtgttattcgagatggtgaccacttattccttcttcagatgtagaaccagaataacatcgatctaacctaacgtaacaataaaggcttcaagtcctccaatctggcaaaaacagcagattgtaaatcgagtggagatatgaagaggaatacctttttacaaattgttccggtcatttctgacattatgtaaatatctatttgcacgagctgctgtctcatgcaaaagtcatgccagaaagcggtttccgttttttttttctttctatttgataataagctctagacaaaaatatggaatctccgcaaaataaacttaataaaggcgaggctttacaaaataacagtaagggcccgtttgttttgttggaattgaattccattctaataattataatttagataaa

SEQ ID NO: 27573 - DNA, 65 bp, Zea Mays
aacccatgttgttgcaggtactagaattgtgctgctgtggatgatgttaagcgccggtgggcatg

SEQ ID NO: 27574 - DNA, 2106 bp, Zea Mays
gcccgttccagtggaccattgggctcaagaacagcccgacgtgggatgggagtgtcctcaaacccatccgggatccggccatcccgcacgcctcgtcctcactcctcagtcctcacccccgacacaggtctcgctggtagcttgccctcgtctgcgccacgcctcctctagcccacctcctgctcctcccccactcgcacagtgctcaatgccgcacaaaccctagtgcccccactccctgtctcgcgtggcagccatgggaaactgttgccgctcgccggccgccgcggcgcgggaagacgtcaagtcgtcgcacttcccggcctccgccggcgggaagaagaagccccaccaggcgcggaacggcggcgggggcggcgccggggagaagaagcggctgtctgtgctcggggaggaggggtgcgacgttggcgccgggatcgaagagaagtacgcgctggaccgggagctcgggcgcggcgagttcggcgtgacgtacctgtgcatggaccgtggcacgcgggagctgctggcctgcaagtcgatctccaagcggaagctgcggacgcccgtcgacgtggaggacgtgcggcgggaggtggccatcatgcggcacctgcccaagagccccaccatcgtgtccctgcgggaggcgtgcgaggacgacggcgccgtgcacctcgtcatggagctctgcgagggaggggagctgttcgaccgcatcgtcgccaggggccattacacggaacgcgcggcggccgcggtcacgcgcaccatcctcgaggtcgtgcagctctgccatcgccacggcgtcatccaccgggacctcaagcccgagaacttcctcttcgccaacaagaaggagaactcgccgctcaaggccatcgacttcggcctctccatcttcttcaagcccggcgaaaagttttcggaaattgtgggaagcccatactacatggctcctgaagtcttgaagaggaactatggacctgaaatagacatatggagcgctggtgttatcttgtatattttgttatgtggtgttcctccattttgggctgagactgaacaaggagttgcacaagctattcttcggggaaatgtagattttaagcgagaaccctggcccaatgtttcagataatgctaaagatcttgttcggcagatgcttcaacctgatccaaagctcaggctaacagcaaagcaagttcttggttattgctgatcacttgtcggctgaagaggttcaggacataaaggagatgttcaaggtgatggatactgataatgatggtatagtttcttatgaagagttaaagagcgggatcgcaaattttggttctcatcttgcagaatcagaagtgcaaatgcttatcgaagctgtggatacaaatggtagaggagcactagattacggtgaatttttggctgtctcgctccatttacaaaggatggcaaatgacgagcaccttcggcgggccttcctatttttcgacaaggatggcaacggtttcatcgagcccgaggagcttcaggaagccctgatggaggacgggggagctgataccatggacgtggtcaatgacatattgcaagaagttgacacagacaaggatgggaaaattagctacgacgaatttgtagcgatgatgaaaactggcacggactggaggaaggcatcgcggcactattcaagagggcgcttcaatagccttagcataaagctgataaaagacgggtctgtaaagctgggtagcgggtgaggttgcagctctgcaaccgatgctcttctcttctcttctccacgcattgcccctcgggcccactaatgattatttgtggtccgggatttagatagtcggagcctccctgattggtttactcgtgtaattagcagccttttccagtgtcgctggggagcatctgctgaaggattgcacacctgcacgcctgctcatctcctccggtgtagtacctgacgctcaaaatgttgtaaaaatgttttggtgttgacctcaaatataatgcaatttgctcgctggtaccgtgtgctgtcaccctatactcatttgcacctacaaatcggtgaagagtaactatgacagt

SEQ ID NO: 27575 - DNA, 5672 bp, Zea Mays
ccaccccaaaagcccaaactccggtgccatcagtgtattctctaatcacctcctctcctccctccgctccttcgtcctccccgcgaagggaggggtgtgtcctgtgcccgccaccgcgtgggatgctcacgcttcgtctccgccaccgcctctccggttgatccgccgctgaggagaacatcagaactgattgaagaacagggttggtaagtggagggagcgagatggggttcgacccactggagtggtactgccagccggtcaaggatggtgtgtggtcgcatgtggttgagaatgcgttcggcgcctacactccatgtggcactgacacccttgtagtctgcatctcatacctcgcactctttggagtttgcttctatcgtatatggaggacgacgagggactacacagtgcagcggtacaagttacgttcaccatactacaactacctgcttggactgctcgtggtgtactgcatagcagagccgctttatcggatcatcactggtacctccatcatgaacttggatgggcagcctggccttgctccatttgagatggtacatccgatttgtggttatttacatgatggttggcgaagctgctatgttcaatcttgtgctctctgtgaggcagtactacagttcaagttcaatcttttacctatactgcagtgagattgtatgccagttcttgtttggaattctcatggtggtttatctgcctagcttggatccatatccgggttataccccgatcaggaatgaagtgttggttgataatactgattatgaacctcttcccggcggtgagcagatttgccctgagagacatgccaacatatttgccagaatattcttttcatggatgactcctttaatgcaacaaggatttagaaggcccattacagataaggatatctggaaattggatagctgggatgagactgaaactttgtatagccagttccagaaacgctggaatgatgagcttcaaaaaccaaacccttggctgttacgagctcttcatagtagtctttggggaaggttctggctgggtggatttttcaagattggcaatgatgcttctcaatttgttggtccacttgtattgaacctgttgttagagtctatgcaaaaaggtgatccatcttggagcgggtacatctatgctttctcaatctttgcaggagtgtcacttggggttcttgctgaggcacagtactttcagaacgtcatgcgtgtgggtttcaggttgaggtccacattgattgcagctgttttccgcaaatctttgcgactaactaatgatagtcgtagaaagtttgcttctgggaggattaccaatttgatttcaactgatgcggagtcccttcagcaagtgtgccagcagcttcacagcctatggtctgctcctttccgcattgttatttccatggtccttctatatgcacagcttggtcctgcagcattagtcggtgcactcatgctggttcttttgtttccaattcagactgtaatcatcagcaaaatgcaaaaacttactaaagaggggttgcaaaggaccgacaagcgaatcagtctcatgaatgaagtattagctgctatggatacagtcaagtgctatgcttgggagcaaagtttccagtcaaaagtgcaggacatccgtgatgatgaactttcttggttccgcagggctcagttgcttgctgcgctgaatagctttatcctgaacagtataccggtcgttgtcactgttgtttcatttggtgtatattctctactgggaggtgatttgacaccagcaaaggcgtttacttctctttcattatttgcagtcttaaggtttccacttttcatgctcccgaatctgataactcaggtggttaattgtaaggtgtcattgaagcgtctggaagatctcctgttggctgaagagagattacttctgccaaatccacctattgatcctgatcttccagccatttctatcaagaatgggtatttttcatgggaatcagaggctcagagaccaactttatcaaatgtcaatctggatgtacctgttggaagtttagttgcaatagtaggaagcactggtgagggtaaaacttctctcatatctgcaatgcttggagaaataccaccagtatctggatcaggtacctcagtggtcattcgtggatcggtggcttacgttcctcaagtttcctggatcttcaatgctactgtacgtgacaatattttgtttgggtctccctttcaacccccacgatacgagaaagcaattgatgccacttcattgcggcatgaccttgacctactcccaggaggcgatctgacagagattggtgaaagaggagttaatattagtggagggcagaagcaaagagtttcaatggcaagagctgtgtattctgattcagatgtgtacatatttgatgatccactcagtgcattagatgcccatgttggccggcaggtatttgataaatgtatcaaaggcgaactgcagcataaaacccgggttcttgttaccaatcagctgcattttctgccatatgtcgataaaatactgctaattcatgatggtgtaattaaagaggagggtacttttgatgaacttagcaacagtggggagctcttcaagaagctcatggaaaatgctggaaaaatggaggaacaggtggaagaggatgaaagtaaaccaaaggatgttgcaaaacaaactgtgaacggtgatgttacaatagctgatgaaggttcacagaagagccaggatagttctagtaaaacaaaaccaggaaaatctgtccttattaagcaagaggaaagggaaactggggttgtcagtgcgagggtcctttcacgttacaaaaatgcactgggagggatatgggtggtgtccatactcttcttttgctatgcactgactgaagttcttcgcatttcaagtagcacatggttgagcatttggactgatgagggttctctgaaaattcatggctctggttattataatttgatctatggaattctttcctttgggcaggttctagtcacactctcaaattcatactggttgattatatcaagtcttcgggcagccaaaaggcttcatgatgccatgctccgatcaatattgagagctcccatggtattttttcatacaaacccacttggacggatcatcaacagattttcgaaggatatgggtgacattgaccgaaatgtcgctgtatttgtcaatatgtttatggcacaaatatctcagttgctctcaactttcgttctcatcggctttgtcagcaccatgtctctttgggctatcatgccactcctgattttgttttatgcagcttacctctattaccaggcaacatctcgcgaggtgaagcgtctggattccattaccaggtctcctgtgtatgctcagttttcagaggctttgaatggtctgtccacaatccgtgcctataaagcctatgatagaatggcaaatatcaatgggagatcaatggacaacaacattaggttcacacttgtgaacatgggtgcaaataggtggctagctattcgtctggagacattgggtggcatcatgatatggtttacagcaacatttgctgttatgcaaaatcaacgagcagagaatcagaaggcctttgcttctacaatgggtcttcttcttacttacactctcaatattaccaatttactcacagctgttcttcgtcttgctagtcttgctgaaaatagtttaaatgctgttgaacgggtcggaacatacattgagttaccttcggaagctcctcctgtcattgaggatcataggccaccccctggttggccatcatcaggtgtcatcaagtttgaagacgttgtgcttcgatatcgaccagaacttcctcctgttcttcatggcatatcttttgttattaatggaagtgagaaggtaggaatagttggcagaacaggtgctggcaaatctagcatgcttaatgctttgttccgtatcgtggagcttgaacgagggagaatattaattgatgattgtgacacttctaagtttggaatttgggacttgcgcaaagttctaggaataataccacaggcaccagttctattctcaggttctgttcggtttaatctggatccctttaatgagcacaatgatgcggacctctgggaggctctggaaagggctcatctaaaagatgttataaggaggaattctttaggattggatgctgaggtttctgaagctggtgaaaatttcagtgttggacaacgacagctgttgagcttagctcgtgcgctgctgagaagagcaaagatacttgtccttgatgaggcaacagcagcagttgacgtgcggactgatgctcttattcagaaaacaatccgagaagaattcaagagttgcacaatgctcataattgcccaccgtttgaacacggtcattgactgtgacaggttgcttattctaagttctgggcaggttctggaattcgactctcctgagaatcttctaagcaacgaggggagtgctttctccaagatggtgcaaagtacaggacctagcaacgcagaatacctcaagagtcttgtatttgcaagtggagaagagaggtcccggagggaagaaatcaagctgcaagatatccaaaggagatgggttgcatctaaccgatgggctgaagctgcccagtttgcgcttgctagaagcctcacatcatcacatagtgacctccttgcattagaagctgccgagggaaataatattctgaggagaacaaaggatgctgtaatcactctgcaaagcgtactggaagggaagcacaatactgaaatcgatgaatctctaactcagtatcaggtcccagctgatcgatggtggtcttcactttacaaagtgatcgaaggcctcgccacaatgagcagattgggccgcaaccgtctgcagcaaccttcttataattttgagaacaacaattctattgactgggaccaaatgtagatgtagaattctggatcacaacagcattgtggagtaggctggaggtgtagttatttctggcggatttgattcctgcggtgtgtaaacgctgcagcaacacgtaacttgcgaataaggaacgagttttgccacagcaggacgatccttgtaccgtcgtccgcaagggttgtaatttctcagggaccgttacgacacgattgtatgtcaggttttgacagtttgagccaatgcaattcttctaatgaaaaagacaagtgcatgtgaatggttagcatctgcctatcgcctatcgggtatcatgtggagtcgtctggtataccgtcctacacggctacacctgagaacgaagcgaccttacccccaactatcaccttgtagcgatccgaagttgttcatcttcgagtttcagttctctaactccatcgtagctaagcgtttcagcaatgggtcaagagagagatttaactatttgtcaccgttaggaaggccacatatttgtttgcttgttttacgtggcaactgtacgattttttatcggaaacgctaactggtctattttattgatgtaccatgttaaattagcatgtcacggtggatcctagtcttttttccggagagacacctggaaagtcatttttaccttcgcattttca

SEQ ID NO: 27576 - DNA, 2916 bp, Zea Mays
atcacaattttgcgaaaatctccctccgccagcgccttggtccgcaggattccagataccttcatgctgctgaatgcctacttggactcatttaccggccctctgattgaagaagtacactgtgacgtctttttgtcactgagcggttatgctcatgccaacttcatagagatagtccgactggataagcttaatcatgagaaatcaatatatggtttcgtggtttccatgccttccaaggacgcaaagtcgagggagatttatgcccccaaagaaggcgatatagtggttgtgtccttgcagaaaccgaagcatgtgtctgatctgacaaagaacaggtcatcttacaatctaggctccattctgaaatctggaaaagaagaagaagaagatagcgatttgccgccaaatttctgcattgttaggtttctgtcagctattcctgtggaagtagatcctgaaacaagcaagcctagagggccatgttttgctgtctttctcataaacaccacgacatatgaccacatatggacgtgccttcacttggtagcaaatgatcataatcttgcaccactccagaagagagggtctaataccgctattgtcaatctagtgtggcaatacaagcgtcgggcagctgaagatggtagcttgtcattctcccagctctcccaaagtgtcactcagtcagttgatgaccttggcctcgagaagttcggcctaaatgattcacagttgcatgcagtagctgactgtgtcttgtcagcaatagacaaccggttgccttccctaaaactaatatggggcccccctgggacaggcaaaacgaaaaccatctgcactatcctctgggcaatgctcatgaagggcttaaggacacttacctgtgcccctaccaacaccgctgtattggaagttgcatctcgaattgtcaggctcgttgagcatctccatggcagtgtctgctttctcaatgacattgtcctgtttggaagcaaagaaaagatgaaaatcggccgtgaggacgccctttccatggtattccttgactctcgcgctaaacgactgctgccgtgtttcatgccaaccacaggctggatgcattgtttgcgctcactaatggaccaccttgagagtcctattacccagtacaggttgcatcttgagaaattactcaaaaatgaaaagaaaaaggagagcaataagggaggttctagagcaacgcagggtacgatcattagaataccgccattcaaagatttcttcaaaggttatttcaacaaggtgtcaaatttgctgagaaagtgcgttgagacaatgtacaatgatcatccacgaagtccagaaacaggacacagctttcagtgcatgctggaggtgcttgagttgattggaattcttcaggagctgataaactgcaaaaacgatgacatatggtcagatgaatttcatgattgcaagatagaagatgacggtgaccccattctgtggtctgagcagctagcccatgtgcggagtaacactagcaaaaagcacaaactaaagctagctagatccttgtgtgtgcgagaattgagatatcttcacaaaaatctggagcttcctggttactccagcaagcgatcagttgagacttacttgctgcagagagcaaaatgcattctctgtacagtttctagttctttcaggttgtacaacgtgcccatggatagttcttgtacagacattcacagtttgctcaaagggcctgaaacgttcaagcttttggatatgctgatcgtggatgaggctgcacagctgaaagagtgcgagaccttaatccctttgcagctgccaggcataaggcaggccgtgtttgttggagatgagtatcagctgcctgctttggtgagaagcaaaatatctgatggcgcaaacttcggccgaagtgttttcgaaaggctaagctcgctgggttacgggaagtaccttctgaatgtgcaatacaggatgcatccagagatcagcaggtttcctgttgccacattttacgatggcaagttatctgatggccccaacgtcactagtatgagctatgagaggacgtttttggcgagcaaagtatttggaccgtattcctttatcaatgtggatggggggcgtgagacaactgagaagcatggcacgagccttaagaacacagtagaagttgctgcggtcttgcggatagtgcagagattgttcaaagagtcagtatctacaggttgcaagctctctgtcggtgttgtgtcgccgtacaatgctcaagtcagagctatctgtcaaaaagtgggggaatcctataatgcacacgatggtttctctgtgaaagtgaaatctgtggatggtttccaaggcgcggaggaagatgtcctcatcatatctacagtgaggagcaatggagctggttctgttgggttcctcacaaacctgcagaggaccaacgtggcattgacaagggctaagcattgtttatggatagtaggaaatggagcgactttgtccagcagcaagtcagtttggcagaaaatagtgaaggacgcacgtgatcgaggctgctacttcgaagccagcgacgatggggatctgtcgaatgcagtcgtcaaggccatcattgagcaggacgatgccgataatttggtgaggatggagtcgctgcacataagcaggccgaggtctcagcttcagaaatcaggacctaagaacttttcatgagaggccacaagatgtctacaaagggcttgttgaatttgaacatttggatagtagaaaaagagaaagcactccctctgtctttccccaaaagatttgcacttcgaatggtttatgtttcaccaagttcttaacagatcaatcttatcgaggccggtcaaaaaaagaaaaggaaaaaaaaaaaag

SEQ ID NO: 27577 - DNA, 5195 bp, Zea Mays
caaacccaacccgaacggccaaacccacacaacgcaggccgcggctgcggcgcaggccccgcgcgtcagttaccgctgcccacccaccgggcacactttcaacacaggtgctgcgccggatgatcccaagagcagcaaacaaataataaacccctccaggcatacgcgagagcactctagtctcgagcacagcacaaggccgccggtcccttctctcccactcccactactcgcgctcgccgctggatcctccacccgccgcggcgccaggccggagatccagcagctgggaccacggaggtcggccggttgctccgttcccgctggtggttgctcttcggccgctggagatcggcagacggaagcagttgacgccacagggcttcgtgctgccgaattccccagatattctgggggttcaaccgaacccccatgcccgacaacactgggcttgaaattggccttaaaggctccaagggagccccaatgccaggaacggaaggaagagtggcaaaggatttgaagaaagctcctgcctccttggaggaaagcaatgcttctcgtgatgaggatcctggcggagggcctgccttgactgggaagaaaaggaaggaccggaggggttccgcggatgacaacaggaatgtgacaagaagggtgttgaggtccgacgccatgaagctgcgtgctgaggctgaggcaccatgtggagcgggtgtggaggttagcaaaactgatagtttggagaggaaacactgtgacactactgtggaggctgaggcttgcaaaagtagtgtgctgatggaagttgcctgcaatggtggggaagccaacggattagttaacttggatgcgagcgatgtttcggaagaatcaactaggtgttctgataataatatgggaatgcctggtgttcctgcaacagatttttctcaagatggtggcttagctcaaggtagcattgcagaatcagatgataagacagtcaagtcagatgaggtgtccgctgtaactcattcagagcagaatgactcccaagctggaataaacagttataatgctgatgaggcccaagataacaaagtgagacatgggccttgtcaggatgaggtcatagactcagcaattactaatggtgccaacacaagtacagatttaaccaaaaccagccctaccagtggatcagaatctgttaagcaggatgatagtaagcaggagaataatttggttcatactgaaggagtgatactccacagtggtgatccgaaagttgagaatcattctcaaattgaggacacttgtacagaaactgagatttctttgactgggaatggaagatgtgcagctgataaccacactgatcgaactgggtacactaagcaggaggagaggggcagccctgtgaacgaaaccaatgatatttcggcacatgacattgtttttacaaggagaggtagaaaatcatgtgaggcaaagcaggggacatgtgaagaggagtcacggtttgagaagcgagttacgagatcagctacagttagacagagagaagtttctggaagcttatgcaaaactaccacgaatgagactgcactaggaagcagagggaggaagggagatattattgctcactatacaaggaaagtgagcagtgcagtatctccaaaaggtcaccatgctgagctgggagaatgtaataccagtatggagaatcaaacagtgaaacaaaaggtggttgatcgaagagattcaggtgccactaagaatgataatgatgcgaatgacacaaagaataaggaatcagaaaagacagagatcaatctgaagacgcaaccacctgttggaagtgttagcattgtaaataaaacaactgtaggagctgtttctgtggtgggtcagagtatctctggttcagccatcactgagagaaatgatacagatcatactgattctgatggagttaaatatgaaaatatgactcttgtgcagaaactactactgtctgttggcgcgaagattgttgccagcaagaagagggtattggaagcaggtcctgataaaaccactggaaggtcaccaattgctttgccatccatgaaaaagacaagaaatacgtcttctgatcctgagatagatcaacctgataagtcttctggagagaagcttattggaaataactgtgatttgggcaataaacgtgttttgagggaacggcagcatcagaatcaaacatatttgtcaagcaggtcttctaaccagtctaatcaaaatgctatcaagcagacacaggatcaatctgacgatgatgacatcagcagcgatacttcctacaggagaactcgtagcggacgtcgtcgtggtgctgcccgtcttgccgtgccaaaacaagaggactccagtgattctgaagaagttgttgttgtgaaaaagaatcgacggaaacgtaagaaatctgtgcataaacacagggctggatctaagttgaagcatacttctggtagtcctcccaaaacaggtcgtttgggtagacctccacttgtcaaatctgaatgtggctgcttacctctgcagccaggaaaagggaaaatgaatgtgcctgaaggtacaggagctctacgcgaagaaaaacaaaaaataagtgatcagataaaggccatgcttctagatgctggttggacaattgatttaagacccaggaatggtagaaactacatggattccgtgtatatacatcctagtggcaaagggtcttactggtcagttacaaaagcatattacgtgttccgtgcagatatggaatctgagcagaaggaaagttctaaagaccatattctgtcaaaaaaatctgttggtagccccggcaaaaggcaggtctctagttcttcaggctgtactttaacagatgatatccttagcaaattaaaaagagttgttgtaaacaaacgaacaaccaaagtagagattcaaaggttgagacagaagaaggaaaagaagaatactacaaattcaacaagattgcatttaggcaatgaaagaaaaaagagaggtggctgtgctctactcgttcgtggatcgaacaaggagtctggcagcaccactgatggttttgttccatatgaatggaaacgtacgatcttctcctggctgattgatctgaatgttctatcagtcaatactaagctgaactgtttggatgaaagccactcaaaggttttactagagggttttgtcactagggatgggattaactgcagctgctgtagcgaggtcatttcagtgccagaatttgtgactcatgctggttctgaagtaaataagccatacagaaacatacttgtggatgggctagacattgaccttttgcactgtctcattaatgcatggaatatgcagtctgatgctgaaagacaagatttctttcccgttagcattgagggagatgaccccaatgatgacacctgtggtatttgtggagatggaggcaatttgatctgttgtgatggatgcccctcgacatttcacatgagttgtctaggactggaggcacttcccactgattattggtgttgttccaactgctcatgtaaattttgccatgaacattctagtgatgatgctgaagacactgctgatgttgattcttcattgcatacttgttcccagtgcgaagagcagtatcatggagcctgctctcctgatattgattccatagctactaatctttctagtcagacaggcaatttattctgccaacaaagctgcagactgctgtttgaggaattgcagaatcttctcgcagtcaagaaggatcttgaaccagaatactcatgcagagttgttcaacgcatccatgaagaggtaccagaagaagtccttgctttggacaaaagagttgagtgtaactccaagattgctgttgcactctcattaatggacgagtgcttccttccgattgttgaccagagaactggcatcaacttgatacgcaatgttgtgtataactgtggatcaaattttgcccgattggatttccgtggattctatataattattttagaacgtggagatgaaataatagctgcagcatctgtccgaatacatggaaccaagttagctgagatgccgttcattggtacccggaatatgtataggcgacaagggatgtgccgccgacttgttgatggaattgaaatgatcctcagctctctcaatattgagaagctgatcattcctgctatcacagaacttgtggacacctggacatctaaatttggatttagtccactggacgattctgagaagcaggaagtgaaatccgttagcatgttagtttttcctggtacaggtcttctccaaaagccattgctgaagacctcaccatcggaagatcaatgctcccaaggagacaaaactgaaaaatcatctgatgtagtcaatgaagattcgctttgctctggtgcaagtgccgaccccctaggttcggtggtcaaagagcatggggacaccagcaaagatgccgatggtacttgcaacggtgatgtttcacagcgatctcctctttcctgatggtaagatttggttgcagctttctgggcccccccaagctttatatggacgaaacctccgtttgtttttgtacctctcgagttttgactcagcagccagcatgacaaccatccgtttggcagaaagaggcttccggttttttgcagattagttgccggggcacccctgtagttgtactcagaatttgaccattgactcgtcggcctgggaaaagaatcagcccgtgcagtactgaaaagcgtttactccaaccaggaaccagctaacttactgtgcagctgaaaagtcagtatgcagaatgtggaggataatatcacttcttttgtttttttttggtcgttaacttagaactccgagggcgagtcgtcgtaaatgttacaccagttgttattttgttaatagctttttttttaaaaatgttttcgctagcgcattcctagaaccttctcatttctgtaagatagttctcgcctctgtaagataaactaatgtatgcgcaagctagaaatagtccgcctgatccgtcacgcggaattggttacctaaaccctgttaatgtttcgttttgcatcgtgttggaatgtgtgtgttcttcctgtgaaggaaagcttttgcgggtcattatactagag

SEQ ID NO: 27578 - DNA, 2400 bp, Zea Mays
caaggggacgccgcctctgctcctccgccgcccactcttctccccctccttgcctgcggattggggcgacaggggttggcgatgccggaggtcaatgccggcgcgctggcgcaggcggagcagaggaagaaggcggggaggtcggttccagagcgtggaaagcgcgatagagattaagagatacgagttgttagtcctccccagagtccgaagcaagctactaggttttcagtttcagatccccgaaaaatacggttgttgttttgacgccaaccgatatacgcggcaggagtaccacgcgacgctggtattggattcgcgtgacttggaacccaccagacatggagtccttcagcgacgccgacagatacataccccaagagatcatcggcagaggcagctacggggtcgtttgctcagctattgaccggcgcaccggcgagaaggtcgcgatcaagaaaataggaggcgtcttcgatgacctgtccgacgccgccaggaccctccgggagatcaagctgctccggctgttacgacaccctgacattgtcgagatcaagcatgtcatgttgcctccggctaggagggactacaaagacatttatgtcgtgtttgaattgatggaggccgaccttcaccaggttatcaaggctaaccctgacctgacgacagagcaccaccagtactttctctatcagatgctgcgtgcgttgaagtatatgcatgctgctaatgtttatcattgggatttaaagccaaaaaatatattattaaatgctgactgcaaactcaaaatatgtgactttgggctagcaagggtcgcgtttgatgactctccaaccacagttttctgcacggactacattgctactagatggtacagggctcctgagctatgtggatctttcttcagcaagtattcaccggctattgatatgtggagcattggctgcatttttgcagagattttgactggggagcccttattccctggtaaaaatgtgtttcaccagttcactttgatgactaatctcctgggcacaccatcaacagatactatttcacagattcaaaatgagaaagcaaggaagtttctgagctgcatgaggaaacaaccaatacccttttcagagaagttccctggtgcagatccttcggctctcaagctcttacaaaggcttctagcatttgatcctaaggaccgaccaacggctgaagaggcgttggccgatccctattttgaaggcattggggaagtggagagggaaccatcctgtcagccaattccgaaaatggaatttgagtttgaagaaaagtttaccgaagaggacgtcaaggaacttatattcctggagatactgcagtaccatcctcaacttctgaaggattacaagaatagctctgaaaaaacgagctttctatatcccagtgctgttgacaagtttcataggcaattcactagcctagaggaaaatagagggagtaatgtcatgcttgtcaggaagaatgcttctcttccaaggacaacaaccgttcactccactccaattcctgcaaaggaaggtccaacagcaacctcccaggctgctcaaaggattccagcagccagaccaggaagagtggtaggcccagtactaccattcgagagcgcaagcgtcactgatcaacacatcgcgcgacaggtggcaaggaacccagccgttcctccagcaaccaacacctcgtcagcctactgctaccacctgaaaccggacagcgccgacaggcaggagcaacagctagagcttgaggaagaccatatgcagtataggacagggcagcatcccatggatgccaaggggcttgcccaaagcgacctaacagacagggccaacctccataggagcccgctgcacggcgttgctcccttcaaaggcgtcgcagcggtcgctggtgttcttcaccgaaagagcgaaggatgcccgatgactggtatgttggatgagctgcagcagatctgcaacgggatggtgaaactggttcagttaacgctaggcctcgagctcatgtttctgaactcgaaggaatttttggaagcttaacaagaatgcatctcttgctatcgttctatatatagcaaagtgatttcttctccggaatttggaggattagttaggagaaagctaggtgataacagacacatgatcgttaaggtgttcgctttggattaaagtcagccaatttctacgctgttttgtctttatagattacagttgtagcagcctaaacagtctgcatacctgtgtatactgtacacccatttaattgagggtttccaaacttttgtttgatggcagtaagctgaagacaccaccagatcatgttggctcttttattatctcccagggagacttcacctag

SEQ ID NO: 27579 - DNA, 878 bp, Zea Mays
acaagtcagaagttgtccattcattgaaagaggaattgaatctgatgtgtggcctctcttgctcacagcgcccatcagcttatactgctctctctattggacgatcaaagtggaatggtcaagtgggcagttctggagtggtaatcaccttggaaacacctcttaataacattggaaggccgtcgttatctgttcaactgaatggtggttttgagttgtgatccttatgactcctgcactgaagctgtacatactattgtatatattgccatcactaatgttcgtgctccattgtcatggagacggctactcagctgatcaacctagaaaagtttgtggaagtgggctgcaggcttgcaggttgtttttgttactgtagtctataggtctaaagtctcaactcagcaaatcagctgctatggtatactcatgcgggcacagaactcaactgctttgttttccactcgaagaattataacaatccttgaagggattgcgatacttgcagcagttcagctcatattttcagaagttcatgaaagcggagggctcgctgccatggaatatgttcgtccagaatcacattttcttggagcaagactgactacctgtcgcaaactcgcagttggacattgttaacaattgtctgtttagtttgctttgttggatgttgagacaaacaagctggtgtatttttgtatttctctacatgcattgatcaatgaaccaaagactagcgatccctgttctactgttccactgacatgacaaatctgctgtcgatgttgtcccattacgtgctagtttcaaccttaacttatactagtttcaatcttaacttatatggaatttgactatgttgcagaaagaaatttgcc

SEQ ID NO: 27580 - DNA, 1093 bp, Zea Mays
gctagcaatgcgatcgtcaactgtctccgatccgcctgtgttattgcggcgcaaccttcgccgggctacttcccgagctccacagtgaggcccatggccttctcggatggatacgacaacctgtgggggccgcagcaccagacgctgtcgcaggacaggatggcgctgacgctcttgatggaccgcacctcaggcagcgggttcaagtccaagcgctcgtaccggaacggctacttcggcgtctccatcaaggtgcagccgggctacaccgccggcgtcaacaccgccttctacctgtccaacaacgagctgtaccctgggaggcacgacgagatcgacatggagctgctgggcaccgtgccgggggagccctacacgctgcagaccaacgtgtacgtgcggggcaccggcgacggcgcgcgcctcgtggggcgggagatgcgcttccacctctggttcgacccggccgccgacttccaccactacgccatcctctggaaccccgaccagatcgtcttcctcgtcgacgacgtccccatcaggcgctacgccgccgccagtgcgccgttcttccccgaccgccagatgtgggcgtacggctccatctgggacgcctccgactgggccaccgacggaggccgctacagggccgactacagctaccagcccttcctggcaggattccgggggttcaggaccgccggatgcgaggccgccgcgcccgcccagtgccgtcccgtgccggcgtcccccgccggcgccggacttagcgtgcagcagcgggacgccatgcgctgggcgcagcagacctccatggtctactactactgccaggattacaccaaggatcgctccttgtacccagagtgctcgctcgctagctagcctagctagcactaccactaccagagcatgcatggaggaggcgtgcgagtgaagaagcgccgccctacgtacgtaccgttctaaaattgtatgtacaattaagtctccatccacatccatatatacaacatatgtaatgtataattaagtccattattaatttaatcatcaaaaatggaacatgcctatatatttcctactatatata

SEQ ID NO: 27581 - DNA, 1810 bp, Zea Mays
gaccacaagttctaatcgcggcggcggactcgccccgtccggccgcccctctcagggatgatttggtgattagggatccctaggggatccacgggggaggaattcccttgcaattcaattttgaatagcaagaggatttcttcccctcgggatccccggtcaccaaattagccctcacgctctcgctgtctcgcttcctggccgcgaagctccagttcagtctccgccactcgtgctctcgtagcgtagagcgaggccagggcgggaccagcgtggccggcgagaggggatggcgggctcggccgcgtactctgcttccgctaccaccgtggtggcgatggccaagggcaacggcaacagcaagggcgtcagaggcggcggctccgcgggcaccaacaaggtgacacgacctcctaggattacatctaatgttaagcagaacttgaggattctaaaattttggaaggaatttgaaaggaggcaaacaagtggacctcagcctgctactaggtaccgcaaaaagaaagtaataaaagaagtgcttcctgatgacacagacttctacgaggatccttcttccactcttcacttgacaaatgagggtttggaaattgcttcaccagttattctcgtggatggctacaatgtatgtggttactggggaaagcttaagaaggatttcatgaatgggagacaagaaattgctagacaaacactcattgatgagctggtatctttcagtgcagtaagaggtctccactaaaggattaaactagttataataataaaaatatctcagttgaggtttctcaaaagaaaaagggttgcaatcatgctgcctacttgagcaataacttaaagctgatacgaagttgaactgcttagtgtactatgatttgcagtaaatttaatcacagcttataaatgaatctgactaaccaagtgtgaaacataagtcaatcaggttttctttacctgattgcaatgccacttccccttcattttctcagcagtttttaatttccttgatagccatgtacaatcttatgccggcttttatatcatttgtcacaattatattgcagaggtaaaagttgtagtggtatttgatgctgccaattcagggctttccacacataaggaaacatataaaggggtcgatgttgtatattctgccgacttatctgctgattcttggattgagaaggaggttgaagctttggtggcagatggctgcccaaaagtgtgggtagtaacatccgatgcactggagcaacaattagctcatggagaaggtgctcttatctggagctctaaaagattggtcaaagagctaaaggaatcggagaaggaactcgatctagaactgaaggaaaccaggtcgacatcgttgcaaggaaaactcctgcagcacaagctgaacccaaaggttgtgcgcgcactgaaaggtcttaggaacaagcttgaagaacaagagcggggaaagaagtgaacaggaaccactggttgacaggaaagagagcaggtgtacagaagtggcgtttgtgcggccgacggacatcaactaacactggaggctggatccactgaaagtttgatgcgaacatcatgtaaatggatctggcttccttttgggtgcagtcagtttggtgtaggcaccatcagagccctgtgaaaaatagaagcactcacgcatggtagcagcttgttattgttgttagctgctgacgctttgaggcatgtcaacaagtagagatggattgcaaatcctaatcaatgtatattactttgtgtgtgttgttattgcgat

SEQ ID NO: 27582 - DNA, 833 bp, Zea Mays
ctggagttcaggaacaatggcatgatagaatcttatatatttttctatcttcatgaccaaggtttggcgtggcaacagagattcagactatggtacaggacaccaagaataggcttgagaaagaaaggcagagttttctgaaagcattgtcaaagacttcaaaagagtgcgaaagtttgttgaagaatgagtacaccaaatttctagcaacacatgacaagttctgcaaagataaagttgcacacatacagaatttcaaagacctgttctcaaagtttgaagatgataaagagaaattgcttgtgcagtatgaactgcaaaggaagaaggagaaggctactctatctgaacttgagaaaacattttcagagaagatagcaaatgctgaagaatctctgaagaagatgaagcaggatgataaatcaatccacatccttcgcaagtccattggctcatttctgagtggtgaccctgatgatcagtctggtcaagatgatgactgaagatgctctcaccaaatggtttctagtttgagatctatgtggataatatgttattggagaatagatatcagttcataggggaggcaaggattagggagttgatagtttgtgactgcacaactcagtgtgtttagctttcatcggctggagctgtgatgttctggagaatggtttcaggttattttcttgttggtggattttagtattttacggcaagatgcttagacgctttacaatttggtcaacatctgctctcttcatgccactgaccactgcaaaccaagttctcttctgtcaatatatattcagtaataaaacatataagtgcta

SEQ ID NO: 27583 - DNA, 1576 bp, Zea Mays
gcacatagaacaaaaaggtcatcagaacgaaagaatttatcattggcgatgacactgtgtactactatcatgacatgatagtggaaatgattaaatggggatatcaagaaggaaaaactctctttggatttggttatgatttccgtcaaagcaacaggctctcagagacacttgacagattttccaaaaagctggagtcagtgtacacagcttctggtggaaaaaagatcaatctcattactcattcaatggggggattacttgtgaagtgtttcatctctctgcacagtgatacatttgaaaaatatgtcaagagttggatcgcaattgctgcaccattccaaggtgcccctgggtacataactactagtctgctcaatggaatgtcttttgtcgaaggatgggaatcaagattctttatttccaaatggtgtatgcagcaattgctacttgagtgcccatcaatctatgagttgctggcaaaccctaacttccagtggaaagacatcccactgctacagatttggagagagaatttggataacagtggcaagaaaagtgccctgttagagtcgtatgagcctgaggaagcaataatgatgattaaagaggctctttccagtaatgagatcattgctgatggcatgcatattccggtgccccttaatttggatatattgaattgggcaaaggaaacttatgatcttttatgcagtacaaagcttccggaatcagtgaaattctacaacatttatgggattgattatgatactccacatactgtctgctatggcagtgaacagcatccggtttcaagtcttagtagcctcttatatgctcagggaaaatacgtctatgttgatggcgacggatctgttcccgcagaatcagcaaaggctgacggatttaatgcagtggcaagggttggggtggctgctgaccaccggggaatcgtgtgcagtcgccgcgtgttccggatcgttcagcactggctgcacgctggagaacctgacccgttctacgacccgctgagcgactatgtcatactcccaacactctacgaaatcgagaagcatcgtgagaaacacggggatgtcacgtccgtagcggaggactgggagatcatctccccgaatgacggcaagaccttgaggccaggcgagcttcctcctatggtcagcacactgaccacgagccgggaaggcaaggagggtgcactggaagaggcgcaggccactgtggtcgttcacccggagaagaaggggcggcagcatgtgcaagttagggctgtgggtgtcagccatggtggctaaagccgtaggagccaccactttggttgtctactctatctagcagtagcagctatacctgtaggtgcacgcactgtaaaattggatgtacatatatggctatgacctctgtagggactctggttttagaactataaatgggcaccctgcctgcttgtaaatgttcagaaccgaaaacacaggccctgttctttttttttccttttttaaaaaaataaaaagatggtaaaggattccattacttggaaggcacattacctatgtgg

SEQ ID NO: 27584 - DNA, 217 bp, Zea Mays
cgctaccgccctgcctgtcatctgaggaacaccatagccatgcatctctcggctgcatgctggaggtcgccgttaccgtgagcctagagagaggagagaaggccgagaggatagggtactgaaggtacacggtgtgacccactggtgtctccgtcgtcggtctgctcttacaacctcagaactaggcgcttgctgcggatatccagtcatggtcggc

SEQ ID NO: 27585 - DNA, 2118 bp, Zea Mays
cgaaagctgcccccgtgcaacatgagggtccgccccctataggtttatgaacgtattaaagcacccttgcttactctggtgggtgctggcagtcctgaacagtcatactctgtgctatgccatctacatcttctggtgatgcgtgctccaatgttattttcctcggactataaaagcttctactgccaatttagtgatccttcatatgtgaagaagttgaaacttgagatgttgactgctatagcaaatgaaagcaacacatatgagattgtcactgaactatgtgaatatgctggaaatgttgatgtaccaattgcaagagagtctatccgggcagttggaaaaatagcactgcagcagtatgatgttaatgccattgtggacaggcttctacaatttcttgaaatggataaggattatgtgactgctgaaactctagtcttggtgaaagatcttctcagaaaatatcctcaatggagtcatgattgtatagcagttgtgggaaatatcagcagcaaaaacattcaggagccaaaaggaaaagcagctctcatatggatgttgggagaatattcacaggacatgcatgatgctccatacatccttgaaagtcttgttgaaaactgggatgaagagcactctcctgaggttcgcttgcatctcctgacagcagtgatgaaatgtttctttaaaagacccccagagacacagaaggcactaggggatacattagcagctggtctatctgacacccatcaggatgttcatgacagagcacttttttactacaggcttttgcaatacagtcctaatgtagcagaacgtgtagtaaaccctcccaagcaagctgtctctgtatttgcagacacacagagcagtgaaatcaaagatcggatattcgatgagttcaacagtctatcagttgtatatcagaagccatcgtacatgtttacagataaggagcatcgcggaccatttgagtactcagaggatcttacaggcttgactgaggatccagaaaatgtaatttctgcccaaagatatcaagaaaatgataatgatcttttgctaagtacttcagataaagaggacaatggtacaagagccagcaatggttcttccacctctacatacaatgctccttccgatttgattagtccttcattgataagctcgcaagcaccagctgaaacttcactagtaaatactggtgggacatattcctcacaatcaaacttcagtctcgatgaccttcttggccttagcgttactgaagctcctgctttaccacaaccaacactggcccttaactcaaagcctgtgctagatcctggtacgttccagaggaaatggggccagctagcattggcactgtctcaggaatgttctttgagtccacaaggggcagtagctttgatgaatccccaatcactcatccgtcatatgcaaagcaatcacatccaatgtattgcttcaggcggtcagcctccgaactacaagttctttttctatgctcaaaaagatggggctgctgctttcttccttgttgaatgtattgtcaacacagcatcagcgaaggcacagctcaaaatcaaggctgatgatggaactgctgctgaggcattctcgagtttgtttcagtcagccttgtccaaatttgggctttcttgatcctgagtaatttgtctgagcgattcaccggtccacagttttttatgggtttcacagtttgccccaactccactgtcttggcttgtccagtacttgtgatcatattattggagaatcagagtagaaggtgcaaaagggtactggagttttgcggagctaaaaatcctatttgtactatttgggtgaactgtgcatttgtacatgactacatgtcacccagataaatagctgggttatttaggactgtactgtttgatgttctgggttatttaggattgtgatagtttgatgccttgatctcttctgaagggtttcgtttccttgaaggatgtagaaacaacacgcaacaacccctttcatgtatgctatttaccatttcttgcacagatgatcaataagatgtttcgtcttccattttgattcgtattatttagtactattttgaca

SEQ ID NO: 27586 - DNA, 1211 bp, Zea Mays
cacgctcggaggctcccctttcattttcacctcgctccggggccaagtcgccagttcaccaccttcacttcacttcgcaccggaccaccggccgtattcattcctcctccctccctcctcgccatacggctgcagcatcttcccctcaccctcctcattaccccgcgtctctccctcaaaactactcattgctctcaccgttccattgcccccgcggccccgccgtacgctcattcccggctagctcctcctccgcacggccatgatcttgagttcttggcattgatgacgttctagtaccgagcgagccagcccctctttaacccaccttaacaataaacacagcctgcccccaccggccacctcttcttcccccgtgcagctcgagctgattcggcgggctctgccccaacatccacccaccttcgtccaatcccgatccaagaccgtgccgtgatccggcagcagcttccgcgcggccatgggcacgggcgcggtggcggtggcggcgccggaccgggccaagcagcggcgggccggcggccacctgtggaagaaggcactgctccacttctccctctgcttcgtcatgggcttcttcacgggcttcgcgccttcctcctcctcctcctggaagtccgccgccgccaccccccagcaccacccgccgcaccgtcccggggaccgcctcgccgcctcccgcgtggccgtcgacgcgcgcgccaccctgtcgccgcccgcggaggccgccgatgcgctctccgccggcgccacggtggacttgggcgacgacgaggaggacgccgcccagcgccgcctcctgatcgtggtcaccaccacgcgctccggccccggggagcgccgccgccgccggggcgagctgctgcgcctcgcccacacgctgcgcctcgtgcgcccgcccgtcgtctgggtcgtcgtcgagcccgccgccgacgcgcccgccaccgctgaggtgctccgcggcaccggcgtcatgtacaggcacctcgccttcaagcccgaggacaacttcaccaccgccgacgccgaggctcacgtgcagcggaacgccgcgctcgcgcatgtcgagaagcaccgactcgccggcgtcctgcacttcgccgacgccgccggcgtctacgacgtcggcttcttcgaacagatccgccagatcgaggggaaaaaagggaggaggcactgtagattctcag

SEQ ID NO: 27587 - DNA, 956 bp, Zea Mays
ctttcactggactgcaaggctgcttgctgccactcctcgaacccgtcgcccctgtctgcgccgtgttcctcttcccaatggcctcctcctcctccgtcccaccggaaccctagcgccgcggcccaccactaccagctcgctcggctcgtgtccagatcccacgccgcgccacaccacatggcggcggacgcggcgcagcagggcccgggcgtccaccggaggcgcggcggggccgccccgcgcgcctggtgctgctccttcgccggcgtgcccgacagccccgacctccgcccgatcccctcctcggcagcgtcccctgcggcggcgtcgaggaagctgccgcccaagtccccgtcggcggcgtccttctacggctcgcccacctcgtccaggctcgcgggcctcggcggcctcatcgacccgcgccgcatcctctcgcccggccgcgtctcccccatcgaccccgacggcgccgtcccgctccctcctcctacgccgccgccgccgccgcccgctgagtttccggcagctgtgggcaccgcggagcagccggcgccggtgctggcgtcggcattgccctcggcagcggcggcgccgcaggtggtgtccgtgcgggaggaagcggacgcgcacgcggctggcgtgctggatctgaagctcttcctgcgggggagggacgggaggtgcgtcctcatggagctcgactccagggtgttgtgcggctgcagcgacttcttcgccgccatggccccgcacgaggacgctgctgccactgctgctggtgccggcgctgccgggaagacgatcgaggtggacggggtcgataatttggatgctttcagggctgcagtggaactcatgtacgaccctgatccaatgcggggtcttgcagctgccggtgtgtcaagggctatagatgtgcttgagttggacattgtaagctgggctgcaggatg

SEQ ID NO: 27588 - DNA, 458 bp, Zea Mays
aggaaattttgaaaagaaatggcaggagggaccatgtggcttgggcctttggattgggcttggagcgccttgcaatggtcctttttgacattccagatattcgactcttctggtcgaatgataaacggttcacgtcccagttctcagaaggcaagcttggtgtcaagttcaagccattttcaaagtttcctccttgttacaaggatatgagtttctggatcaatgatgcatttacagagaacaacttatgtgaggttgtcagaggaattgctggtgatcttgttgaggaggtatgataacagtgcatttgatgcacattggcttagcttagtcatttcaagtttttatgatccttcagctttcatgttgtcatttcgtataataactgaattcaaacaatagcataatcaatctatactatacttaaagcaccagtttcaacggtcgtcccgcgtcat

SEQ ID NO: 27589 - DNA, 1614 bp, Zea Mays
atcgcaactcacaggctcgactcttccagcctccgactccgcatccgcctccccggcggagcctctcgccaccgcacagcctagatccgcccagaggagctcaatctccccctcgaggccccaaaacgagatcctctgcattcctgcataggcgcctcatcgttcctggcctagcacagatgcagacggctgcttcgtttgggtatgcggcgggacggggacctcggaagcgagctacaacgacgtccccccccccccccccccccccccccccccccgcaccgatcgccgccgtggccctggctcgggtggccaccaggagatctgtcctccctccctcaaacgacgcctccatctcctcgcatttccttctccttttccccttttcaaacattcaggagccgaaggtgccagccaccctttgctcggcgcgtgtcccggcgtagctcacgacgcatcctcacctgcctgcaccgagccaaggagagtcgttggctatgcgcgttagctccgctgctgggtggtcaccatcgtccgagcacaacacagtgggtaccatcctctcactgaattacttataggaagcctcatcatgtagtttgtgcgctactagggcgagatccacctgttgtgatgatgctctatggcgcacatgtttcttttttatgggaacctcttcttagtaagtgggatggagagctttggtggagtttagcaggtggtcatctgatgattaggcgacgataaggaagtttttgatgagttgctaactgctaggtttgggagtttctctcatttcaggatgcagacagattgaggattctttgtttgtagaacgccatggatgagaggctgctcatgtttgatgtggttgatgacgtgtggacagtgctaacatgattgttcgagttggatgcacacgagagccttaggtggtttggacatgtcttcgagccaagagttgaaatcttgatgggattatgttggggcagatcttaactggaatacatatacggaacccggttggcagcagaggtagtgccccggtgcgccgcgcgcaggggcacgcgacagctacaaatattcggtggaggactggcttaggaaccttggatgcaaggtgattggaaggaaatttgttgaggtggagatggactagaccaaggctaatatcaaggggtacctgtgagggaacaggactacactggatttggctcccgtctcaagagtaaagtagcactacaactagcaatgtatggatgaattgaaggaagtaaaagaaggcagacaatcttatagaaactctgcatattgaaaccgccatgattggcaaagaagttggatgcatctttgcattggtgtgttcttatcaccaagcagtaatgtgaagcaagttcatttgttgactaagaacggatcaacacaaattagtgaagattttgttcacaagagatgcaggatggagaggtggtagatttcaatatggctttgatactattttttccacttacaatattttgtatggaacaagaaaaaacaatgtatgtggttactattgtaattcaagaatttatttctaaataataaatatatttgtttatattttgtttatga

SEQ ID NO: 27590 - DNA, 3522 bp, Zea Mays
aaaatttgatttttactccttgattatcactatcatcttgaagccagtcagcatttacacaaagaaggatctagtcacgatcgtggtttatatctgcggagctttgaagaactgtttgatctttcaaactcggatactacttctacagcacattttaacttttattttactgcctgtgagctctacaatgatcaggttagggatttgctatcagaatctagtagcactgtcccaaaagttcgaatgggggtccaagaatcctttgtggagcttgttcaagagaaggttgaaaatccactagagttttctgcggcactaaagatagcacttcaaaaccgatcagtaaattcgccaaaggccatggtttctcacctgatcattaccattcatatacactacagaaactatgtaacaggggagcatctatacagtaagctttctctagtggatttgccagcaagtgaatgcttgcttgaagaagatgccaacagggacaatgtaacagatttcttgcatgtctcaaagtcactttctgtgttgggtgatgcatttgcctctttaagcgcaaagaaggagcctgttctatatgggaattcaagaatcacacaaatcttagctgactctctaggaagtagctcaaagatcttgctgatcgtgcatgtaagtccaagtgcttcaaatttgtcaagaactttatccacactcagtttttctgcaagagcaagaaatgctgagctgagccttgggaatcgtgacacaataaagaaatggaaagacgtggcaaatgattcacgcaaacaattgcatgacaaagaaaaggaggttctagacctgcggcaagaagttattgggttaaaacattctctaaaagaggctaacgaccagtgcatacttctgttcaatgaagttcaaaaagcctggagagtttcatcttcactccaagctgatctcaagtctgaaaatttaatgcttgccgagaagcacaagactgagaaagagcagaataaccagctaagggatcagatttctcatcttttgaaagttgaacaagagcaaaacctaaagatgcaggaacgggatttaacaattcagtcactacagactaaactcaagtccattgagtctcagcttaatgaagccctcaatgctagcgatgctagatcaactattgggtctgaatctgcttcagtaatttcttccccaaagataacagaatcaactgctgactcatcttcagtgacgaaaaggcttgaggaggaattggcaaaaagggatgcccttattgagaaattacatgaagagaatgagaagctttttgacagacttacagagaagtcaggattaggaagtgctccacaggcttcaagcccttcagcaaacaagccagctaatggtcaaggaagggagataggcaggagtgacagcagcaaaagtcgatcaccagatgtgtttgcatcaccagtgtctcaggataaaactggaaacagtggagctattgtaaaatcaagcaatgagctagcaaaaactacacctgctggggagtaccttacgtctgcactaatggattttgatcctgaccagtttgagggatttgcagcaatagctgatggtgctaataagcttttgatgctggtcttggctgcagttatcaaagctggtgcagctagggagcatgagatacttgccgagatccgtgatgctgtgttttcattcattcgaaagatggaaccgaaaaaagttatggatactatgttagtttcaagagtcaagatattatacatcagatctttgcttgctaaatcacctgaactacagtccatcaaggtctctccagttgagcgtttcttggagaaatcaaatactggtcgaagtagaagttctagtaggggaagtagtcctggcagatctcctgttcaccaccatggtcatggttcccgaactgcgcttgttgatgaacatgtgcatggtttcaaggtgaacattaaacaggaaaagaaatcaaaattctcctcaattgttctgaagcttcgtggtatcgaggaggagacatggagacagcatgttactggagggaagctccgggaaattactgaggaagctaaggccttttcaattggaaacaaggctttagctgctctctttgttcacacgccagctggtgaattacagcgccaaattcgtgcatggcttgctgaaaactttgagtttctatctgtaactggtgcggatgctgctggaggagccgcaggacagcttgaactgctgtcaaccgctattatggatggctggatggctggtcttggtacagcgcagccccctaccactgatgctttaggccagcttttatcagaatacacaaagcgtgtttacacatctcaactacaacacttgaaggacatagctggcacattggcaacggaggaggctgatgatcctgcacatgtcagtaaactccgctctgctctggagtctgtggatcacaaaaggagaaagatcatgcaacaaatgcgaactgacactgccttgttaacaaaagaagaaggtggctcaccaattcgcaatcctcttactgctgcggaggatgcacgattagcatctctcatatctctagataacatcttgaagcaagtcaaggaagtaattagacaaagctctacaggacctatgagaaaatcaaagaggaaagctttgctagagttattggatgacctcttgacacagatgccctctcttcttgatatagatcatccatgtgctcagaagcagatcatggaggcacggaaagttgtcgagtcactgcaagaagaccctgatgatcctgccccacagtctaatgcattgggagagggcgaggtttcacagtggaatgtactgcagttcaacacgggaacgactgcgcctttcatcataaagtgcggagcaaattccagtggtgaactggtgattaaggctgatctgcgagtccaggagcctaaaggtggcgaggtgatccgtgttgttccaagaccaacagttcttgcggacttgagttttgaggaaataaaaggtgtgtttgagcaattgccagaggcagttagcttgcttgccttggcacgaacagcagatggtacaagggccaggtattcaagattgtacagaaccttagccagcaaagtgacggccttgaaagagactgttgcagagatggagagaggtggtgttttcaaagatgtacgataaatgctgtgttattgtagagttatttatgatattgatgttgtatatggatgccatttgtcggcatcccttgtaactgtatttgtttttactatgtggaaacctatgttgtaacactattctttggcaagagatgagccttgcctgccccaacccgtaatactatggttgtgcaaggcattaatgtaaattgtagctgcagctgataaatgtctgcagtgctgcaagtctgaactttccaggttatggaactattcaatgtttatttgtattaagcttttaagatgttaaaattgtgctagtttt

SEQ ID NO: 27591 - DNA, 208 bp, Zea Mays
gtgaaattacattcatgcccttcatgcttactattgacctaagaacaatctgtcggggacaagatagccttttcctccttaagtcggttcctttttctgctactgagctgaagctcacttgcgtagcttcggcgctggttcagcctttgttccgaccctgctcccatattgtgtacagcttcatcctgtgtccgaaggtgcctgtctg

SEQ ID NO: 27592 - DNA, 194 bp, Zea Mays
ctctctctcacaagccactaagtgtttggagtgaatttgggactcggggaggatttgatcttttgtattgtgtcttggagtgaatgctagagctcttgtattgaatgtgatcttcagaaaacttggatgcttgaagttgtggtggttgggggtatttatagcccccaaccaccaaggtagccgttggggaggct

SEQ ID NO: 27593 - DNA, 1862 bp, Zea Mays
catccacgcgccgctgccacgtcgttgccttgcccaccaactcaccggcgcatctcgccgggacggatgccgtatatatccgcgcgccgagcttgagggacgcccctaccaccgcccggccgaccccccttcctttccctcccctcccctcccctcaaaccgcccctcgttgtaaaaggaaggagacgaccgaggctggggaaaggggagaagatttttcagattctgcggcagcgacctacccagctccgcgcgagagagaccgagcggcagcagctctcttcccttcccttccctccgacatgacgccgcatctgcccgccgtctcctcctcctcgaccaccaccacatcccgcgccgccgcggccgcccaccacctgctcgacgccgccgccgcgcccccgtcctcgccgcaccagtaccggaggcggaggcggcgccgggtgctggggtgcctccgcccgcgcgccgcgtccgtccgctgctgcgccgcggcggcgcgggcggcggaggccaccacgcgtgtcttcgtcgtctccgacctgcacacggactacccggagaacatggagtgggtgcgccgcctgcccgcccaggtcggggcgggcgaggggcgaggcgtcgacgcgctcgtcgtcgcgggcgacgtggccgagaccagggataacttcgcgcgcaccatggaggtcctcagggagcgcttcgccgccgtcttctacgttccagggaaccacgacctctggctgcgccgcgagggcggcctctattgagctgggtgtggatacaggcccaagaacgataggtgacttgggaatcataccattgttctcatggtaccacaagagttttgacaaggagaaggatgttaacagtgtgcgtgtcccttcgctagaaatggcttgtaaagactttcatgcttgccaatggccttcagacctgacaaatgatgatgaggctcttgctctttactttgacaagttgaatgacaagaatcatgatgctattgaagaagtgaaaagtagcagcaaacatatattaacgttttcacactttgtaccaaggcaagagttgtgtccggagaaacgaatgctttattacccatatcttcctaaggtcattggctctgattttttggagaggaggctgagagatatacacagcaacagagaagacagagcagcttgccatgtttttgggcacactcatttctgttgggattctgtggttgatgagatcaggtacgtgcaggctcctctggcataccctcgagaaagaaaacgccggatgaacggtgaaggctggctgccattttgtgtataccgtgacggtttcaacccagaaatttatccagcactgtggtcagattactacaacaagaacaaaagggaacccgagaacactcagctcgcgccttgggttgccagccattacgcaaagtaccacaagttccactgaccctttctgagttgccttggctttttgccgaattgatgcagatcgtcccttcaggatggtgttgaattagctgggaaaaggagatattgacgttttacctgtacatgatcttttcttgtttctacccttaccataacttttgggcaagtaagcgccagcctctgttcgttgtatgttgcagaaatctgaataatgtgtataagattcttcaaagcattgctgcagagatagcgaaatatagctgattctgttcatctaacaagctccatctgtccatttgacttctctctagtggagtttataactgcaaagtcactgataattctgcttcaccctgatactattttaggttattttttattggtgtatctggaaatcatttgtctgaaatctgaagagaagggaaa

SEQ ID NO: 27594 - DNA, 461 bp, Zea Mays
agtgcagtattgaactagtttgcataatgtaagtgcaaaggttacttagaattgaaccaatatttattcttataagatatgtatggatgctttctttaaaattttggaccacgctcgcaccatgtgttttatttttgcaaatacttttataaattcttttcaaagtccttttgtaaatagtcaaaggtaaatgagtaagatttttagaagcattttcaagatttgaaattttctccccctgtttcaaatgcttttcctttgactaaacaaaactccccctcaataaattcctcctcttagtgttcaagagggttttaagataccaatttttgaaggtgctactttctccccctttggatataataagatatcaattgaagaagtcatcatttttaaaaccttttgaaaaagagtggtggtgcggtccttttgctttgggctaatactttctccccctttgg

SEQ ID NO: 27595 - DNA, 4179 bp, Zea Mays
aaagtcgctgcgttttctcccatcatcatctctctccctctcgtcttcctctctcctctcggcgcttcgggccttcggcgcctccccctcctcttcgctttcctccctcccccacacagagtgacagcgcgcaccaaaccaaatcccatcgcgagataacaaaaccaggccaacggattcttttggctgcggtggcgttgccggtgccggtggtgcagcagctgctgttggtgccctgtcgctgtgccgccgccgaggtcggctcgcgtgtccggcggcctaaaccctagccggcgctggagccgctgaggcgggcgccctgcagcacccctcgtctgtctcggccaggtgcgcgcccggccgcgccgctcgaatcgccggattcgagcttcggcgcgacgtggaacgggccggcgccgcggaggggatgctcccccgtcccttctagattcccgcggatctcgcgggcgtgcttgggggtggggtgaaacgatgcccaggtgagtacatgccgcgcgcgatcttctagtggttggtgcgagtggtggacgaccaagatgatgccgtcgggtccgccgaacccgatggggcacgggcagccagtgggcggcgctgccccgtcgctactccggacgagttcttccctgctcagtggcggtggtcagccgggtatgggcggaggtggtggtggcatgctttcttcacagtcgcccttctcttcccttgtctccccacgcacacagtttggtggcaacggtcttctgggaggtgcctctctgctgaaccggccgccattcgggaatggtggccctatgccaggtccagggtcaatgcaggctgttgggatgcagatgagtacactccagcagagagctgggctggatggtgccagcgatttcattagcgcggaagggtcggatcctctatcattcccgtcttcttcacaggtcaatttgggcaatcagatgggatcagataatctgcaggcgacttcgcagcagcagcagcagcagatggatgccatgcaggatatgcaacagcagctaccaatgtcttacaaccagcaacagttgccaccacaacactcgcagcagctccagcagccacaggctacagtcaagttagagaatggaggaagcatgattagcatcaaaccagagcagcagatggcacaacctgaccagatgatgcgaagtgctagtggtgtgaaacttgagccacagcagctgcaagcccagatgatgagaagtttaagttcagtcaagatggagcaacagacttctgattcatcagcattcctgcagcagcagcaacaacaacaacatttgttgcagctgacaaaacagattcgaaattgtccggagcttgtatcaataggtggaccaaatgcaattgcaaaccctcaagctgccacagctgctcaactgaccctcttgcagcagcaacggcttctgcatatgcaacagcagcagcaacaacagattctaaagaacttacctttgcagagaaaccagttgcagcaacagcagcagcatcaacagcagcagcagttacttcgtcaacagagtctaaacatgagaactccaggaaagtcgtctccttatgagccaggaacctgtgcaaagagattgactcattacatgtatcatcaacaaaacagaccacaagataacaacattgaatactggagaaactttgtcaatgagtattttgctccaaacgctaaaaagaggtggtgtgtctcgctttatggaagtggtcgtcaaactactggagttttccctcaggatgtatggcactgtgagatttgtaatcggaaacctggccggggttttgaaacaacagttgaggtactaccgcgattatgccaaattaaatatgccagtggtacacttgaagaacttttgtacatcgacatgccacgtgagtcccagaatacgtctgggcagattattttggattacacaaaagcaatccaagaaagtgtctttgagcaattgcgtgttgtacgagaggggcatctaaggatagtttttaatccagaccttaagattgcatcttgggagttttgtgctaggcgtcatgaagaacttgttccgcggagatctataataccgcaggttagtaatcttggcgcggctgtacaaaagtaccaggccgccacacaaaattcgacgagtttgtcagctcaggacatgcagaataattgcaactcgtttgttgcatgtgcccgtcaattggccaaggcactggaggttcctttagtaaatgatttaggatacacaaaacgatatgttcgctgccttcagattgccgaggtcgtaaactgtatgaaggatttgattgatcacagcaggcagactggatctggacccattgatagcctgcataacttgccacggaggacaccttcaggggccagcactcttcaaccacagcagcagcaaactgaggagaagcaggccattccccagagttcaaaccagagtgttgtgcaccttctacatctgcgccttcaccatcagttgttgggctcttgcaaaattcaatgaattctagacaagaccatgcaatgagcagcaacaacggtggtccatatagtggaggcaatgtggctattccgaaggtgaactctacaagctcgctgcactcaaacccacctacatctttcccttccccagcaccgacaacgtccaataatagcatgatgcccgctcctcaaaatacaaatcaactaagctccccaacgacatcaccaagcatacctccgatgcagccacctgctgctcggcctcaggaggccgagccaagtgactcgcaaagctcggttcagaagatcttgcaagacctgatgtcgtcgcagatgaatggtgttggccactcggggaatgacacgaagacaccgaacggactaacccatggtgctaatggggttaactgcttactcggcaatgctgccgcgaataactcggggataggaggaatgggatttggcgccatgagcgggttcggtcatgggatgaggacggcaatggcgaacaatccgatggcgatgggtgcaaggatgggaatgaaccacggtgcacacgacctatcgcagctgggtcagctacagcaccagcagcaacatcagcagcagcatgacataggaagccagctgctgggcggatttagatcagggaacagcttcaataacatgcagtatgactggaaaccctcacaatagagcgagcgaccagaaaccataagagtgcagtgtgacggtgcatctgcccttgctggcaacgcgtgtggagcatttatggtgccatagtctcccctttgggcttccgcattaatgctgccgtgaaagggtaccataagcgatagcgtgcgtcccggctggtacatgcaaagtctgtaactgtcagtttgccaatctcttcttgatctactcccctgagttttacaacattttgccgattctttactgggagttgcaattccaccatgtgccacatcctttgtccactcttcacccatttaatgctgtgaaaaaaaggttcaagtagttgtagcatggtataacaggtgtgtgtgtgggaattccatattagctcttagggcatgtacagtggtgtttaatgtggaggctcttaagctgtttaaggggtgtatttgcaaaaaaatcttagagccgtctctccgtgaagagacgcctctggctcgtaaaccaagtagtaatagacgtctcacttcctactgtacgaatttgtcgtctgttctatcaatctgctgttgtacaaatacatttaattctgtatttattagtagactacatttatagacactccattgtataatagagtctcttagttgtctcttgtgcttggagaactgttttggtgtctctccactgtacatgcccttagatttagtgtttccttcgtcattgacatgctgtggaacggagagccagaattacaggactggctgccagctgggtgcccgtcacttgttgcttgcttcagttatctttgggaaaagatactctgaaagaattaggagttgtccctcgcctttttttttcccttgctggataacttgtaccttatcctctgtaatttaccatggctctcaggaacatatgtgccatttggtggttcacatattggtaacataaggggtaatcgataacgt

SEQ ID NO: 27596 - DNA, 3364 bp, Zea Mays
gccaccttgaggaaagggggcggggaagttgctgaatctcacgtcctcaccgtgccggacaccggtgtctgcttggaccaaatccgatctcgtggccacggccagaacacacctcctcacgtccacctgacctcttgctcctccccaataatgcccagtgcggcagtgcctgccaccgtctaagcccaccccaagtctccgccgtcaacccgtcctcccccatggccgccgccgccgccatctctctatccttccactttcgtttccgcccgccctttccatctccacgtacccccacgcgccacgctcccttttccttgttctccccttcccttcttgccccctgccgcctccgcgtcgctcccggccgcccctcaccgtccccgtggcgccccgacgtgcgggcgcgcgctggaagcaccatcggggcgccgcctgcgcttgtgcgcccaggcggagccgtggagacggaccgcctcccctccgacgtgcgggaccgggccatggaggcggtcgaccacttcggcggtcgcgtcaccataggagacgtcgcttctcgcgctgggctgcagctcgcgcaggcggagcgcgcgctccaagcactcgccgccgacactgaaggcttcctggaggtatcggaggacggggaggtgctatacgtcttcccaaaggactacagggcaaagctggctggcaaatcgtttaggatgcgggtcgagcctctggttgacaaagccaagcaagtgggtgcttatctggtacgtgtttcatttggcactgcgctcattgcctcaattgtgctggtgtacactacaatcattgccattctctcaagctcaagtagtgatgaagatggtcgtgggaggcggaggagatcttatggttctactatcatcattccgacggatatgttttggtacttggatgcagattattatagaagacgtcgagtagaaaacgaaaatgggatgaactttattgaatctgtattttcatttgtgtttggggatggtgatccaaacgatgggcttgaagaaaagcggtggaagatgattggacagtatatttcatcaaatggtggagttgttacagctgaagaactggcaccatttcttgatgtgccacctccatcagaagagtccaaggacgatgaatcatttgttcttccagttcttttacgctttcagggacatccagaaattgatgagcaggtgcaatcttcttttctctagcagttcagacttgtactgagaactaccgttgtcaaatatgacctacattttcaacccacccagctaacactggcagagcggggcgggatgggggataactgttttctttccctacattaggtaccagtgtaccaccaaaaaataggaataaacaaacaaccccaatcatgtcaggttctctactaaaaaatagtaacatgctatatcattggattgctgacttgcatgcctaagtatgtaatcttcagatctattggaagtttccaacaaagaaaaatgataaaggaacatgcaatgtgtgagtagatgcaagaaaaaggtgctgggaaatgccatgtcctggatgatgaagggaggagtgggttgtttcagatgctagggaggcgtcagccaaagcaaaaacacccttacattacatgcactagtttcttcacttgaagttgaggaggaagaagggaatacaggcatacgggtgctaccatcacacagcagttacacatcgagttaactgttgtccaccttggctgacagatagctctgtctgtgccagctacatactaagggtgtgtttggccgcgctccggctctggctctgcggcagctctggcagcagagtcgcaccaaacggcgacggagggaaatatcctgtatcgattcccatcgctgcaacgtactgcttcatcaaaaagtggtaggagcagggaatatgtgggtaccaaatggtctgcaatgtttagcggagttgaaaagtacttagaggagaaaccgtggaaattcaggtcagtatatatcatcaccatccttagtgaagttgaactaatccaggatgcaatttgtcctttgcgggggaaggtttgccttggtttttccccttccttgacccaattcatatgggagcctccggcactgggtctaccctatgccctttatacacctacctgttgattttgcagtaaagcgaatgcaacagagaaggcgatggttgctggtttgggaggactcaatctctttggtgtcatcattcttggaaacttgttgaagcaaatgacagtgacacctggtggactaatctcatttgccgcacagttatatcctttgcttcaggtatggctgggcttgatatgcctgtttagtactctataatgtggtcattactctagtcattccatttatacatatttggcctgacagaaatcacgagcccttctctttgttaaggggatttccagatgttttgaatgttgcaaaatcgatgattgctgaattacctgtgaattaataagattgtcaatgatatgtactgatacaatgtggtcatttctagatatacgctggctccttttttgcaatacctttgtttagatggtttctgctacgcaagaccaacaatggcattaaaaagaggaataaggccagagaacagagagctcaggagctcgtgtcaccagattcttctctaagaagaaagttgctcagtgcacgtgatatggctgaacggaaagtaatcacgccagaggagattgtctatactactgaaaaggatctattggagcaggattatgaagtcaaggagtgggagaggagatttaaggagctcgagtcagagtgatggacatgaccgatatacttgacacttgcagtagctctacatggtcctcaccatacttgtcggtgatttttatccgcatccaacggagtggaagatggatctgactgaaccactcgagcaagcgaaactggatggtactggacctcactaattgtcgtgtcaccaccagcccaccactgaccacttcgctatggaagttttgtggaagctgttggtttaattggaaccgaccattatttgcaagatgatgttcgtatctgtgccattgacctgcatatatgtatagttccaatcacggatcaaattcagaatttgacacgaaaaagaaaaaaaacagggaatatggctaggatgctactcggtttgaatggagtccaatcaaaacatgtaaaaagaacagtgctaggaatagacgtactgttataaaaacttccaggtggaccaattcacgatgggaacctaacattttcttgcattaagctgaaacgtgtatctcctgcctgcgtttgtcattgcgaacgag

SEQ ID NO: 27597 - DNA, 2765 bp, Zea Mays
aaactatcaaacgtggaacaaatttgccggcgctttattgatgaaagaagaagcaagcttagcaggttgattgctgataaactggggtggtccagtttcagtggattctggttagcaatggatccaagtgtgcgtcgacacatgacaagggaaaagactgaaactatactgaaagttctagtgaaacaattctttatagagaaagaagttacatcaaccttggtaattgactcactgtatagtggacttaaggcacttgaataccagagcaagaacaaaaagggcatacctaaactaacagagacagatgctcggagcactccaatggtacttattgatcaggatatgtttgttttggctgatgatgtgatacttctgcttgaaagagctgcattggacacactgccacaccaaccattgcccacgaaggatgataaaagttcacaaaaccgcacgaaggatggcaactcaggtgaggagtttagcaaagattctattgagcgtgatgatagacggcttatagagctaggctggaagacattggagctttttgccttgactcatatatttagccgaatagaagtggcacatcaagaggctgtggctttgaagcgccaagaggaactcattcgtgaagaggaagcagctgggctagctgaaattgaacttaaggcaaagcgtagtgctgctgaaaaggaaaaacgtgccaagaaaaaacaggcaaaacagaagaaaaatagtcgaagaagtaataaagggaagagtggcaagtctgacatcaataaggaaatacttatgtacagcagtccttcagcagagacgataattcagatgcgcttcatgttgatattgaagaccgtgaaagtagccctgttaattgggagacagatgcttcagaaactcaagctactgtgcctggaagtagtgaggtgcaaaatgaccatgcagggaagaggacctctactgtagatgatagctcatcgacttgttcatcagactcagtcccttcagttatcgtgaatggatcatatacaggaggtgcctggacaagcgtcagatccttatccaataggggaaacaaccggaggaataaggatactgaagcacgggcagcacttgcacaaggtggatcaagttcagcgcataatggttttataggatctggcggcagtgcctctggccactcaaaggaaagatacgaacctgaggatgataaagttgtcatgcagaggaagcaacatgcacggcacattgatgtcattagcccctctaagtcaagaatggcagtgtcttcattttcttctgtgagccctgttaagaagcaacctaacttgtctcatcagccaaaatttttgctagaaagcaccaatagttcaaatcaccgtgcaagcgaagtttcaggcgccgtgactgccactacaacagcaggttcttgtaccatcaaaatctgaagcgcagaaacaggcttccctaactggcagcgcaagcactcaggtcgtttcggtatcaaggcccttgagtgccccgcaagtccctgcagcaaaacaaagtgtgccagccacaacagctcagaacgcacctcttctttctcgctcagtgagtgctgttgggcggttaggaaatgagccctccgccaatgctcctagcttcattccccggtcacgaacctatcgcaatgccatgatggagaaaagttctggtggcgtaagcagtctcacacatcagcaaggttcatctgagcaggccgtcgcaccatcccaatcgatgtttacatcgcagccttccattctgtcatcggagaccttgtctatgaaagaggaaacgtcgttgagacctgggtttacatttggaaccgtaaagcccgagtcactgaacccttaccagggcagagaagagaactcactgcaagcgagcagcagcagcagcagtgactgtacgccatcgagttcgaacatcagaagtgagatcgcgaagctcagtttgaacggaagatcacggagcaagcaactcctgtctgaaatctctaccagatttactccctaccagccacaaggcttggtagctgacgagttcccacacctggacatcatcaacgacctgctggatgaggagcagagtgacaggagaagggttcttcagcctggtttcgtccagcaattctctgtgcataacggcgtcagcgcgcctgattatggcttgttcagtgagccgtacctgttcgaccggtccgagcagtactttgacgaggagcctccaaggttctacagtccattgagcagcgctcctcggaggatgagggaccggagctactcgcacttcgatctcccttcatactccaggagcagccagcttgatggtctattgatgagccagtggccgccatacagccgcgccgacctcgccatgcctggttttgggtcagacacaggtggctactcctatcagccgcagggtttcccgagtccagcgagtgcagcaagcagatacccgtcgtatcgccctgccaatgggcattgagagttttagcgattgcaattggtaataatgtgtggtggagtccatgctgctcgcttctgagctgagtgtaattgtaatagtccccccatagcagtgatataaagaatggttcctctgttttattcaatccatagttatatcatttgcctctctttttctatagttcagttttgctcagtggcaataaatctcggctaaaatgatctggacaatctaggctcagttttccctagttttgctgagtggcc

SEQ ID NO: 27598 - DNA, 500 bp, Zea Mays
ccaacgtcgtcttgggccaacagaatgccggcccagttagcctggcaagtggcaaccctagctctcgctgccggcgtgtccctgactccctgtccagcggccaagcggcggctgcggctctctcccagtcttcatgtccgactgtccctgttcagcagagtggcggctgtggctctctccttcgctctaatctctactccactctccacttctctagtgcaaggagcaggcagccagcagtctagcaccagcaaggcacggccggcttgccgccaggcgccagcggcaaggccgcaaggcaaccagccaaccaggcagcaagcacatcacggctggcttgcatgaggattgcttccatgtgctgctgctgtcttggactcactagcaaaagttgtgtttagtgtgttctcttgctctattattctctattacgtgttatatgtgagagcgactattgtttcactgttgaatattaaatattctaatctactactgctgaa

SEQ ID NO: 27599 - DNA, 1358 bp, Zea Mays
cgccgctcccacccgagatggttagcgcccctcctccttccggtcccttcccctgcctcggccggccagccatggattcaccaagcgggctctggtggcggccggcgccgtcgtcgtgtcctccattcccgtcaaccccctcgatgtcgccaaggagcaggacgatgcagtggggcagcatctctaatcatttaagcttcaaattaaccagtccattatattatgcaactctgtgaatagaattgagctactggctaagaaaataactgaactcggttattcatgcttcacattcatgctaagagcctaagatgttgcaagacaacagaaactgagtgtttcatgagtttcataatggtgcttgcagaaaccttttgtgcacagatatgtttaccagacgaattgatatctaggctatttatgtggttactaattttgactcctctaagacatatttacacagggttggtcgttatgggagatatgggcaccttggtttggcagtgaacttgaccacttacaaagattgtttcaacttatatagtattgataaaaaaaacttggaacggaaattaagacaatacccccacaaattgacctgtttgtatactgccaatgatgatagcgacagcttcatgagcgtcaggcacattttatttattttgacctgtttgtatactaacttaacacaagcttttttgtcaataacgtgggattcggaattttctgagctttgtgtagtggaggaggaggagaggcccatgtcggtggagctggaacccatcgccagcgagcagcagcttaactaggtccttggagaggcgtagcagctccagctcctcatcgtcctgctctgcttttctctgcggtaaattgctggcttaaatgcatgctgcttgaaccctataatcagatagaccatcccgaatgcaagtcaaggcctgatagtggtctttctgcaattacagagctggaccctggttatataacagcaggatcagtaagagttaatggcccagtgacggattcaaggtatcctgctcaccaacagatcccacaagcatacggttaccgccaaatgcctgcaaggttggacagtaccaacccatcacaggccatgggaggttacacgctgcagtcacagaaggaaacattatttgaagagttgccattttgaagagttactcgaatccaatattttgctcttttgaattccttggtgtacactggcaaatattagcatatttgaagagttgccatttcgatcatcatcttcatttgtactttttgggtcagatctaataaagcatcagcattaaatttacaatgatcacctaaatccatggtttttattgcct

SEQ ID NO: 27600 - DNA, 3190 bp, Zea Mays
gtttaattgaatgttatagtagcaaaaactccgaacagctaatgccaccgctttccttatcttgggcgttggacggacggggcgagcgagcgactcgagcgtaccgccgccgccatggtggcgctcgcctcactctcatctctctgtccctgcggcatcgcccgccgccgcgctgcgtcagccacttcatccaccgccttttccatctcgtgctgcgccgtcgcgaccccgtccttctcagggaaaggaccccaggaatctagaacaccccgaagaaggctgaggaaaactgagggtgctaccaagagcctggaagattcggtcaagcgaaagatggagcagttctatgaaggggccgatggtccacctctgcgagtgctccctattggcggtcttggggaaatcggcatgaattgcatgcttgtggggaattatgatcgatatatcttgattgatgctggggttatgttcccagattatgatgagtttggtgtgcaaaagattataccagacaccacgttcatcaagaaatggagccacaaaattgaagctgttatcatcacgcatggccatgaagatcacatcggtgcgttgccttgggtcattccagcactcgattcaacaacaccgatttttgcatcatctttcaccatggagctaataaagaagcgtttgaaggagtttgggatcttcctctcatccaggcttaaggttttaagaattaaaaagagatttcaggctggaccttttgaagttgaacccatccgtgtaactcattcaattcctgactgttgtggcttagtgcttcgctgtggtgatgggataattttccatactggtgactggaaaattgatgaatcaccagtggatggaaaaaaatttgaccgacaagcattggaggagctctccaaagaaggtgttactcttatgatgagtgactcaacaaatgttctttcccctggaagatcaatcagcgaatctgttgttgctggttcattgctgcgacatatttcggaagcaaaaggaagagtaattacgacacaatttgcttcaaacatacatcgaattgggagcatcaaagctgctgcagatttaactggtcgaaaaatggtgtttgttggaatgtcactcaggacataccttgaagctgctttcaaggatggaaaggcaccactggatccatcaaccttggtcaaggtagaggacatggatgcatatgcgcctaaagatcttctggtggtcactacaggttcacaaggagagccacgtgcagctctgaatcttgcttcttatgggggaagtcatgctcttaaactatcgaaagaggatgtccttctttattcagctaaggtcattcctggaaatgagacacgggtaatgaagatgatgaatcgtctcactgatcttggccccaaaattatcatgggtaaagattctggcctccatacctctggacatgcctaccgagaggagctggaggaagttcttcggattgttaaaccacaacatttcttgcctgttcatggagaactcctatttctcaaagaacatgaattacttggaagatcaactggcataaggcacacaactgtaataaaaaatggagagatgcttggtgtgtcacatctaagaaacagaagagttttgtccaatgggtttgtttcattagggaaggaggatcttcagctcatgtatagtgatggtgataaggcttttggtacatccactgatctctgcgttgatgagagactaagaattgcatctgatggcattatttttgtaagtatggagatcttccgacctcagaaggaacatgggttagcgcagtcaggtttgaaaggaaaatttaagattaccacaagatgtctatggcttgataatggaagattattggacgcgctctacaaagcagctcatgctgcattgtcaagctgtcctgtgaattgtccacatagtcacatggagaggatggtagctgaaatcttgaggaaaatggtacggaagtatagtggaaagaggcctgacgtcattgctgttgctacagagaacaccacagcaggtttctcagaacacctcgacactaaagcatctggaaattttggaccgtcctcagctactagccacctgagcaggagtccagctacgagtcttgaaggcagttataaaacacacccagacaacccagaggtggatgctgaagaaatccttcccgagactgtgagaacaacacccgacgatgcaaccacaagctccaatggcgaagcattattctcttcagatttacatcagcctaaaacattggagcacttttgggagtcattcaaatcccctacagctgtcaaaattgcacggatcgtcaatgggggggacaaacaaaatttcggcaagattggcataatgggtcaggactcattaatccagtcagctcctgctccagttaaatcctcaaaacggaacaagtggaaacctgaggaaattaagagcttaatacagatgcgtggcgaaatgaatgagaaatttcagagcgtgaaaggaagaatggtactgtggaaggagatttctgataccatgttgaaccaaggagtaagtcgtactccggcacagtgcaaatctctatggacatcgctagttcagaaatatgaggaaagcaaggatacggaaagcatgaagacttggccgtatttctcggccatggataagattctatcgcagcaaggggagatggcaaccaaaggatagaaaaaggcttgtagcttagtggtagaaatttagaatattgattggtatgttgcagcagagcccagtcagtctagtaatataaagatgaaatgtctgtctacagtgcctggtgatctattgggatcggattcttttgttttgtgtaagacatgcagtagcacaagatcgagatgcatcgactggcttgaaattaagcttcagggcccgtggactcagagcggggtagccaggagcgctctattcttagcaacaggcagacatgtgtggttttatctgccagataacgtttgtaactcctataatgtaataggctacacggtaggcgaacggcgaacccctaaaagacaactgatgtatcatatgttttgaggagttatgtaatcgcctgcacggcatatacgtgtacttttcttcaaagcgactgtgtacatcaatggtggatacatggtcg

SEQ ID NO: 27601 - DNA, 860 bp, Zea Mays
cgccataagcccataacggcataaccctagtccctaccccatataaaacgcggcagcgatgaggctttccttccaattccacccatcgccgccgaaatcccgttgcgtctctcgcgcgttaccaagctctcaagttttctcgcgccgacggcaatggatgaggtcaccgaggccgtgaacaacctcaacatctcgggcgtaggggccgcgggcgttgccggggcggaagggcacaagaagaatcgcatccagaggtacatgcagctgcacaacgaagtagagctgtcggccctcggcatggccattgcgacggtggtgacagtagcagaaattctgaaaaataacgggcttgctgtcgcgaagagtatcatgacatctactgttgatatcaaggacgagactaggacccggcctatccagaaggccaagattgaaatattgcttggcaagacggagaagtttgatgagctgatggcagcggctgccgaggagagggaggctaatggggccgaggaacaaagctgagtacctgcaaggaaggaccttgttgtagcttatttactgttttctgctgctagatttgtcttcttcatagtttgtcgagtgggctagagacgattacttgtataatcaattaaaggcgcggcttatttagtgtgcttttacttgattcatttatgttggaatgatacaagttgtgttcaatatggtatactctagattcatcactatcttcaatttagaagatagtgcgttgcttctgatgttcgtggatattctgtttggtggcgttgcaatcaacgtctcctatatactacaggtgcctgaaatagggataaatttcaagcgccacttccaca

SEQ ID NO: 27602 - DNA, 2409 bp, Zea Mays
ctcgcacagagacactactagcttgctttctcctatctccactgccgcctagccctacagtcaaccgccgccaagcccggaaccggctgccgccacctgctagcactcgccacacgcgcggcgctggcgtgccctcgccgccgacagtgtcccgcccccgccgtcggccgacccctcgcggcctcgccctcgacgatcggccctcgccggctcgacgcgtgacgccggcgccgccacccaccgtccgacggcctagccggagtcggacgcccccgggctcgcgcctcgccttccaacagtccaagcgccgcattcgcgcgtggccaaccccaaagtctgaagttcgatccacatccaccgatccgcagaggcgcagactacaggtctctcctacagctatgagcctggaccggcttttgaggaggtcaaagaagaagccatgcttgatatatcaccaacagactcgacagagttttggttaattcagtggcctaaagaccagatagatgttttggattttcatggcaaagagctttctctcaagctgcatagtgatggaaacttgggcaacttggaaaattcctcagggaaatcttatgagattgcgagctttgcagctcagaaaccagatgcaaccgtcttcctgccttcagggtcagaaacaaaggctggtatggtgaaatatcaactaattcttttaattgcgtgatattttgcacagttgtgtttgcctctttcattcgataggaatgttattaaaatggtgctgcatatattcatatttggtttctgggttagttttacaggctatatgggcactgcatttgatggcttgctctcagtataaagccttgataccacttcgcttgccatttgctgaaacgttaattaccgttcatgtataatgctaatataatgaccttctgctacagtgaaaaaggttttcacattatagtatgtaaaatctattgagtttttaatatatcattttgtctgctatgtcaccatgttagtgcactagtgctactttttagtttgtgtggttttgatctttaagtaatacactgaaataggaagaggagaagcagggcaattgattcccatctttgaatgattatctcaaagtgtcgaacctggagataaggcaatttcagttctctgtttattgaaggatagcaactgagatactgtaatatcttgggatacgttgttgaacatgacagtgggaagtgtagaagttggatcatatgcctgccaactgatgaagtaccttcttcactgaagcctttattgttgtaattgtgatgatcggtgatattccacatggcatagtttgacccgatcatgaaaacaacttccatggcagctatcagtggtggatatatgttatcctgtggggccacctggccccacatgtttttgccaaaaatatgtttatccctcttcatagaatttgcaactatatatatctcaattgtgtagtgcttgtgttaattgacttaaaaatcaactaacttggccccgctgttatttaatccttaatctgccactgctatcatttgatcatgtaaaacaggaaattaatctaaatcaatattcccttacttaaaggttggtgtgtgaaacctgtagtaaatatgtttatttattatgtttaagatttttaaagaagctcatcgagaaaacagggctacgaagtaaacatactctgttagatatcataatagttttggtaatactataggaattcaccttcttgtgttagaagaactattttggcttttctcacctgttattcatcatgttgtatgctcttttatatgcaaatatttttcccactgatgaacaaatgaaatgcagtggggaagatttcacggcgagtatccttagttcgttatcctaaacctgaggaatttacaaaaccaagttttgggagtcttactcctagcataaagaaatctgcaggttctaagaagaccatgtctcggttcaccggtgtatcaaagaatcccagtagccaaggttcggcgctttcactgggccaaaggagcgcagagccaacacccaaacacaaggggaagagaaaggatgaaagcagcctggggcactcaaatgtgtcgggcaaggccacagaaggatctgaggctcgaggcgcggggagcaacacggcttcagagatgccacagtcgccaccggaaaaatcaaagaagaggaggaagaaggataagatcgttgagtagtagtgtcaccttggcagaattttttgctggagtgcccggtgttgtttgacctgggagcaacctgttgcgtggtgctgaaataccgctatgtatcgttctgtttttggtatgtgaaaggttatctttgttgcgctgttcctgttggtgtgctaagctgagctgatatagg

SEQ ID NO: 27603 - DNA, 3524 bp, Zea Mays
caccgtccgtctctccctccctcccccgtccgccttcgcctcgcctcaccgcgccgctcccaaaattccccgccccacggcttccccccgcaaaacccaccccacgaaacccaaaaaatcccgcgcggacacccgaatccccccgccttcccgctcccctcgcgctgcgccgatccgttcccccatggatccgcagtcggacgcgggcgcggcggtggtgctgggcgccgacccggcggcgctgacggcgctgctggcggacctcacctccccggccaacgaggcgcggtcgcgggcagagcagcagttccacgccttccgcaggtcccatccggacgcgctcgcgctgagcctcgcgcacctgctgctctccccggcgcacccctccgcgcccatcgccgccgtgctgctgcgtcgcctcatcgcgccgtcatcccagtccttcgtctaccctgcgctgtcgcccgccacgcagtcctcgctccgcgcgctgctgctctcggccgcttccgcgcctgcgctccccagattgccgaggccccaggactagaggatggcacccgccaccttgccgttgagtttgtcgtcacccttgccgaggcacgggagcgtgcacccggaatgatgcggaagctgcctcggtacgttggtcggctatttgcggtgctcatgagtatgctgctcgatgtccaggatgaaccggcatggcatgccgcagtgtcagaggaggaagacgccggagagacgggaagctatgtttttgcacaggagtgtctggaccggctgtcaattgctgttggtggtaatacgattctgtccgtggcagctgagttgctcccatcgtttttctcctctgaagattggaagagacgccacgcggcactagtgaccatagctcagattgcagagggctctgctaagatgatgattaagaatctggagcaggttgttgggatggtgctgaattctttccaggaccctcacccacgggtgaggtgggcagcaattaatgcaatagggcagctttcaacggacctggggccagagttgcaaaatcagttgcaccatgttgtgctaccttcattagcttcagcaatggatgatgtccagaacccacgtgtacaggcacatgctgcatcagctattctgaacttcagtgaaaactgcagacctgatattttgacaccatacttggatgtaatagttgggaaacttctattgttactccagactgggaaccaaatggtgcaagaagctgctttaactgctttagcatcagcagcagattcttctcaggaacacttccaaaaatattatgatgcagtaatgccatacctcaaggctattctcatgaatgcaactgataaatccaacagaatgttgcgtgccaaatccatggaatgcatcagtttagttggtatggcagttgggaaacaaaagtttaaggatgatgctaagcaggtgatggaggtccttatgacactgcaaggatctcagatggaggctgatgaccctataacaagctacatgctgcaagcatgggcaagactgtgtaaatgccttggtcaggatttcttaccatacatgagtgttgttatgccccctctgctccagtctgctcagctcaaaccagatgtgagtgtcacttctgctggaccagaagatgaaaatggtgaatctgatgacgagggtgtcgagactattacactaggtgataagaggatcggcatccgaactagtctactagaggagaaagctacagcatgtaacatgctgtgttgctacgctgatgagctcaaggaaggatttttcccatggattgatcaggtcacgactacgcttgtacctctcattaagttctattttcatgaggaagttaggaaggcagctatttcagcaatgcctgagcttctacgttcagcaaaattggctatagaaaagggccaagctcaaggtcgtgataaatcctatcttaagcaactgtctgattacatagttccagcccttgttgaggccatgcataaagaacctgagccacaaatttgtgcaagcatactggaatcattgaatgaatctatacagctatcaggaacacttcttgatcaaaatcaagtaagatctgcagtggaaggtgtcaaagaagttatagttgcaagcactaacaggaggatagaacgaacagaaagggcaagggctgaggactttgattctgaagaagaggagctactcagagaagaaaacgaacaggaagatgaaatctttgaccaaattggtgattgtctaggcactctcgttaaaaccttcaagacttcttttattccgttcttcgatgaactctccatgtatttgacacctatgttgggtaagaataaatcaccagaagaaagaaggattgccatatgcatttttgatgatgttgctgagcattgccgtgaagcagcagttaggtattatgatacataccttccttctctattagaagcctgcatgagtgaaaatccagatgtcaggcaggctgcagtgtatggaattggcatttgtgccgaatgtggtggttctgcatttaggcctcacactggggaggccctatccagattatacaatgtaatcaaacatcctaatgccctggatttggataatgcaatggcctatgacaatgctgtttctgctcttggaaaaatatgccgatttcatcgtgatatcattgatgtatctcaggtaattcctgcctggttaagttgccttccgataaaaaatgatttaattgaggccaagcttgtccatgaacagctgtgtgtgatgcttgagcagtctgagagggagcttttgggtcataataatcagtatcttccaaagattgtgtctgtttttgcagagatattatgtgcgggcaaagatctagcaacagaacagactgccagcaggatggttaatctactaaggcaacttcaggcaacattgcctccttcagtattagcctcgacatggtcttctctacaaccacagcaacagctcgctctacagtccgtgttgtcgtcatagctaacctaaaatagcctcaactgtgtaaagcatatgagtcttcacagcttgacctttcgtgttctatttatgcgcttttgagccagagccagggttcctggggtttgctttcgcgttcatgtgcccttaggttttgtacaaggggcactgcttgcatccggtgtgtaatatcggctgcagttgcagaactgcacggatgtgtacgagactgggctctctccacatcgtcgattaagttgtaaagcagtatatcttgctcgcttagtaattttagttgggttgaaagaattgtaaattaaaacaattttggtagttgattttaatgtcgtatttcttataccatcagcatgggaaattttgtgttcaaaaaaagaagagaaaaagcagcttggttatcttgtgtcgtgtgccttttctcgatgtgtacttattcttcgtatgtatggggatagtaacgcatttgcctagtgatatttaacttt

SEQ ID NO: 27604 - DNA, 1687 bp, Zea Mays
ggagatttctttcttatataaccatcatcggggaagcttctattccgagatcccttgccctgtcccttgtcccattccgtgcttccaaagttccatttctccccctcctccggcctagtcggcgcctcgctgacatgtgggccccacccgcggcgtcgccgacaggggcattcccctcgctccggccgtcgaggacggcggtggtccgcgtcctagtcacgctgcctgccgctgcgcggccgcaggatcagccgcggcggcggctctgtctcgcggtaccacggcccgctccggagatggcctctgcggctgctgaaggggagggggaggaggaggacgtggtggtggtggaaggggacacggggaagaagacggcggtggagatggacgcgacggtgaggcgggagctggcgatccggagactgcgagaggaggccgaggaggaggcgaacgaggcggggacgaggaggaggagcagcagaagggatttcgccgtgttcgagaccgccaggggcgacgcgctcttcacgcaatcgtggactccggccgccgacgatcgcctcaagggcgttgttatactgttgcatggtctaaatgagcatagtggaaggtacagccatttcgcaaaactgttgaatgatcaagggcttaaagtttatgccatggactggattggacatggtggaagtgatggagttcatggatatgtttcgtcacttgatcatgctgttggtgacttggtactgtttcgtacatacagaattgtgcacagatataaatttcaagttgcagtttttttttcttgcagtattttctcaatctatttttgaagttccttcctgtgcagaaagaatttctggaggatgttgtattggaggaaaaccatggtttgccgtgcttcttatttgggcactccacaggtggagctattgttttgaaggttgttgcaccaatattctccatgttagctccaaaataccgtgtcagtgctttgcataagagaggacctcctgtttcccgcgatccagaggctctgaagatgaaatattcagatcccctggtgtatactggaccaattagagtcagaactggcaatgaaatcctccggatatcatcatttctgcaaagaaacttgagcagagttactgtcccttttcttgttctacatggtacagctgacacaataactgatccaagagcatccgagcgattataccaaacatcaatgtcaacaaataaatcaataaaattatatgatgggtatttacatgatctcctctttgaacctgaaagggatgatatcgcaaatgatatcatcaattggttgagcgcaagacttagtgttcttcagagatggtgagctgaatcaagtatgaactacaaggtgcttccccttatgtagttaccggcggttttactggaactgtatacatggcatagagtgcagaatagtgtaaatgtaaactaggatgttatcattatgtcttcacggtcacggtcatttcttgtcttcagctctgctgtataagtttgggaagagcctacatgagatgtaaataatattagagttaagctgaaaataatgtatctcctaatacacaggtagttcagtgtcactttttttttaaaaggacttggttcgcatctttttctgaattgctctcggtcattctctcacatctttttt

SEQ ID NO: 27605 - DNA, 148 bp, Zea Mays
aaagcaacagcaccacacgattccagtggtcgggccgagcacaagaaccaaatcccagggctagacgaacgggtattgaagcctgtcctcgcggcggcggaaggctcccagttttcccctgcggtttgtggtggtcaacgaattcgcg

SEQ ID NO: 27606 - DNA, 3285 bp, Zea Mays
ccgagaccccgacccaccccgcctcccccgccgccgcgctcgcgctcccccgcgacagccgccatacgccctatctccgccgtgcctgcgcctcctcccccgcccgcccgagacccgccaagtttcccttccttgcacggcgagatccaccatcggcgcccccttccctggcgagccacagccgtccatgttcctggccaccggcgacctcccttctctagcccttggcggcgagccaacacctcctcccatggctgccccccagaccccagtcccgtccgcgcatccgctcttccgtcagcgacgcacctattctcccctctctccccgacgtcgcccatggcgtggacggcgacctccctcaccctgcaactctgcacgtgtaagggccgtgttgcccgcctcctttccccacaccggcgcagccccctgtcgccgcggccccttccccaaacagcacggcaccacatgctccccctgccgcgcccgcactctccttccccaaataacacggccccacatcgctggttgcctcgcctcgccggggacccagcacgatggtcagggagctggtgggtgggggagacagggaggagcggaggaggaggtcaagctcaacatggacattgtgttcgtgacgctgccttccccaccgacaccaacgactcactccagaacccggatctggggcccttcctcctcaagccatggtattgggcgagggtggcgccgcctcgcgtgcttgagttcgccgagcgcgccgccagggtgctcgagcgaagaggtgagggcaccgagctcgagctcgccatgaatctccacatcgctgctggcatccactgcggactcagccaccaagccctgacattgtagccagtttcttgcaatcagaacgaatgccagttggtaaccatttaacatttcttttgctgtgtcaacttattggagttggagagaggctatcactatactgacctttatatcatcagaattgacataaatgtgatttacacgtagatacaagtttgtggcagagatttctctgacacgccaatcagtcttcgatgcgaatgcttgttgctcatatggacttgtggttgtgataatgagttcatctccgtgcacatttgtcgtccttgtggttacagcagttaactgagtagtctctcttgactgcaaaacaagcaatctgttgcctctgctgtgatggtggagcaatttcagcgccaagaatgatatctcgcattttagattgtgtcagtgcagaagtattaacattgtttttctttgcataatcagaaaggatgaggtcccttagtgcacactcaaccttcaaccactgttcatcattcagagatggccatatatgatgtgtttcagtaataattgttttgtcaggtttgagcaacatctttgccttctcattattcacatgaagtgcacgtagaataagcacaatgtgggagaatgttgtgtatgatgatatacttttcaaccaatcatcatatatattataaagaaccatctgtggttcagttgccttcagtataagatcaccaaacttctcaatcttcaagcaagcctggaaaggaagctgcagctcactgcccttaataacaatgttagggaagtcaggtagatggacctccaagggatccaacatgcccttccttgtcacaacaatttgctttggctgctcttctacaggaagagatcgaaccaatgcagcaacctcctcagcggttttccacttggccagctgcccaagacgcttttgccccgcccatacacttgtgtggataacctgcacattattatccatactcagtttaaacctacctatgttcagggttttacagaaaaacaaaatcacatgaaaactagagcagaaattcgaaaagaacaaaccttaagaaaaagttgacccgttcttggattgaaaaatgaaaatagcaccattaattggtttggtggtcaagttaccctaaaatgttttgtgaatagtgactcgatacacatttgtatcatccacgaaccatatgatttgattgctgaatatctctccatagttctgtgaagacaggtatggttcatatattcaaatatccaaacctcatttggagttgtgataccagcaacctttgacatcgattcaagatgctactggagtgttattcatttgttcctgacagatgccactgcacaaatggacgttgacacgttgtagtgatcacactgtcacgagagctgagcaaactacagcctgcaagagctacacgtggcatgcttgaccacatcatggtggagaatgcaagtgttaaagttgcattgaatcgcattgccgttgtttctgtcctggatgcacataccctgtcagtgatgtcttatgaagcttggaggctcatacatctgtttctgttggctctctctagctatatgcagtggagctgctaatatgcatgaagtttgggctaggtgagcttcctctttcacttttcaaaccagtataggtattggccgatgtcaagaagacaaggccggcgacgagaggacgacagcgtgcaagaagagaaggcccatgttaggcgcaactatagggctcaaggtcaatcagttgtggtcacacttttccatttttacgttcagctaaactgaccccctgtctcatggtgcaactgtgcaaggataggcaacaagtgttcaacaatatgtctgtggatcaattgacctgcatttcagcttttagttgaggatcaaaatctcgtgtcgttcagggccctcggtagagagacattaatgtgtcggcaccgtggatcgtcgcagttgtgggtcactgtaacggcactggtcacaggcaccatctgcctctgttcgtcctcctctattggcctcctcagcacctacagggtccagtgctactactcaaggatgttgttgcaaatgagttgtggagaaccgtagatgcaaatggttggagagcatcttctgcaccacacatctattggcctcacataccagctgaatctgagagcaatgggtacttgtgtgtccggtgcaacggcggcttgaccttacaaatcagtgttgtatgactaatataaaactctctctctctaaagtagcatagttcaccatgcaagttttgtgtattcatggcaacatatctgaaagatttaagattacttctaccttgattttgtagatatgaaatgttgttgtcattgcacgaatcattaatgacttgattttgctctctatatgctatcttagaagtttcagagttca

SEQ ID NO: 27607 - DNA, 4166 bp, Zea Mays
gcgtcgtgtgtctgggggctccaaccgaggttagcgtgggccctcccgatcaagggcccgattaaaggaacgatagttgggttaagcccaatccagtctctattgaccggctgtagaggacacacccaacactccaatctcaggggatggtggtgggggtggaggtcaccacggcgagatggatcaatggattagggggaacggagatctgaggagaaaaccaaaacactgccgagtaggaatacctgcgagaggaaatgcacaggggtcagcaagatctcgatgacggaggatgaagaagaagaacagaggatccacgtaagcaccggagtctgggtcgaagcacaccgacggcgacagtgcacggctatgccatcggcaacaactggcgaaagaaagaaatgaagaacaacccgagtcaacaacgggagaaggtgctaatggatttgaagtcaagctactaacgagaaatctcacgcgaaacggaggcagaggcacgaaggggaaccaaaagttgttaatggcgatcagcaaaagctgttgccatatctttaaagagctcggttcggttataataccacgaatgcaattatgtgcttcgtgttgctatttctacgatgccgcatccataccggatgccaaattgccaacaggaaatattgtaattgtaacgtcaaactttccatgctcgttcgactacaacgtgctgcggttgacataagggtcccacgtgttgaagccccaccgatcagccgcaccagcttccccgcacagccgtcgtcgttatccccagtccacaccggccgcgccgcagcggcccatcccacccgtcagcgtcggcgtaggcccccgccggctccttcctctcgccgtcgcgagaccgagcagccagtagcagcaggagtgggtgctccgtgccccgccatccaacaccaaaagtggaacccctcacacccacgcgaggtggtcgacactcgacggagagccgcaaaggaggaggagctggcggtggcgggatccagcaggccgcccatgtcgagcggcgcggacggatcggatccgatcacgggccttggcccgtcgacgatcccagagccgccggaccgtgagccgcctcatctacagtctccgtcgccggcggcgcagcaggaggtggcggcgtcgcaagccgagacgccggtgccagcggtgaccatcgtgatctcgcggccaggggaggaggttcagacgcctgatgcaatgggtggctccccggcgtgctccacgcaggccggtgacggcaaggctacagccacctcggtttcgttgaccgcttcggcggctgccaaggaggccgagttggcaaggtccgacagcttcgacgactacgagcaatgcaggtattcagtcggtgtgggattccctgcgcgcaagctcagggtattttagtgaattgcgagttggaaaggggacgagggtgtgttctgcttgggagtgttccaattttgtatgggtaccttgttaggtttagtagttgcgcgttttatccatctatgaatcacctgctatggctttgggtgctccctatcttgggggcgttgcttcctcatgcggtgtagtgattgtaggtgtatcaacaaatttccatttatgatgtactgattcatttcttgaagtcaccctagaacatggatcatgtcaactggactgtttactttagctgcccttttctgtctgtaactacaccaatagatttttgcctgcagttgggtggatgttgttcatcacatataacatgcgagcaataagtttgtgaacacgttcattgtcagtttatctgcatcttcattagtattgactttgccggtgcttgtgacatgtgcttatttagaggccatatattagtgcaattaggctgtcacagagtgcaaatgggactacatagcattcctgttagctatgatattttagggtctcgagggtatttaggcgttgatgagaatgtaggttatgcttccaatgcagttgggttgaccttgatccttgaatgtagaagcaaaagatattcgcaataagtttgctgatggtaagatcatttgtgtgtagaattattaaagattgggacttcatagattcaataattcaatgaataaatatgatatttgattcttggttatgaaaggctaactggcagctatgagctgcaggtgaaaaacaatacgaggaagaatgctggaaactgataatcaacttctggctgagtatttcttgtaccacaaatgtgctgtgagcatgaactgcatgcaccgttgctttgccatgtattgatgttcttgtgttgatctttttttatatactcattgcaagtaataacatatccaatctgttttctgctggctctttgcaatttttgaatatagataggagcactatgtttactaatcagaacaattatctttaggagtttaattttcctaatatatgtacctgaaataataacatatccaatctgttttctgctggctctttgcaatttttgaatatagataggagcactatgtttactaatcagaacaattatctttaggagtttaattttcctaatatatgtatctgaaataaaaaaaaaactcgacctacgggggggggggggtaagacagccccggacattatattaagaagaaaaccttctcacgcaggtcgagaaaactcccgaacccctgccccacccatacacagcggcactgtagcccatgtgagaacacgaccgtgaccggaattgggccttagacctgtattttgcgtggtacagacaagtggatttttttaaccacagcctgaaattcgctcccatagggagtcgaacccaggacatgagaagtgctacttagaccaaactaaccaactcggctagagaccctttcgctatgtacctgaaatcaaatattggtcttttgtttcataggattaacacctgtactcctaataatcccagatcccattaaggtacctgaggatcatccttgttttggaacaacgtagaatgcatcggcttgtactgtttgaagttaatagagccaacattgttcttaacggaagtacattttttaactgttagacattgcaatgccatcccataattagattcagtcatcccggtccaaaaaaaaaagattcagtcatgtaaaacagacatctagaagcccttcagtacatactgccatttactttaccttcaaaattttatatattgctgactcttgccacttattaccttattttttatggaggatgaatacctttttcacttctgcagagtttgtcaacagaagacagaagaacctctggtcgaccttggatgtagatgtcgtggtgatcttgcaaaagcacatcgcacatgcattgatgtttggtttcgtactagaggttcaaacaagtgtgagatatgccagcaggttgctgccaatatcccccctccagagacgcaagcaagtggatggtttagcccactttgggttgcatttgcaatcctgattggtggtctcttattggatgtgctgatatctgtttctcttggtgtttccgcacttcctgtcaatataataattggcgttcttatagttctcggattgggcaccgcccttcgtcttgctctcgagtgctgccaggaatggggctcaaggaggaacgtaggcaatatgccgaggctggagaacataccgccgactgggtaccaccctgcagtagtataatcattatgggacttgtaaatagcggtaggaacatctaaccttgtgctggctcttggattgtattagctttagctcacacgttgctcgttaatgtcgagctcaaattcaaagcttgttgattacgatcgggtccatactccactagtccaatgcaatgtaaatgcagagttactgatactcggtcttcatggactagtgctgatgccgaattgccagcatcttaattggttgtctggctaatcgttcagcatgacagcgcttggtttcttcttccttgtacggtttgctctcacaaatcacttgttgtgtttcatcttatctgtggcttgttggtataggcatttgtgaaggccatttgagcgaatgctgttttcatacgtttatgcacagagttgtgtggatatagcatttttatgtgaactaataacctgctg

SEQ ID NO: 27608 - DNA, 1653 bp, Zea Mays
ctggaggcttcctgcgtcgcgtggaggcagacagagctcagggagggagggaggggaagaacgaagcagcagcaacagcgccatccgctcgcttccttccccttctctccctcctcccccaccgccggcgtcgcctctacgcgcgcgcgccccgccgggggctgccgtcgctgcacccgtggcccgtgggcggcggccgcgtacctgtacctacgtgctgccgggggggggggggggggggggagctacgcgtctcctctcgccatggacgccggtgtagagaagtgcggcgacgcggcggcggagggcggcggcgacctctacgctgtcctcgggctcaagaaggagtgctccgacgccgacctcaaggtcgcttaccggaagctcgccaagaaatggcacccggacaaatgctcctcctcctccatcagcgtgaagcacatggaggaagccaaggagaagttccaagagatccagggcgcctattcggtactctccgacgccaataaacggctcctctacgatgtgggagtatatgatgacgaggacgacgaggatagcatgcaggggatgggggacttcattggtgagatgacccagatgatgagccaggaaagctttgaggagctgcagcagctttttgtcgacatgttccagtctgatattgattcaggattctgcaatgggactgctaagggccatcaggttcaggggcaagccaaaagtagaacatgctcaccacggtcccctcctactactatagtaaaggaggcagaggtgtcatcatgtaatggcttcaataagcggggttcatcagcaatggactcaggaaagcctccaaggcctgttgaatgtggtgcaggtcagagccaggctggattttgttttggggtgagcgacacgccaaagccgcgaggtccgaacgccaaccggaagaggaacggccggaaacagaagctgttccccaagcactacgttacatccgaagatgatacggccggttcctagcatcagcagcacggtagcagtttgaccgttggctttggtgatgtcagcagtagggagggcacatcatgtcgcctctgccagctgctgtgatctgaagaggcgtttagctcatcatatgcctttagtcttttgagaggtctttagggttgaaaggtacttcgaaaaccgaaccagcgtctacaggcctaagagggatttccattgaaactcgtcgatgatactacagttttctttccccatctgtgccggttgtgttgtactaccactaccagtgacagtgagtgacttctaagctattcatttttttaactggagaagttgataccatgataattaaaaaaaattgggtgtgtattgaactattaccaagaaaatagtacttggattgtgatgttctgaacattatgttttgtaggcaatcgtgacttgaaagcggtcgaggtatatcttgttattttgtttccctccgatttttcaatatccgattgattttgttttgaagcaaatagagagcatgtccgtgagaatagtcatgaagcaaatagagaacatgtccgtgagaattgtcggttaatataatttttagtttttaatttgtacatgccactcttgagaaagatctctctcaagcttgtccatgtgcgt

SEQ ID NO: 27609 - DNA, 3819 bp, Zea Mays
gcctacggcactacggcagtcggcagcagacggaccagaggctctagcacagtgccgcctcccacctcctgtcgtctcggtctcgctttaaaatcccgcgacgccgtggtcgctcgcctcttttggagcaggccatgtgaagcctctgaccccccgataccttccccttcctcccgtgctgctgctgcaggacagcgcggcgttcgccacacgcggcggcgaagcttcgcgagatccgtgcgcgatgtcgtcgcggccgtcgtcgtcgtcctcgcggcggagtagctcgccgttctccgcggggcaccgccgcccgcccaccgcgtcctcctcctcctcgagctcgtacttcagctccggccgcctcattccgcgctcgtcctcgtcctccgtcagctccagcttctacggcggcgggggtgggggcagcacgaggtccaccaccccgagccgccgcagctcatctgtagcaccggcactgccgccgtcgccagtgccgttcccgagcgcggacgagctcgtcatcgaagacacctcccgatccggcgacagcatctccgtcaccatccgcttccgaccgctcagcgagcgcgagttccagcgcggcgacgagatctcgtggtatccagatggggaccggcttgtgcggtgcgattacaacccgccaacggcttatgcttatgatagagtttttgggccttcgacaagcaccgaggctgtctatgatgttgcagcccgccctgttgtaaaaggtgctatggagggcataaacgggacagtttttgcctatggcgtcacaagtagtgggaagacccacacaatgcatggtgaccagaattgtcctggaataatcccactagccatcaaggatgtcttcagcatgatccaagatagtcctggaagagaatttttgcttcgtgtgtcgtaccttgaaatctataacgaggttataaatgatctacttgatcctactggccaaaatttgcgtgtgcgggaggatgcacagggaacctatgtagaaggaataaaagaagaagtagttctgtcaccaggacacgctctttcatttattgcagccggtgaagaacatcggcatgttggctctaacaacttcaacttatttagcagccgaagtcatactattttcacattgatgattgaaagcagcgcccgtggtgatgagtatgatggggccatgtattcacagcttaatttgattgatctagctggttctgagagctccaagacagagactacagggttaagaagaagggaagggtcatatattaataagagcctcttaactcttggaacagtcattggaaagctcagtgaagggagggcaacacatataccctatcgtgattctaagttgacccgtctactacagtcatcattgagtggccatggtcatgtctcactaatttgcacaattactccagcatcaagtaacatggaagaaacacataatacattgaagtttgcaagcagagcaaaacgtgttgaaatttacgcctctcgcaaccggataattgatgagaaatcattgatcaagaagtatcagaaagaaatatcctctctaaagcaagaactcgatcagctaaggagaggaatgattggtggtgccagccgggaagaaattttgagtttacgtcagcagttggaggcgggtcaggtcaagatgcagtctcgtctggaggaggaagaggaggcgaaagctgctctaatgagcaggatacaacgtttgaccaagttaatacttgtttccaccaaaaacaatattcctgccttgacagatgggcatcagagtcacaattctctcagtgagcaagatttaatcacttcacaagatagttctacacttgtccaaactgagggcaccacaaaagaccccctatcatccgctttgccagactccttagatgagatcaatcagttaagatctggcaccggtgaacaatcttcagttaccggttctgcaacagattcaatgcaggtgggattcacggcatcagatcatatggatctactgattgaacaaattaagatgcttgctggggaggtcgcatttggtaccagttcactgaaaagactaatcgaacagtccatagatgatcctgaagcaacaaaggaccaaatcgagaatttagagcgtgaaatccagcaaaagaggagacatatgcgagccctggaaaaacaaatcatggaaagtggcgaggcatcagttgctaatgcatccatgatggatatgcagcagactatcacgaaactaacagcgcagtgcagtgagaaggctttcgacttagagttaaagtcagctgataatcgtgtactccaggagcagctacatcagaagaatttggaaatctacgatttacaagaaaaagttcttcgcgttgagcaacaactctcagcaaaagtggatatatcccctgagaaggaaactgattgtgcacagcaggagactattgatttgaaatctaaacttcagtccaaggaagctgaaatcgaaaagctgaaatatgagcatctgaaaatttctgaggaacattgcgatttaatcaaccagaaccataaattaagtgaggaagctgcatatgcaaaagaattggcttcttcggctgccgtcgaactcaagaatttggctgaagaagttacaaagctatctgtgctaaatgcaaagcaggcgaaggagttattagttgctcaggagatggcacattcaagggttcatggtagaaagggtcgtacagctagtaggggtagggatgaggttgggacatggagcctcgatttggaggacatgaaaatggagctacaggccagaagacagagggaggctgctttggaagctgctttggcagagaaggagcttctcgaagaagagtacaagaaaaagtttgacgaggcaaagaaaaaggaactatctctggagaatgatctagcaggcatgtgggttcttgttgctaagttgaaaagaggggctttaggcatatctgatttgaatgttgacgaccgaactgttaacctagctgatataactaacagcacaaaggagaacaaaggtggaaagaattttgctctagttgagaagcaagcatcagaagattctgtgaagtcactgagttcagaagaacatacaagtccggagtttgaaccacttcttgttcgtctgaaggctaaaattcaggagatgaaggaaaaggacattgatcccctgaccgataaagatgggaactcacatgtctgcaaagtttgtttcgaatctgcagccgctgcagtattgcttccttgccggcatttctgcttgtgcaagccttgctcgcttgcctgctcggagtgccctctgtgccgcacaagaatcgcagacaggataatcaccttcacgtgagctgcgttctagcttcaggtcattctgaagcacacatcctcttgtaaaatcttcaatggtatatgtttctctttttccttagcaaagaaggtgccttttatgttccttctgtgttgtatcgccattctttgggttccccttcccctatagcttcacgccttcaccttacgttctttgttgtatcgaggagttacaaatgatgacttctcgctctgcaaatatgtatagatacgcaactcgacgctgtaacacattttgattctctactcctgaagaaaagcagcgaacgacatgatgacgtgtgtatactgtgctcctagtcgtccctgttagcatggaaggctatattctataattgctgagctacgcccctataattatagatgatggccttcacttttattatcatggttgattagttgcctaca

SEQ ID NO: 27610 - DNA, 1340 bp, Zea Mays
atgctccctgctcgctcctagtccctcccgggctcccggcagcggcggcgcaccttatggcgacttgagctctctgggcgacgtcctcgggacgggcagactgtaattgaaatgaaaaggataggtagatctagctaattcgacaacagagcaaggtgcgctcctatggaagtggaagaagcaggaggcgaagtggagaacgccggcaaggacgaggcggaggcggagtaccattcgcgcgatttcgaatgggaggacctcaaggaagaggaaaggagatatttgcttaaggaatttcctgaactttgtagcagcaaagatcatgccaaggttttagaagtggggtgtgggaatggaagcactgctgtttccattctacggtctagtgaaaggatcactgtctttgcttgtgactgtagtaaagacactcttgagaaggcatatgaaattatatccaatacaaaagggattaatatcaaggataggttccacccctttttaatggatgtttctaaagaaactttcccagattggttattttgcaaagcctgtcaaacttcgctgggaaaagctgctgcatctttacttgatccaagtcaccatggaattagagaagagcacccagtcttccttggagagaaccaatgttgtgctggtggcatggattttattaccatgatattcacactgtcagccatacccttcgacataatgccaactaccatagaacaatgtgtttctgttctgaaaccaggcggccttcttctttttagggattacggtctttatgacatgacaatgcttcggtttttacctcatcaaagagtagggtttcgggaatatatgcgatcagatggtaccttttcatacttcttctcattggatactgtgagagaactctttcgtgctgctgggctagtagagttggagctggaatattgctgtgtcaagtccgtgaaccgaaagaatgggaagacgatgcggcgggtatgggtccatggcaaattcaaaaaaccacctaggtgacatcagttagggcttgttcgtgttcagctcaatccatatgaattggatagaattgtgtggatttaaatccatagcaagtcaaaatctctactaattttttccaatctcatcccaatccatatggtgtagaaataaccaaagggcttagctgttagttttgctcggccactttgttgttgcaacaaagcgttgtaacagttttgtagccacaaacttaaatggcattgaaattatgccctcccccacccccaatagccattctccaaccattttccttatatttcaccctttatcagtactttcgattatatttt

SEQ ID NO: 27611 - DNA, 734 bp, Zea Mays
attttttactatactttagtcaaccctaacttcgttttgacccaagaattttggaatggacagaatggttctttcattaatccattgttttgttttatatgttgatcagcccatcacaatggcatccatcaaattacagaagaagttatttgtagttgcaaagagaatatcaaataaaatacttgttgagcttaagtttcttcatcaaatcatttttgggaggcttcaaatgtagcactataccatggtttggtgaaaggagagaagatgaaggtgctggtacatcacaatcaatactagaagcaagacagacgcacccactattgttactgaaggtcaagatgcacaagatgatctgacaacaccacatgcacctaagatgtccaaaaagattactccaaggaagaaaagcaattgaactaccttatgtatattcaaaattagtgtattatccactatgttgtgtcaagaactatgacttcaaaattagtgtgtcatgaactatgctgtttcatgaactatgtcttcaaattctgggaagtggagtgcagtttcttgtataattttgaacatgtccatgtgcacctactctgctaattgtgtcatggactgacatgaattatgtcatgaactctgccaactgtgtcatgaactgggaagtggagtgcaccaaccgtgtcatgaacatgtccagtttactgcaactctgccaatgataataaaatgtccagttt

SEQ ID NO: 27612 - DNA, 545 bp, Zea Mays
ccgtgggcctcctccgccacctcccccgtggccctgcccccaaacccgcgatcctctcgagccgcccccaccccgccccaccgttctctagcagtctggctccatccgcaagccccgcacgtctccatgattccacgccccccgccaccagctctacacccggtgctccgcctccatgccgcagatcgatcacgtccccactccccaaggctttggtttacaccggcaactattcgcccttccctactaaatctgcgatcatttcttctcgattgtgaccatggcgactcaggtatccctcgtcatgtggagggcggtcttctcagcgctaggcttgctcgtggtggccacgctggtgtacacattggccactgacggctcgctgttccatcctgagctggttacgccaaatggagcagcaacatttggacgatccacaacctgttgcggccctacctgcaagcctgcacctgtggtctctctagctattgtggactaagatgccacaagttcaattgctggagaggcagggacggtgatgccag

SEQ ID NO: 27613 - DNA, 864 bp, Zea Mays
gagcaggaaaataatgtttttagatggataaaatgattttaggtagctacaatgtactgtagaaggtatcaccctccagtaggtattactagctaactgtcaagattaccgtatggtcctgcgcaaggacttgacaaacagtgatgttggaaacattggaagaatcgtgctgccaaagaaagatgcagagcctaaccttccaatcttggaagataaggatggcctgatactggaaatggacgattttgaactcccggttgtatggaatttcaagtacaggtactggcctaataacaagagtaggatgtatatattggaaagtactggtgaatttgttaagaggcatgggcttcaagctaaggacatcctcatcatttacaggaacaagaaatctggcagatatgttgcccgtgcggtgaaggctgaggacatagcgccgccagaatgcgagtgcgtcgaggcaggaaaccctagagaagagtgcggcttctccgtcagtccttcgatcaataagaagatcatcacgtagatggctggagcatcagaaatgtatggtgtaggctgtttgccgcgcaggagcacaccgagaatcggcggttgctgggagccaagcaactgtttcgatcgaggttgtgtcgtcaaagctgaattcccacccaacctgcgtaggcctgtactatactgtttcccttgtttttgtcggccgtttcgtgtagttcgagataaatgatgagtttgcttttgtagctgtatatatttcgtctttggataattcggtgacaaacaagtcaaggtcgttatataccgtctttttgaataattattacgattataagaagttttttttattatttttagatatat

SEQ ID NO: 27614 - DNA, 167 bp, Zea Mays
ttgtgattggtgttaagcggcggtgggcactgccttcttataagtctaagtaactcttctatacttcttattgaggatggtcacttgagctagcatatattttaaaactataaataatttataacagttcaaagtttatttctttgaatcacttttataatcactcc

SEQ ID NO: 27615 - DNA, 4093 bp, Zea Mays
tggtctccggccaaggggtcgtcacatacaaggaccagcgagatgggcggcgaggctgagcctgacaacgcggtgctcttcgttggggtgtcgctggtgctgggcatcgcctcccggcacctcctccgcggcacccgcgtgccctacaccgtcgcccttctcgtcctcggcgtcgcgcttggatccctcgagtacggaacacaacatggtctaggcaagcttggagctggaattcgtatctgggctaacataaaccctgatcttctgctggctgtttttctacctgccctcctctttgaaagctccttctccatggaagtacaccaaataaagagatgtatggcacagatggtgttacttgctggacctggtgtgctaatatcaacagttttacttggcgttgccgtaaagctcacttttccttacaactggagctggaaaacatcattgttgcttggcggactgcttagtgcaactgatccagttgctgtggttgcactgctaaaagaactcggagcaagtaaaaagcttagcacaatcattgaaggtgaatccttaatgaatgatgggaccgctattgttgcctatcagctattctatcgaatggtgcttggaagaacctttgatgctggctcaataataaagttcttgtctgaagtttcacttggagctgttgctctgggccttgcatttggaatcatgtcaatactgtggctgggctttatttttaacgatacaatcatagagattgcacttactcttgctgtcagttatatagctttcttcactgcacaagactcactggaggtctctggtgttttgactgtcatgacactgggaatgttctatgcagcttttgcaaaaactgcttttaagggtgaaagtcagcaaagcttacaccatttctggtatgtatcttatagaaacaagtcagcctcccaataaaggtcatgctgtcgtgctatgccactatcactggcgaaaaggtctctcacttagttggttaggtggtctgagtagtactcattccagtgggagcaaatttcagaccagggttaaaaaattctcgcgtctgtcacacgccaaagcacaggtttaaggtccagacccagtcatggtttctcacattggctgcagtacgccagtaccactgtgtaaaggtgagacaggatttcaagggctttctcgacctatttgcacctggggactatcttacccccataggccaatttttcttgttggttaccaaaagtaccatgaaatcttcagttgacactgaattaagggaaatggttgcttacattgcaaatacacttatttttatactgagtggggttgttattgcagatggtgttctacaaaataatggccactttgagaggcacggcagttcatggggcttccttcttctgctctatgtctttgtacaaatatctcgagttatagttgttggtgttttgtacccgatgttgcgtcactttgggtatgggttggacttgaaagaggccatgattcttgtttggtcagggctgcgaggggctgttgctctgtcactatcattatctgttaagcgtaccagcgattcagttcaaccttaccttaaaccagaagttggaacaatgtttgtgttcttcactggtggcattgtgtttctgacattgatttttaatggctcaaccacacaatttttgctacatatactcggcatggacaaattgttgcccacaaagcttcgtatattgaaatatacaaggtacgaaatgctaaagaaagcattagaggcttttggtgaactaagggatgacgaggaacttggacctgctgactgggttactgtaaagaaatatatcacatgtttgaatgacctagactatgagccagagcatccccatgatgttggtgacgaagatgactgcatgcatatcatgaacttaacagatatccgagtgcggcttttgaatggtgtgcaagccgcgtactggggaatgcttgaagaaggacgaataactcaagttacagcaaatattctgatgagatcggttgatgaagctatggaccttgtttctggacaaacattatgtgattggaaaggtttaaagtccaatgtgcagttcccaaattactataggttccttcagaggagtaggttaccacgaaagcttgtcacatacttcacagtcgaaagattagagtctggatgttacatctgtgctgcatttcttcgtgctcacagaatcgcaaggcggcagctacatgattttcttggtgatagtgaggttgcaagaactgttattgatgaaagtaacgctgagggggaggaagctagaaaattcttggaagatgttcgagttacattcccgcaggtgctacgagtgctaaagacacgacaagtcacatattctgtgctgacacacttgagtgagtatattcaaaacctccagaagactgggctgctggaagagaaggaaatggtccatttagatgatgctctgcagacagacttgaagaagttgcagaggaatccaccaatagtgaaaatgccaagagtcagtgatcttctgaacactcatcctttagttggcgcgctgcctgctgctgtacgtgatactttgctaagcaatacgaaggaaaccctgcgagggcagggcacaacgctgtatagagaaggatccaggccaaccggtatctggcttgtttctattggtgtagtgaagtggacaagtcagagattaagcagaaggcattccttggatccaattttatcgcatgggagcactctgggtctgtatgaggtgctgattggaaagccatatatctgtgacatgaccacagattcgatggtacagtgtttcttcatcgaaactgaaaagatagaagagctgctccattcagatccttcgattgagattttcctgtggcagtgctctggtgcttgccaggcttttggtccctcatagattcgagaaaatgggaatgcatgagatgagggttctggttgctgaaaggtcgacgatgaacatatacatcaagggagaagacttggaagtggagcagaattgcattggcattttgctggaagggttcttgaagatcgagaacctgactctcatcacgcccccagcgttgcttctgccatggaatgctgacttgagcttattcggtctcgagtcctcagactactgccatactgcacgcaggtatcaggtggaagccagagcgcggatcatcttcttcgacgaggcagaggccgcccatcttcatgttcagacaagtgcgtcgctgccccaaggtgagccagcacggagcatgagcaaggagcacagcggcttgctcagctggcccgagagcttccggaggtctcgtggcagcctaggcttagcagctgagatgctgccgggcggcttgtcttccagggccctgcaactgagcatgtacgggggcagcgtggtgagcctctcctccggccagcagggtcaccggcggcagaggccacgtcatcgcgtgcaggcggccacgacgatgacaaaccagaagaagcacagctcttcctaccccaggatgccatccatatccaaggagcggcatctgctctccgtgcagtcggagggctccaacatgaagagagtggcagctctacctgaggttgctgccaccgctcctgctccggcaggggcagcacaggggcagcggagggctatgaacttgcaggaggaatacaactcgagcgaagactccgccggcgaagaagtcatcgtcagagttgactcgcccagcatgctctctttccgtgagtccaccgccgtgcctccgccccaggagcagtagctggatgcctggatgtggtcttctcttctcgtgtattgtattgtactgtatgtattgtatcagggaagctttggcgcagtggtgtggtgtggtgtggtgtggtaaacaaaataaataaaacacatttccgcgttccatattttctcttcatgatcaccgaataaataaaagaaacagagacaatgatgcggaagaaaaatgcgctctttctgtctggacccgccgccgcctcaacttacgagaccaacaaaaactgggtgcaacccat

SEQ ID NO: 27616 - DNA, 1331 bp, Zea Mays
ctcgccgttcgggatacctcagctccaataaactcggcgggcgggcggtggagggcgagtgaagacgaggtgcttgcctcgctcggctcacaccccttttcgtctcttctctgcctttcctccgcaatcacagagcgcaagaggagagagagagagagtgaggggggagagagagggctagggttttgtgccccccacgcctcacgcatcgaatccgagccgggtcggggttgctgcgaatcgccggcggtgcttgatgattcaggcctgtgtggtaggtgccgtgcttgctcgtcctaggcgattttagggtggtcgtccttgtcgctgtgagctggttgggggctgtgtggatttggttttctggacgcgggaattcaaaggctgtgattccattgcaatggcatctgaaactgatgagaaagctaagatggagagtttgacatctgctgcagcctttgtggagggtggcattcaggatgcatgcaacatttgccttgaggccttctgtgagagtgacccttctgcagatcaaccaaaatggatggatcaacacatgagtcaccaaaatccaccacccaacccaatcggtatccaatcaaatactgtagacttagatgctgaagactctgttccatcaagctttacttcgaagaggccgctaggtcatgattcgtccaaggaaaaggcaaagaagcaaaggtctgttgacacatcgtccactttttctgagtacctcaggtggatgggtgaaatatctttggaacggttgtctgtgttcaaattagtagcttcaattgaggagaggaagttggagtctatgaacaaaaacgagaggcaaaaactcatcttggagaggaagaagctaaacctggagaaacttaggatggatcggcagaaattgaaggaggacaaggaagaggaggtcatgatattgggcatggatctgagtaaatgtaaccccctacttcgacaatgctacgaggctaagcaacaggagatattggcaagggttattggaaactcgtcgtcaagcaagtgaggagtgaacgaagttaatttttgttagtggttgagtaagtcatgttatttgttttcgagaaaaactgcatgtttctgaaccatatttttgttcttgttgttccaagttgtttgcaaacttgacatttttcagtatgtcatgcttgaacattgtaatgttggtcgatgctaacctatgatgatgctgaacaggatgctgtcgtttcttctggaaatagcactactgtatctagtcctaggttttttttaacagaacaatccatcgcctacggctttttaaagttacaaag

SEQ ID NO: 27617 - DNA, 1296 bp, Zea Mays
cgctgcgccgccgattctcctggtccttaggttcattgtgaagttgaggtgggtggtataagcatcgaagagagcatgagcactgccagtggtacaaggcgtgcaccaagaagacagtcgcaagatgggtctgctgataaagtagtggtgatcatcgaagcaacctccccggtggtggggagccgtcgtggaccaccgacccctgttcctggcgcccaaaactcacccattgatgtggaggccatcgaagatgaagttcagacagtatctccttcgcgagtgcccccaccgaggagggacaggagaaccaggagggaacctataacagtggttgacttggaggttgacgctagccaggaagaagagattttggctgcagcaaacgcaaactgtagccaatggccagctcccgagattgatcttctggagagaacaagcaatgagaggatatatgcagaaatgttcttgcctagcattggatggtcttcgccatcaaggatccagccactgcttgcagccattaatagctgcaagattccagagttcagttacgatctatcttggctaaaccatggttctcacatgggcaagcagatccaggatcagaagaagttacttgaggagtgcttggcgagatacttgaccgaatcagcccggctgttagatgaaagccaggtggtcaccgaagtgaatgttatggtgcagaattgtgttggccttgaactccgggattcgtcttactatctcgctcccagatgggtggcgatcttccatcgtatttacaactggaggctagcaaagctctctaccggaaagttctcagaagcttatgttctgactcagcacctgtatcaggctcctgcagcagctggctcaaacggtaccacacaagggcttactgctaacaccgccagcagcgatgctgtggatcacatcatgatgcctgccgtttcaaccggcatcacactagacgaaatcatcgagatcagttgtgacctcgatgttgttgatgcgcagccagtaactctgccaccacgactgcctgtgcatgttcatgaagaacctcaggcacttgctgacaacaacgacgtgcatggagttgatgaaatgtacataccaagaagagtagagttgggggaggtgatgcccatcgacacagacgacaagctttctcggctaagagtagagttgggggaggtgatgcccatcgagacggacgacaagctttcccggttactggagcaatgcaccaagctgcaggacaggatcgatgagacactttccatatacttttga

SEQ ID NO: 27618 - DNA, 215 bp, Zea Mays
cacaaaactcgcgcgttcccgagagaaaaaaaacacagcggcacggcacaggcgctgtatccatatcgtcgtgcgcagcgcagctacacgcctacacctacaggtccgtgccagacgagtcagcatgtagtacgttcgaagttggaaaacaattttacatgcccagacgacgacgccatcactcacgccgaacagacaccccacaagctcctgag

SEQ ID NO: 27619 - DNA, 1672 bp, Zea Mays
tttatatccctccctggtcggctcgtccacacatcccaaccctaatccaaaccccttctccatcctctcttcccttggtcgattggaaacaaatggaaaagaaactagtatcacacacacaggtaccaccggcacagcagcaacaataagcaaagagcagtctccaatagtatagcaacaccaagaaaataagcgccatgcagacgccggccatgtcgacgtccacggccacgacaacaagggccatggcgccagcgaagccccccgcgcggcggcattgctgcagctacctcctcctcctcctaccctccaccggccaccgccgcagcgtcgcggcgtggtccgcgaagaaaaagaacccgtggctggacccgttcgacgacgggcccgacgaggagttcgactaccagggcatgttctccggcgggaagcaggaggaggacccgcggccgcccgaggaccctgcgaacccgtacgggttcctgcggttcccgcagggctacaacccggagctggacagcctcgcgtccaagatgctcaaggaccggtaccccggcgtgctggtcgacgtggtggcgtcacccaggggcaagcaggtgtacgagatgtgcaagaacgtcaggtacgccaacgtctacgacccggacgacgactggccggagccagcagagtacacgcacatgctcggcgtcctaaagaataggtactatgatctgatcgtgtcgacgaggctggccggcatcgggcacgcgctcttcctcttcatgtcatcggcgcgcgacaaggttggctacgtttaccccaacgtcaacagcgtcggcgccggcctgttcctgaacgagatgttcaaggcgccgaccaacaacctcgccgacggcggctaccacatgtacaaggacatgctggagtggattgggcggccggcgaagaacgtgccccggcagccgacgcagccgctgcgggtgtccatctccaagaagctacgggcgtacgtggaggacaagtacagccgcgccggcgtggagaagggcaagtacgtcgtcgtccacggcatcgcatccgattccgtcgccagcatgacgtccagaggcgacgacgactgccttcttcccctcgagcactgggctcagatagccaaggagatcagctctggcgacaaggggctcaagcctctgttcgtgatcccccatgacaagcacagagaggaggtcgaggaggaagtgggggacgacacgaacatcctgttcatcaccaccccaggacagctcacctgcctcatcaacgactctgccggcgtcgtcgcgacaaacaccgctgccgtgcagctcgccaacgcccgcgacaagccatgtgtggccttgttctcgtcggcagagaaggcacggctgttcctgccgtacgtggaggacaagagcagctgcaccgtcatctcgtcgatgacggggaagctgatcgacatcgacatcaacgccgtgaagaatgcggtgaaggacctggagcccgctcccagcttcgcattggcacagaagtagcagctcccagcatcattccatcgctttgtttgtacacagtaccagagaatgtaatggtgcaggctatcacaaactgcaaacggcacgcacgatgtgttataccgataaataaatgacaatctcgtatcagctattgcaat

SEQ ID NO: 27620 - DNA, 2171 bp, Zea Mays
gcttgcattgcattggcactttggcaggctgcgagcagtctgacagctacacacacaggcagacgccgttccgcgggggaaaggtgcggacgcctgaatcctctccaactccggcaccgcattcgcacgcccgcgaagccccgaatcggagaggacagaggagtcatggacgcggcggcggcggcggctgcggctgcgagccccacgagcaagaggatcgcgctggtgacgggagggaacaagggcatcgggctcgagacgtgccggcagctggcgtccaggggcgtcagggtcgtcctgacggcgaggaacgaggcgaggggtttggaagcggtcgagcgcgtcaggtgcgcccgcggcgacgccgaggtttacttccaccagctcgacgtcaccgacccctgcagcgccgcccggctcgcggatttcgtcagggatcagttcggtaggctggacatcctggtatggcaaccccttctcgctcgcttatctctctctctgccggcggcttagtgaatttgggtattggaaaagtgataatgttccgctaatatttttgggtggaactgatggagctagcttatcatatgttttggacattctgagccagcaggaaaaccagatgattccttttgagttccgaacatggatgtacccgtaggccgtagggttatttttggcttactaactaaaaatgaaaaagaaaatcttatgatgatgaccactactttacaactctgttcctaatacaactatgcgtgcctgtttcgcttcacaattcgagaaaacaaagcatggaatcaaattgttgcttagtttttacacctaagaacatttcctaagtagcacacttcaatctttggttcgactgattgtttgcaattcaccaccatggcaccgtcatgttttggccattgttgtctgcagatcaacaatgcaggaatttcaggcgttcaccgtgatccagttttgtctgctgcggtcaaggataaggtacccttaatctaaagcaaaagaatacaaagtactgcgtttgtgcagtttgtgagcgattctcacgcaccacagtttcaatgaggcacattacaggctaacacaactgcctctcacatttcacaaggctaacacaatagcttgaagaatagtggttaggatattagcattctcattgcacgttgataatcttaagttatgcaactcaggtaccatgttactaaagctatttgattggtcgatggcatggatgtaaatcagagagtcgaatggatgaaagaaaattcgaaagaaacatacgaggaggctgtacaatgtatgaaaacaaactattatggtgccaaacttgtcacagaggcactacttcctcttcttcagttatcctcctctggaagaattgtcaacgtttcgtcaggctttggactactgagaaatttcaacagcgaagaccttaggaaggagtttgaagacatcgacaatcttactgaaagtagactggaggaactgatggataagtttctagaggattttaaggccaacttagtagaggcgcatgggtggccgacaggtggatcttcagcctacaaagtcgtcaaagcggcgctcaatgcgtacacgaggattcttgccaagaagtatcctacgctgcgtatcaattgtttgacgcctggttatgtcaagaccgacatgtctatgcacatgggggtactgacacttgaggaaggcgctcgcaaccccgtgaaggttgctctcttgcctgacgacggaccgactggtgcttattttgatctgaatggcgaggcgtcctttgtgtgatggtatttctcccttttcagcttcagaataaaagaaagagctatgaagtagttagtgccaatcagtattgtagttcgacttgaatacttaaactagcacgttgagcaaaccgtagagctcaacaccagggatttcctcgtcttctgtataatatctctggtgatgattgtatatttgcaatgaaccatgcagatttggtcgcgccaaggtagtgtttggttggcacaatggtaatggcaacaggaatgaaaatggactgcgaggggaacgatggtggggttcgtttacatgattttatttggttggacaaagcaatggcgcgtaatcatttaacggccgaaggatagcggcaataaggctcg

SEQ ID NO: 27621 - DNA, 580 bp, Zea Mays
ttaattcgcgctacagtgcgacgacgcccagggccaaggtgctgaaggaggtgaggaacgtcgcagtagtgatctccatggagaagggtgccatggccagaggtagtgggcatcaccagcacggcggccacaggcacgatggctagcagcaacagcaactgctgcttcaacgacaagcgtgcgtgagctctaagcagactcaagcgatcctatcaggtagttcattgtatttcaccattcatatttcctttttatgtccatgtgagatgaggttgtttgttcggcgagtggagcggtgggaaagccacagaggtatacgagatttatgttaatcccccaccccaaagagtcttccctatccatatcgctaaaatttggcaacgcttagatatcatgtcatcatattgggacgcttttattgcacgcaacgtgtgatcttgtttctcttggctttgtagctgtggatttcgtttatgcttttgggtaaatcagagatatgtgtgggcacatgaatgagttacattattattcacctgattccactttagctgaaaacattttactatgtacacgtaaaaag

SEQ ID NO: 27622 - DNA, 1923 bp, Zea Mays
ttaaaaaaatatctctaatatagatatttgcttatagaggacatgatttataggacgttgttggagaaaaaggagatatagaggatagaatattttagaaaagactatagatgacagatatagaaacggatatagagtacattgctggtctaacgatgtggctaggccgataacagaaaacctgacctgaacggctgtaggcaaaccagttgggtgacactgacagcaggggcgggcggggccgatggattttttgaatcggattaggcagccacccatttcaagccgaagagaggaggagagccaagcggcgactggacctggagagccggcatggcacgcctgctcctctccgtctcagtccccatgtccgctagcagcagccgccgcattgtggttcctggtaccgcgcggcaccgaggccgcagcggcgtctgtgtcgctgtgcccgccacctccaccgccaccgccacccaacaagaatttgaccccgcggcggcgccaccgttcgggctgggcgacatccgcgccgccatccccaagcactgctgggtgaaggacccctggcgctccatgggctacgtggtgcgcgacgtggtcctggtgctgggtctcgccgccgccgcggcgcgcctcgacagctggctcgtctggccgctctactgggcggcacagggcaccatgttctgggcgctcttcgtgctgggacacgactgcggccacggcagcttctccaacaaccccagactcaacagcgtggtcggtcacattctgcactcctccatccaccagaaccacggccacgtggacaaggacgagtcatggcatcccctccccgagcgtctgttcaagagcctggacagcgtcgtcctgatgctgcgcttcaggctgcccttccctatgctcgtctacccattctacctggccaacaggagccccggcaagtccggctcccatttccacccggccagcgacctcttccagcccagcgagagcaaacaagtgctcacctccacggcgtgctggctcgccatggtcgcactcctagctggcctcgccttcctcatgggccctctgcagatgctcaagctctacctggtcccctactgggtttttgtcatgtggctcgacttcgtcacctacctgcatcatcacggacacaatgacaagcttccatggtaccgaggaaaggaatggacctatcttcggggtggcctgacaacgctcgaccgggactacgggtggatcaacaacatccaccatgacattgggactcatgtcatccaccatctcttcccgcagatcccacactaccatctcatagaggcaacagaggcagccaagccggtgctgggaaattactacagagagccgcaaaagtctggccctctccccttgcatctacttggtgatctggttcagagcttgaggcgtgaccactatgtcagcgacacaggggatgtcgtctactaccaaactgaccccaccattagctgttctggtccattcacttgactaattgagggaggctggaagttatgcgaaacacaaggatcagaggctaccggagagatctgatctatgagccacacacttgcatataacaataagtcaatcattctttgggcaaaacaagctacagtacaatttccagtgctttactatcaggactcattagcacatgcttagctggtactgttgcaagaaagcaatgtgcagtacctccgcttattgctgtcctcacatatgcagtacattatttgcaaaatgtaagtggactacctgcgccttagatctctctgcaaaagttggagacatggggcttttcctgacaaatcatgtattgctgcttgatgacaaaatgagaatattctgacaaaataaataatgcatggaaatagaaaacgaggtaccaagtcttct

SEQ ID NO: 27623 - DNA, 4238 bp, Zea Mays
cacgccggccccacaagacccaagctgcaaaactatccagccaccattcacccctccgcactccgcctccgccgcctccctgccctcaactccacgcccggcagggtggccgctcgccggcagccaaaccctaggcgatcgcggaggccaaccacgcttcgggcgcgatcagccgccgccatgcagggcttccccggcggcgcccccgatccgcagcagctacaggccaccatgctcgccatcgagcaggcctgctccctcatccagctgcacatgaatccatctgaagcggaaaaagtgataacttcgctgcattcgtctctcatgccttatcaagtatgcagattcattcttgagacatcccaaaaaccaaatgcaagattccaagctgctggtgcaattggtgatgctgcggtaagggagtggggagttcttacagatgacaataaaaggagcctaataatatattgtttaaactatgttatggagcatgcaagttctcctgatggctatgtgcaatcgaaagtttccgctgtggcagctagattactgaaaagaggctgggttgagttttcggaccaagaaaaagcagctatcttctttgaggttgagcaatctatccggggcatccatgggcctaatcgacagtttgctgcaatcaatttcttggaaaccttggtttcagaattctccccttcaactgcttctgctatgagcctgcctaaggaatttcacgaacaatgtgaatactcactcgaagtgcagtttttgaaggatttttactgctgggcacaagctgctgtgttcaatactgctgacaaaatcttgaattcaactgtaacaataccggacgaaagagcatgttcagcagcattgcgcctgatgtttcagatactaagttggaatttcaaacatactgtggagcacgagagttcagatgctaagataaatttcggcttaaggattgatacgataaatctgaagaagtttgaacgttcgttggtgaagccagggtctatgtggagagagattctaatatcaagtggacaccctacctgggttttaaacttctataccaccttgcgccaaaagtactcatatgatacactgtggggtgattctccaattgctgtctcttgcagacagcttatagtgcagttatgctccttggcaggctctgtgtttcctaatgataatggggatgcacagattaaacaccttatgctgatattatctgctgttgttctatggattgaacctcctgatgtaatcacagcatcaatccgaaatgggggaagtgaaagtgagttcatagatggttgccatgccttgctttcaatcgcatctttaactactggctcactttttgacaacctcctaaaatctataaggccctatggtacagttaatctgctttctgctttgacgtcagaagctgtcaagtcggttctgaataaccagagtgaagaggaaacctggggcatagattcccttgatattttgttagaaacatggaatgttcttttgggggacgtagatgccgataaaaatccaatctcaaccgatggagcacttgcatcttcaagtttgtttaagatgattgtggagtcacacttgaaggctgctgctgattctgcgttcgaggatactgatgatactgaatattttcatgtttctgtttcaaaacgtgatgaacagttagccttgtatgctctaatagcacgggcttctgcaaatactactattccatttcttgcacagttgttttcagaacgatttgcccggctaaatcagagaaatggtgaaagtgatcctactcaaacactggaagagctctattggctgttgttggttactagtcatgtcctaactgactctggcgaaggagaaacactacttatccctgaagcattacaggctggattccctaatgtgattgaagcagcacatcatcctgttgttacactctcctggtctataataaatttttccaggcagtgtttagatccaggaattagggcaaaatacttcagtccacgactaatggaggctgtgatctggttcttggccagatgggttgcaacctatttagtgccacttgacgtgagtagaggaaaagtaagcagagaaattgataatgtgggtacaaatggatcccaacattccagaaaactgctaaacagttttgcttgggaaaataaccaaggagagcttgttcttgattttgttgttctcatttcaatgttagctcttactacctatcagggagaaaatgagttgcagacactgacatgccagaagctacttgctacagtcgttcgccggaaacacacatgcacttatcttgttcaactgaggtctctagcagaaacacttgcctctgcagcttcctgcatcaaagatcctgaagcatctgcacagtacctgagggatctcatgggaccagtggcagggtgcctggtagaaaatgctagcaggagtgatctaaaatctgtggcacagcaagcagatgttatttacatggtctgttgcctattggaacgactaagaggcgctgctagagctactcaaccccgaactcaaaaagttctatttgagatggctcatactgtgatgaacccacttttgactcttctggaggtctacaaaaatcattccacagtcgtatacatgatactcaagtttgtggtggactttgttgatggtcaagctgtattcctggatgctaaagagacatcagctttggtgagcttttgcttgcaactactccagatatactcctctcataacattgggaaggtaatgctctctctttcttcaagtctgcgtaatgagtcacaagcagaaaaatataaggatctgcgagctttgcttcgtcttctgacaaatatatgttcgaaggatttggttggctttctgtctgattgtggcggtgaaggttcacctgatatcgcagaggttatctacattggtcttgatattgtgacccccttgatatctttggatcttctgaaataccctaaacttagtcgtgattattttgtgcttatatcgcacttgttggaactgtacccggaaaaggttgctcacttaaatagtgatgcttttacaaggattattggaagtcttgacttcgggctccgtaatcaggatagcgatgttgttgagaggtgcctggcagcagtaaatgctcttgcttcatacaatttcaaagaaagattaggagggagaggaagactgaactcgcagctcatggaatctgaaggatctaatggcaaactgcaggaaagcatatcaagtcacttcttgagacttctgttgcaaatacttctttttgaagatttcagatcggagttagcaggttatgctgccgatgctttgcttcctttattgttctgtgaacaggagctatatcagaggttggtccatgagttgttggataaacagcagaatccgaccgtaaaatcaaggctggcaactgcgttccataaccttacaagttcaaacaatctctcaagctcactcgaccggccaaacaggcagagattcaggaaaaacctccttagcttcatggcggatgtatcgggcttcatgcagatcaagtagatgcgatggcagggaacaggtgatgtttgaccggtcaattaaaccccgaggaagcactgcaccactgtggtaggggtgcatgtgggcaccacatgtctgtggattgatgagagcgaagactgccacgacaagtctagtagatcttgaagagctagtgtcaccagaaaagacagggagatgagctagtcttagggttggcattcatagcgcatttgctggacaagatggaggcgtccctggccacgagatcgtcgtgtaaatgcgtttgttagacgcacagaaacggtggggattttgtggtggcgactcgttttgttcaattcccacaggcagaaggtagagatgttaagttgatgtaaataccgtttgatttaaacatgccttattcgtaggagaaagcgacacggcttgctgtaacttagggtttattactctttctcgtggcataggatccccaaagaagtctttgctggggtatttgcagccaaacgatgaccagtatgattgcgagaggttttcaatcttttgtaccaaatttggcctgcagttatgatgacactgagtgccgatacaggcatgaggcattccaaaattggcgggcaccacatgtgtctgtctgctgtctcagtggg

SEQ ID NO: 27624 - DNA, 1938 bp, Zea Mays
tgctgcgtgcgcaagcaagatggccaatggcagcggcagccactgctacggctacaccctgctgcgcgacccgcggcacaacaagggcctggccttctcggaggcggagcgcgacgcgcactacctccggggcctgctgccgccggcgctggcgtcgcaggagctgcaggagaagaagctcatgcagaacctgcgccggtacgagcagccgctgcaccgctacatcgccatgatggacctgcaggagcgcaacgagaggctcttctacaagctcctcatcgacaacgtcgaggagctgctccccgtcgtctacacgcccaccgtcggcgaggcatgccagaagtacggcagcatctaccgccgcccgcaggggctgtacatcagcctcagggacaagggcaagatcctcgaggtgctcaagaactggcccgagaggagcatccaggtcatcgtcgtcaccgacggcgagcgcatcctcggcctcggtgatctcggttgccaggggatgggaattcccgttggcaagctctccctctacactgccctcggaggtgttcgcccgtcagcttgcctgcccatcacaattgatgtcggcaccaacaacgaggccttgctcaaggacgagttctacatcggcctccgccagaggcgtgccaccggcgaggagtaccatgaacttcttgaagagttcatgaccgccgtcaagcaaaactacggcgagaaggtcctcacccagttcgaagacttcgccaaccacaacgcctttgacctgctcgagaagtacagggagagccatctcgtcttcaacgacgatatccagggaacagcatccgtggtcctcgctggcctcctggcggcgctcaaggtggtcggcgggacactggcggaccacacttacctgttcctcggcgccggcgaggccgggactggcattgccgagctcattgctctcgagatgtccaaacatactgggtctccgatcgaagagtgccgcccgaagatctggctgatggactccaagggcctgatcgtggcgtcacggaaggactcgctgcaggcgttcaagaagccatgggcgcacgagcacgagcccgtggcgaccctgctggaggccgtgcagtccctgaagccgacggtgctgatcggcacctcgggcaagggcggcaccttcaccaaggaggtggtggaggcgatggcgtcccagaacgagaagccggtcatcttcgcgctgtcgaacccgacctcgcactcggagtgcacggcggagcaggcctacacctggaccaagggccgcgcggtgttcgcgagcggcagccccttcgacagcgtggagctggacggcaaggtgctggtgccggggcagtccaacaacgcctacatcttcccggggttcggcctcggcgtcgtcatctccggcgccatccgcgtccgcgacgacatgctgctggccgcctcggaggcgctggcggagcaggtaaccgaggagcacttcgccaaggggctcatcttcccgcccttcaccaacatccgcgccatctccgcgcgcatcgccgccaaggtggctgccaaggcctacgagctcggcctcgccagccgcctgccacgccctgacgatctcgtcaagtacgctgagagctgcatgtacacccccatctaccgcagctaccggtaaggaaaggaccatggccggggcggcggcctgagcaaaaggaaaggaaacgggtaaattatgagtcagtgagtgaataaagggtcgatgcgatatttgttgcagctagaggagtgagtttacacatactttcatttctatacactgtatttctgtgtaccgtatacggcataccatacaacactactacatactcgtcagtcatttcaatacagttaatgtacctggttagaacgctatcactctatatttacctagagccatctcag

SEQ ID NO: 27625 - DNA, 1955 bp, Zea Mays
caaaagacaggagacccaaaagtacttcatagatgaatgtgacattttccacaagaacgagatacgaaatggccaaggactgctgacgatgatgacgacatggccaccatcgctgccctcagttgtcctcagggagataattgtacaaacttttggcatctcacatcaatttactccatccatgatgaatctgagcatgaatggtggtgccaaaaaacttgatgggaaatctatgacaatgctgtggagaaacagctacaatggcatgcaagccaagtttgctgcaaggcagatgccagatgattggcaggaaacaagtacacttttggctacattagagaagattgagtcttggatattttctcgcattgttgagacaatatggtggcaggcactaactcctcacatgcaaaaacgagtagaaggatcatcaactccaaaggctggtagagtgctatgtcctactttgggtgatcagcagtagggcaccttttctgttaacctgtggaaggctgcgtttcacgacgcattcaacagaatgtgccccctcagtgctggcggacatgagtgtggctgtttaccaatattagcaaaactggtgatggagcagtgtgtagcccgtttgaatgttgccatgtttaatgccatccttcgtgaatcatcaagtgagataccaacagactctatatctgacccaattgttgacccaaaagtcctaccaattccagttggtgatctaagctttgggtcaggcgcgcagctgaagaactctatcatgatgactttgaggacataggagatgttgaagacgaaagaagagttgcagctgaaacgaaatcgtttcaacttctcaatgagctaagtgatcatctattttttagtttttcataattttcctttcatggcctccttacatgtttgatttcctatgatccatgagctgccaatcatgataacgcggtttcactatgcaggagatgaacaaggatgcagtcacaactgatgctatcggcagtatcagaacttgatggtgcttgtagactgttcatggtgcttgtagggatgatgtatgtctatggcttactgagctccaaccaactatggcaggagcgttagctaggacagcagtcagtctaacaattgtggacaaagttcagtctaccatacactgaagcgcacccttgttgctaaagctgcaggtgtgaacaactttgctcagcagaatggaggatcattgtcactagcagcaagacctcgagcccagttaaccatcagtttctttccttctttctttgggccgagagagcaaagaaggatgatgcactttccaacctgtgtagcacgttgggacaactcaagaaatggcagtggatatggacatagaaattgacaggcaaaacaaagcgctggttcctttcagcgacgacatcactgaactgaattttagactgaaaggcgtgaatcagtgtggacaccagttgctgggcaagtgatatggagccagaattcgggcagttcggagactatcgccttgattgcagaatttaagaacattgttgttttacatgtttttttgcagtgaatcaggccacacatgttgtattagtgagagaatgatgatttattttatattattatggatttcatagattattttagttttccctgaactgcaattgtttcaataacataggaggggactaccttcaatgacatttaggtgaatttttaaggtatgtccattattccattatagagcacaaagcctacttcttacaactcactgtatgttttataattgtatcaaaagcactgaacaaacatagttagctatcacgttcactgttgtctaaatagattgaaataatgtggtgaagccgtcatggactcttaagtagcttagccactgcaaaggatacaattaattataaaacaccaatgaatcaataaaaaaa

SEQ ID NO: 27626 - DNA, 135 bp, Zea Mays
gatttggattctcgaggtaatccaggtttacactgcaccttcccgagacaagatcaggaggcaacacacccccactggtccaattggtgaccgcagaggatccgagacaagatcagaaggccaccggctgtcgca

SEQ ID NO: 27627 - DNA, 3587 bp, Zea Mays
cacgtttatttcatctctagggtctagagtttagtagcgccgccgccaacatccccgccgttgcgacaagcaccgaccgcttgcttccccctccctcctctcatcggcgccagcgagccgcacgccgtgtcgtgtgggtcggctacccgggtatcggcgccagcgagccctcgccccccatccccccgccaatctcggcgtcggcgcgtcgctcgccatcctcgcaggccacgcccatgccccccgcctccgtaacccctgtcatcggcgccagaaaccgctcccttcgcacgccgaccctagctcccagatccacattcgcctccgcctcagatccctacagcgtgatgcgagggaacaacaaccgcgcgacctccccatcctgagcacctcaaatccgatgcccctccccaagccattccctcggccgcgacagcgacgacaacgagcgtggcccccctctaccacctctgcctttccatttgtggcctccgcaccgccccaacgttgacccctccgtcctccccctctactcccagcgcagcgccgccgcgcctgcgctatcccacccgatggatgtgctgccgcctctgcagcacgccccgtcgctaccgaccccgcccagccatgcatttggagttcacaatatgaagacatggtttatccaccggacgacgaggatggtgcgtggatggcgagggaggacctccactggacctactccgcacctcttcctgtctaccgaggccgagcacatggagccaacgactacaaaatcataaggaggggagctgtttgagcggatgcccaccaggaacaatgtttcctagatcacgatgtttgggccacttttggaagaggtcagggatgacatgttttcaagcttggaggacatcaccaacgcaccatatgcagatctgctctctattaattcaatgaggaaaggaaaggggtcatagaaattagtcttggcagatggaggggaacgtctcaatgactgaggcacattttttcttgttagttagctcatggatttttatggtccaagaggagttgctgctatatgaatatgacaacacccattaatcaacataactatatgaatacaatctgaaaggaaggtcggtttggtcagaaacacatggaggtactgatggaggctatgaaacatataagagacatgccagtgaggagcaggagtagtttagtcggttcttgctttatgaagtggatgcaattagaaagacgtacgagcaggccaacatctcgcggtggctcgccctgggcaaccggacctgcccgaccacgatgcaggagctctgggacgacgccctcacccccaacgccactctctgacagctcatcgtcacctggttctcccgcctggttctgcattttgttttcttatctgtcaatcatgtttttccatattactgcaggcgggtctgattaattatttaaatgtagtttatcttagatactgtttgaacgtatgggatgttggaggacagaagacaatcatgtcttactggagaaaattctttgagcagactaatgggttagtttggtttgctgatagttcacacataaggaggcttgatgattgccgtgctgaactccacaatctcttgaaagaagaggataaaggtttacctatctagggagtgttctattgttgatccttactgtattgattttaacagagactagttggagcttcattgttgatttttgcaaataagcaagacatgcaaggagctctaaaaccaactggaatcgcgaaggtaagcgaacttcagtcatttattatatgcattagagacatgttttcctgtctgtgacatcatttttaacttgtactgtgttttttcggtcctcatggttgccaagattttacttagttcaatgtgggagcaaaaggatatgccaaattgaatgtagtttcatcagttatgctctattatggatgttcagaggcatccaatttcagtgtgtactgcaatacttgggtccacctagtcactctccgacagctcatcgccgcttggttctcccgccggtacacaaggtttaagaagcgctccgcggacttccacggccgcgctgccgatctcgtccacagcctccggggcacggcgatgcccaggagacaggccctcgaggaagagcaatgtagagaagagaaaggtatctcgactgttccaaagcacaagtatgcatccaaagcctgttccccaaaagacttaaacaatatgctgcatgaaaatctttactttattcacaacacacctgagatggactgggcttgggcagctaaccggttaattgagaaggttagccaactttgcgattctgctattttagttcttgtccatattggtccaagggatttatcttgatgctaaactaaattctggaataggatgaggcataaactccagacgatgctcctttaaattatttgccgcagaagaggctaattttgacaagccagttgatccagcaacttctccctgctataccagcgaccattttgagaggacaagctgtgtctacttacggaagtgcgacatacactctatcaatgttgacactaagggatgcatgcagcatggtagcatcattatcatcatcatataactcttgctcacctgtggaggatgaaaataacccatctgaacaaacaagtgctaagaaaatggaagacagagtatcaaaggttgtggaagtcttcgctggaagaatccagaagatggaaaatgactttataagtttgaacaagagggcctcgactaatcggacgactggacgattagtcgacctaatcgggtcggatgccctggtcgttccactaaaaccgactagaccgactaatcgcgattaatcgcgattagtcggacgacttgaaatcattgatcagtgattccctcacggttgtgtccttcacaaaggaaggatgtgaagccacactattatcaagcaacaaagccaaagttgtgtgacacaattataacaaaggaatcatcacccattagcacactaaaattggcgcatacagataacgcacctgcaaagtgggatcatttgaacatagttcagcaaagggccgacgcacttgagtcactcctcaagctctacgcaaagcttctggaggagaggctcgatgagctcgccgacgtttttcgaccatttggtgagagagctgtgtcatccggagagatgagcatacaatgatgtctgaccataagcctgatgactccaccgaagttttgagagtccccaacaatgcttttgtagcagcgattcgtttcaacatttttttgtttttcaaataccatttcgagagtgtaaataacttcaacggaattcaaaattgatgtacttaggtaggcctgagccctgtttatttttgatgtatatggtttgcatgtcaccaactgttgtgagcgatgattgattatttatcgtcttgttttatctgtctgtactcctttaatgcagcaccttcgtttgtcatgtgtcgtctcccctgtaagatgttgattaatattcattatatcattgtttattttttagcaatgaaaaag

SEQ ID NO: 27628 - DNA, 341 bp, Zea Mays
gtatctgccggtggagaggacgtcgaggcgcttctcgctcggctcgtaccgccccttgcgcagctggtaccggtgcgtcaccgccgacaccgtgtacgcctgcccctcgatcgtcacgctctcgccgcagtggatgttggtggggaagcagcggacgccgaggcaccgcggaggcggcgtgatctcgacgaccttgaaggggtgcttgtgctccttgccgtcccgctccctgtcccggccgtccctgttcttccttgtggtacgcgaaggaggtggacgcgaccatggccatggggggcggacactgctcgctcgctcgctcgattcctgctggtgcttga

SEQ ID NO: 27629 - DNA, 1390 bp, Zea Mays
gcgtggtcgcgcggaataaagcggacacgttgcgcccccagcgaagcccgcacgcatcgcattcgcatcgcatcgcaggtcgcatccgacgctagcggctagcctagccgaacagcctgagcgcgcgaagatggcgcccgccgacggcgagtcctccccgccgccgtgggtgccggtgtggacggccgcgtcgtgcgcgctcctggcgcacgtccgcaccgacgcgctccgggaggacgtcggcgaccagccgcaaacagggtggacgagccactgatctcccacccgggcctcgccagctaccgcgtccgtgacctcccagacggcgtcgtctccggcgacttcaactacgtcatcaacctcctcgtccaccgcatggggcagtgcctcccgcgctctgccgccgccgtggcactcaacacgttcccaggcctggacccgcccgacgtcaccgcggcgctcgcggagatcctgcccaactgcgtcccgttcggcccctaccacctcctcctcgccgaggacgacgccgacaccgccgcaccagccgacccgcacggctgcctcgcctggctgggccgccaacccgcgcgcggcgtcgcgtacgtcagcttcggcacggtggcgtgcccgcggcctgacgagctccgcgagctggcggccgggctggaggcctcggccgcgccgttcctgtggtcgctgcgcgaggactcgtggacgctcctcccgccgggtttccttgaccgcgccgcgggcaccgggtccgggctcgtggtgccctgggcgccgcaggtggccgtgctgcgccacccttccgtgggcgcgttcgtgacgcacgccgggtgggcgtcggtgctggagggcgtgtccagcggggtgcccatggcgtgccgccccttcttcggcgaccagcggatgaacgcgcggtccgtggcgcacgtgtgggggttcggcgccgcgttcgagggcgccatgacgagcgccggagtggccgcggccgtggaggagctgctgcgcggggaggaaggggcgcggatgagggcaagggccaaggagctgcaggccttggtggccgaggcgttcgggccaggcggtgagtgcaggaagaacttcgacaggttcgtcgagatagtctgtcgcgcgtgaaaggtcgtcttgctgttcagaggttttaccaacagaagaacataatttgtagttgatacatgagttgcagcagcagtaacagcctcctgtatcttggctttggatctgtattcctgtcaccagttgtctgaaagcatcaagaaccttctgtcttctagcagttgcctctccagattgacaaaatagcatttattataaggttttatgcaatgttttcagattgatccgattaatcgtgataagtcta

SEQ ID NO: 27630 - DNA, 2327 bp, Zea Mays
ccctaccccagttttctcttctcccctcgctctctccgtgtctccatctctgctaatctgtgcaactaatcatcatcgtctccagtctccctagtccctgctgccgctgccgcttgtcgctgacgccgtcgcgtatcctccgcatctaagctgccggcggcgaccaaacccgccccgcctctcctccgtccgcccccgcaccagctggttccctcccgtgaactcgcacgctcacaggttttataattgtttgcaaaagggctatagtacttgatgagatgaagtcaacagtgttttcaacagctgttgtttctattgggtatgcattgcttggatgggattttgcagcattatcagaagctaatcatcatatggaaaaagaatttgaattgttgaatggaccttctattgaagctggagaatcatgattggtgcaatctttgctccttccatcgtgtactttgctttgttggtttactacttgccagagtcacctaggtggcttgcaagtgatggaaagattagtgaggccagagtttctctgcagtggcttagaggaaagaaacatgatgtttcaggagagatagctgctattgtggaaggtgtggacatcatatcggactccactgttggcgctgctcgtgctcagagtttctctggaaccagtgctagccacacttggccccgtagtactttttattggcagctttcagacccactagttgatcttctcggaagcgttcatgagaatatgtcagaaggaggaagtagacggaatagtttcttcccagtcttcaacagtttttcttttccagagcatgaacatatgaatgaacacagggatggtaacagtgatcaacagactagggagacttattatgctggagaagctaataatggagatggtttaagggcttctctgctttctcaggcagcaagtgttgaagtaaatgatacaaatacctcttttacttctgaagggagctcttcatatttaagaaggcatggaacatcagtgcttgcacaagagtttatggcgtctatacatgattatgacattgaagaagaagaagaagaaatccatgggtttgcattgcctcaccagtctgcacctcgtgatatggaaagcaccgggagacatccattcagacatcaaatagtccggttatctgaaacagctgatatgaagtttaaatggcgggtgcttcttcaaccaggaatcaggcatgccttatgttatggcatgttaattcaagcccttcagcaatctacaggaatcagtggtcttctccgctgcgctcctgaaatatttgagcagtctggagtggctagtttgttttcagacattggactttctcctcattcaacatcaattctcatgagtacccttaatgctttgctgatactcccttgtataactgccgcaatgctgctgatggatgtctgcgggagaagggttattgtgctggccactactcctgtcctgatactatcattgagtgttatgtctatgtccaccctggtgaatatgggaccgttcgaaagtgccgtcctcttccacttcgcattaaccatttgcttctggtcctatgtcattggtttgggaccgataccaaacattctctgctccgagatattcccaaccaaggcccgtgcgacatgtgcaagtttctgttcgctttccttctggtttgggggcctgctttcagcgtactgcttcccggtgatgttgagcaccatcgggcttggcggagcgtgtgggatctatgcacttgtgtgctgcgctccgctttttctcgtctactatcgaataccagagacgaagatgcttaacctggagctcattgcggagctgttcaagctttcaaggcaggagcatgtacagtagattgtccaggaaccgaggtagcccaggctgagtgccgatggatggtgatgtgtgtacatatgacaaatgtaactttggatgctgaatttgtttttgctagttaggaggattggtgatagtgtacgaagtggtttactcttttgctgtccacaggttgctggcagtgtttgtagtgttttgtcttagggggaattcctgtactccactgtaattgtaatgtaccctataacttatttgtcatcgcaaatatcctaatgcaatttcttatccttccataccattgctagtggtatagaagggaccaggacatgcagttttcttatatttttttatgccgtcgccggtggcatggaaaggtaagaaattgcatccatccgagtgtcattacgagagattaggacatttgcgattggaaataaagtattagacaaaatttggc

SEQ ID NO: 27631 - DNA, 2025 bp, Zea Mays
ctagcggctataacccctaatcctaccagtaatccccaacatgcctcctaccagaagaaggagaccgcgggaccagcgcgccgggagatgggttacaaggcgacgccgcgccggaacgtactttgggctctcaacaatgccgaggccaacggcgggacgacgtctgtgccgcggatggaggcggcgcccatgattaagttcagtgggaggcaggatgtggagcgcctgctaaaatgaagggcaaaagcaagagcgatttcaaggggagaatcaatcagatgagcgtctacatcaagaagctcagggcgtgcatccggtgcagttgaagatagctaatcgacaatgcaaggtcaaggcctctaccggttgtaacagattgtttattgaatagaatgatagaatgattactttacaccgatgtcgctcctccacgagcccgcgcacgccgaggccgatcttcttttatggccaccgtgccccgcatcggaggtgccttaccctccgtcgcgcccgtggactggacgatgacttcgagtagaggcggcggtggctgcaacaatatctgcgatctacggtccacgcgacagcgacagaggccgaggggtcgcttgtacatcggcggaacctgttgctggaggagcttgcgtgtgaggtggggctctcgcccgaccggtggctctaggtgccgctgcccaaggtctggagtgtccgtgtcttcgcatgtatcggtgctgcctgatcgccgctcaattgagcgctagctaagcggtcttcatcgtggtcctcggtccacgcgacggcagcggaggctgaagggtcgctgctgcaccggcagaacctatcactagatgagatggcgggcgggtggggctctcccccgaccggcggctccgggtacagctgcccaaggccaggagtgtttgcgcttttgcctgcatcggcgccgcttgatcaccgcctcaatcgagcgccagctgtgctgccttgatcgctgccatgtaccctccgtgcctagaccccgcgtagtgcgggaagcctaggacacggggtacaccctttaacagatatccatctaagatgctcctgtctgcaattgatgagcttcacagaggaacttatgacttacctgccaattgatttcaagaacaaatgcaatgttggatacgcgttcgttaacatgatatcgtcggtgcacattatatcattctaccaggcttttaatggtaagaaatgggagaagttcaacatctagaaggtagcctcgttggcttatgctagaattcatggacggtctgcactgataagaggtgtcgcccgattctttttaatcccaatggttagtactctgaatcaggaagcatttccaatcaatggcatatgcatccacatgctttcgaaagatgattaccctgacaacgaagaagacgacaagggtctaaacgagaaggtaggagagagctcgaccgatatggctgagggtttgtgacgtctgatagcagacaggatcagaatggccatacatataaatctaactgtctagagagtatccacccccatattgtataaaaagcgtggaaagttgatggttagtgatgaattttgtggtctggtttggcatggcacatcttttggtttcagatgttgccccggaaatgaaagttgaagtgggagctaaagctgaagcgattagcttcgaactggagcttgtttgtcgaatcctccccctccccttctgttggtagtcgtgcttgtttttgcttgcttgctgaggggggtggaaccgctgctcctcatagtcttgtttgttattgcttgttataaaaaggtgaactgaactgaagaaaaaaaaaggttagccaaactgtacagtttagaacttttgtgcatattttgcattctggcgtcttaatgtgcagtgcagtaactgggccttgattatgcaaataattgatgtacacgttctttgcataattgtattcaaggtatctgaccaaaactcagaaagctgcacgcgtgctctctttt

SEQ ID NO: 27632 - DNA, 583 bp, Zea Mays
  misc_feature (583)..(583): n is a, c, g, or t
ctggttggcatccccactttcctcctagttcatttccctctattattggtggcctagtcgttgttggcttattgcccatcaattgtggtgaaattttgctaacttagaccagctctatgattctgagggatgttaatcttgcagttcatactaatgtttcttgcatcttggctttgggattctcctgagtttatgtattgctcagccttggtgtctccttatatactgttgattgttgctacatttttctggcaggaaatttgctaagcagtccaggcattttgtatcaagctcatcttaaccagcattcgaccagagtgcggaatgtccttttctcaactgcaacaagtggtgatcaggatgaaagcagtcaggcaaaggataagtaagtgcatttgtgtcttgttcatggtttttaaagcggtaaggcgaggcaaggcgttggacctccgcctggacgcctaggcgacgccttaagaacagtgattatgtttcatcctctatatataactaaatttgaactccttggttgttttgtatcttggaaccaggtatcagattagcccagttccttctaacatgn

SEQ ID NO: 27633 - DNA, 1648 bp, Zea Mays
ttttttttgaaacgaaacatacatgaaagtttgcctcctctcacacgacttgacttttttgccgctatatcttttccgcctaattttattatttttttaatcttccgtacgatatattgtatctatctgtgagctgaggcgtgactcctctcttcttccttcctttcttcctcctgctatttagacggttctcaccggagctatcgcctccctatcatctcaatatgttgtagtgagtttgcctctatcccgcccacctcaccgtcgttgtctccgccaccgccactgctcccaccactgccatgcattaacctcaacccttccgcaaactattcactgtcactttgtcatcggcgctccatcgttcactcaaatgtggtctccgatacctggcaccctcatgaggactagttcactccctgctgtcattgaggcttctggcaatgatgactggaagaaacgaaaggaagcacagagcctgaagaggctcgaggttaagaagaagaggattgagaggaggaactctctcgcctgcaacacttcaaaagaagctgctgggcagagtccaaaagagatgaatgcaaacactgacaaattagtaagttctgatgaaactattgtcagcgctaacgaaagtcatagcagtggcaagcatctggtgaaggggcttccaccaaagtaccaggccacaattacatcagaagacagttcgtcagcaatgcgaaagaagccaaactcggccttcaaagccatcactgaggagcagaactcatcatcgtctgttccttcctccggtgaagctataagtagcgtgacggcaccaagtctgcctctgttgtctttggtccccataacagcaacccttggttccagggaagaccaaagcattttaggcagggctggtgcaagggcaaacggcatgggggacgtggaaaggaggatgatgcaggagatgccgggcgtgttcaccaagggcctgtccaacggcagcagggtcgaaggcttcctgtacaaatacagcaaaggagaagtgaggatcgtatgcatctgccatggaagcttccttactccttcggagtttgtggagcacgccggcgccggcaaggtagataacccgctgcgacacattgtcgtcagcgctaccccgaacctgtgactgtgaggccaggcagacccgtgcacaagctatagtgttctgtagactcaggacctgagcctagcgtcagagcaatgtcaccgttagactgtgtggtgcggtgcttatgcccgattaaattggtgggcattgtggtaacataacctgttgataatgttttgacaatgttttgatccttcctatgcgtgatttagttctgcagcttcttcttctttttttcttttgtgttcctatcgtggtttcatacctgggcaagtagatttgtaggttagtgaggggcttgcggtgccactgtcccaatggccttgctctgggtgagctcgaagagaagttttttagactcatttgggcaagttttctacgtccaatatggtactgaagtttttgttgctggtttcgggtgttacaaagcagagtctgaactcttcgtgcttatgtgagatgaatacagactaagcatgcttgtgtttttataggaggccacctgtattc

SEQ ID NO: 27634 - DNA, 1402 bp, Zea Mays
cctggtctcgtcgccctaaccgcacccttccaatgacggggcgctagcgaagccgcgcatcctccctgcatctcaccggtcgtcaccctaaccgcgcccttccaacgacgaggtcgctaccgaagcgccgcgcatcctcctcgcatcttcgtcgctcctgcgccgcgccgaaatcctcccccaccgcgcccttccatcgacgaccatggcggactacccacgcgtcatgcacgccccgccctccgtgcctgtcctccggggccagcgcgctcccctcctcctcaccagactctgccgccgcgggtctggttgcccacctcaactccgaggaacgaggactccaccatgctcgctctagagacaccgccttcctgtcctccgctcaccgtgcttgtcctcggatccacgactgccgccccgctccccccaaataccactgatgcagggatccaagcccctgccatctattcagccgccccgacgtccacaggggataccaactgatgggccaccaaccatgttgttccacgctctgggctgctgctggaagctaatcaatcgcttggttagaccatcgcagattagcggtgggattcccaggttcaataatctcgtttcgggccatgccctcgatgtcattatctggcttgaggtttgtcgtggagaagcaaagggatgtttacatgtgctctattctaagtcttagggtctgggattaattgggcaagcatggagtattcgcttggttctactcaagaagggaatcaaggaattcaggactttatgcactgattgtaatagtccaacgaaagagcggatccacatgttaaaaatctcagcaagtgttcctttctgacagagtttcaacttatgtgttactaatgtagaagggatcccaattacttgctgcattgggtgatcgaacagtcatagtatggagtttaggaaacaggaaatgcattggtctcttgtttgggcatactgggagcgtgaggtcgttgccttgccattcctccaatccggagagaacaagaacttgactggaacatcaagataagcaagtgtaaatacccaccttgaaattgatgtggtctagctgttggaatgcggatcacgaaggtggtgtcttcactcttcagcatgttccagtgtcgtgtgttccagatcgggttgctatcgggagtctgttggtttgcatggaatcaatcaggtttagcttggattcatgaataattggtttgtgtcgtccggctgttcgagctacgtcatcatgattagaatctacatttttccctacgcttgtatttaaaatggagtttacaaagataatcgttagaatggaatcgaaggctcattttttgttctatctgataatagccgaacgaatgaaatgcaatttaaa

SEQ ID NO: 27635 - DNA, 781 bp, Zea Mays
accagagaacactcaagtctcccaactgcccgcctgccgaggttggatgtggctccaccagctctgcctccctacttcctctactgctgcggctactgctacatcatctatcgtgcctgtttttctaggaatcttaatggcatcaggctgacattttgttcaactcattagctggttacagtaacaaggaaccaccattttgatgcaaagatgcgacaggatcacaagtaggaggagctgcgacgatgctgtagcgagagacatgggtgccgaggtcgttgtgctgcggtggtggcaggacaggaaggaaacgaaaaagcaggagccagggttgttcaacaacgtgaccgagtcgctgaggcgaggaagagtaaggtgaaggcactcgtcgacgcctttgagactgacagagcgtcatctcgctgcaggaaaccagcaagcctgctgctgctccagctatgaaagtaggtgtcgtgccatgagtgcttcttgacctgcagtgtgcatgatcacctttcttggaattttaaactttttttggttgttagtgaccgtaaaagtggcgcttgttgaggtttgctcgttcccatgtaaactgacttttctcatgggagttttcatacttttgtagtgctagaaaaaggaaagtctgtacaggttttgtgtctatgcaaggcttgagaagttggcattgtactgataagtgataagtaaacaagttattgtaatgatttaaactagattgttttgaaaggaaatggaatgcataaagcaaattaaa

SEQ ID NO: 27636 - DNA, 146 bp, Zea Mays
cggcgagggaggtccggcgaagggtggggttggcttcgggaggtccttgcggccacgacgaggtacggctcgacgacgatgatggccggaattggctggtccacgtgcgcaggcggccgagctcatcggcggcgagtgctccggcc

SEQ ID NO: 27637 - DNA, 1278 bp, Zea Mays
ggaggctgaggcaatcagagcacaaggtgtcacagagacccggttggaactactgaagggtataagtggttcgtttaggccaggagtccttactgctcttatgggtgtcagtggtgctggcaagacaacactgatggatgtgttggctgggaggaagaccagtggatacattgtgggcaacattaccatatcaggttacccgaagaaacaagaaacttttgctcgtgtgtcaggatactgtgagcaaaatgatatccactcaccaaatgttaccgtctatgaatcccttgcattctccgcatggctcagattacctgctgatgttgattcctcaacaagaaagatgtttattgatgaggttatggagcttgtggagcttttacccttaaaagatgcattggtaggattgcctggtgtcagtggactatcaacagaacaaaggaaaaggctaaccatagctgttgagcttgttgctaatccttctataattttcatggatgaaccgacatctggacttgatgctcgagcagcagctattgtcatgagggcaataaggaatactgtggacacaggaagaacggttgtttgtaccattcaccaaccaagtatagatatatttgaatcttttgatgagctcttccttatgaaacgtggaggtgaagagatttatgtaggcccactagggatgcattcatgtgaactggtcaaatattttgagggcatcgaaggtgtcaacaagataaaagatggctacaacccctcgacatggatgctggaagtgactagtacaatgcaagagcagataactggtattaacttcagtgaagtatacaagaattcagaactgcacaggaggaataaaactttgataaaggagctaagcacgcctccagaaggttcaagtgacctatcctttccaaccgaatactcacaggctttcctcacacagtgtttggcttgcctgtggaagcaaagcatgtcatattggagaaaccctccatatactggtgtcaaatacttctacacgacagtgattgccctgttgtttggaacaatgttctggggtgtgggcagaaaaagggatagtcaacaggacctgttcaatgccattggttccatgtatgcctcggttattttcatgggagtacagaattctggttcagttcagccagttgtatcggttgagcgaacagtcttttacagggaaagggcggctcatatgtactcgccattgccgtatgccttgggacaggtggctcacttcagacagtaaaatcc

SEQ ID NO: 27638 - DNA, 1147 bp, Zea Mays
ggaaaaggtagccagtggcctgccagatcggaatttgctgtttacccttttgacctggcgaaatcgaatcagaataaaagaaagctctgcacttcgttcatcgagagcatccatagcaagaggaagcggctgaggttggctcgggtgagcaacatggcggagaagctgacgccggagcaggtggacgagtgcaaggaaatcttcgacctgttcgacgccgacgaggacggtcgcatcgccacgggtgagctcgtgacggcgctgcgctccctgggccagaacgtggacgaggcggaggcgcggcgcttcctggaggacgcgggcgtcgccgcgggcgccggcgacatcgacctcgcggcgttcctggccgtggcggcgcgcaagatgggcgccaggcagtcggaggcgcgcctcgccgagtgcttcgacgtgttcgacgacgcctgcagcgggtccatccccgcggagcagctgcggcaggtgatggtgagccacggcgaccggctcacggaggaggaggccgacgcgatgctccgcgaggccgacccgcgcggcgagggccgcgtcgagtacaaacactacgtcaaagtactgctcagggacaagaagtgatccggtgatccttcgcccgccggtggccacggccggccacgagtgggggaggaggatgtcaactcgatctgctctttgatcatgtgcgcgtcctagtcctagcaccgccgcttaattattatcacggcatcagatccagtagctagtggctaccgaattcttgaagttgacatcaccagttctgtattctggtttcgcttgtgttgagcgtgtaagatgtctgcgatcgcagctttcgagaccaactccgttcgccgtagactcatcgtcacccaaagcaccggcgccggcgtcttgttccgatgcgaaggcggcagcaggagagactgtcacttttctgctgggctggacgggcagcacgccacacgccacctcgcgtacaaggagagatagaagaaatgaccacattttttatgattttttgttgatagtcacgcgaaggtaggtagatgtcgaagtaatttttggcaacgatgtggtccaaaaaatcgaacggacggtgtcgccaatgtcttatcctactttgacctcaaac

SEQ ID NO: 27639 - DNA, 2292 bp, Zea Mays
ctacctgcccgccgccgccgccctgcgcgcgccccgccgccccaccgcgcgccacccagcacgccaccacccagcgcggcccgccctcaccaccccgcggccccgccgccgccgccagcgcctagccacgcgcgccccaccctcgccaccccgcggccccccgccgccgccagcgcctagccgtgcgcgccccgccgccccatcgcgcacctgctagcgcgccgcccagcacgtcgcccgccctcgccaccccaaccgccgccgcagccgccgcccgatgtgccctcgtgcacgagacctctcgaaccctctcagaaggcggtgcgatccggtttgggtcgccgtgccgagcccaatgtgcccgacgcgcgcgcggctgagtcaaagccgaaactggcgctcggagacgacgatgataggccgccccttgaggagaagcaccgctgcagcggtgagggcggattcatcttcctctgcgcccttgttggacacaccgaggctatcggtgggatttctatgccgtctggttcgaacaagctctactccggcagcgtcgacggatctgttcgcatctgggactacaattccggcaagtgtgttgatgtcatcaagatgggaggcaaggttagctgcatgatcacccatggcccatgggtactcattggaattccaaagtttgtggaggtgacattctgattctagtgagagtacacctttattttgtattatgtatggtgacattgaggggtgactttgcttggtacaaggcattgaacacaaagacagggatgaaactaagatttcaagggccttctagtctagtttgttccatggctatcacgaatgagatgttgtttgctggtactggagatggtcgcatcatggcctggagatttcctgctaaggatagtaacactgaaccagtgttgatcctcagtggccatcaacggccagtgatttcactgtctatcttggcaagaagactttactctggctcacttgacaagtccatcaaagtatggatttttcttcaagatattgctcaattggcagttagaagttatgctcattctgacacattcttcaattctctgtatttaccaggcatgggaccttacaactcggcaactctgtcagagtctggaaaccttcaagtcaaatatgcccatgccgaggagaatggtttgcgcacactcttcggcatgcaccgagttgggaagacaccagttctcttctgctccctccacaacagcaattgcgtccgcttgctcgacttgccatcgtgagtgcataaaaatttctatcagtttcatcatcagatagacaaaccgctcgctcagttaccatcgagctctgcatttgcctggttaccatctttcaggtttggcggtctgctgctacgcgtagcagctttgcatcgcgtgaatgattggcacgctggatgttgcaggctgcttgattttttttactgatttttttttttacttacgccatgattttaaatttgggagacagtttgaattgaatgtgttccctgcctggcagcagttcgttagatcacatgcccgtcgtctacctcaaaacagtctcatcttttggaccgttcaattcaacttacttagttcaaacccaaggaggacggagggagggagattcagttctgaaatgtttattctgttattagtttaatcgcagcttctggaacaacagctctgtgccttttccctgcttaaattaaacggcaacaaggtctcagagcacctgccatttttcctgaaaaattgtttgtttaatagatgagagctacatctagttgtaggtgtccgtaggcctcttctttctgaacagatccactagtgtggaacatgcagaaatgcaggctgccaagaggcaaacagttgctactggatcaccgaccccagggcgcactgcatgggttggcaagggaacagtaacagcactaatgataatctgcaaaatgaagacgcaaatgatgcttctaggtggccatatccctggtgctttgttctttgatgttgatggagtatccctagtgcataactgaaagtataatgcggatgttctaatgattcaatcttgtttctaggtggcccatatccctggtgctttgttctttgatgttgatggaatatccgacagaacatctagtttgctgtatctgctcttggcatctacaacaaagatgggatagtagtttatgatggaaaggggatgttcagtgctgcttgtgtttggtggttgagttttgatttacagaattgtctgtgtgct

SEQ ID NO: 27640 - DNA, 610 bp, Zea Mays
actgcagtattttttgttgaattaacctatactcacttcattttatttatataatacagtctatttagctaattttgtttgatgtccagtgacacgaccttgacagtcaagatgttcttttaggagatggtcccagttaccttacatggttctgttggacacaatgaagccatccagatatgctattaaaaatcctgctagtcattatggctttaaactgtaccacgtatgttctattttcagctaagcagagcatgttctatttacagcaggccagcagacaccaggcagtaaggtgatgtatgagtcaattatcagaacctttttggacacccaaatgtcgaaagatgcccattcctgaggaatatcaatggagctacaaccttttcccctcacttctgctttgccagtagctgctcaaagaggcaagggtccaatttttgaggaagggtcaggctttgagtcagcattcaagcttttctatggccgagatggaatagttcccctttgagaaagatcatatgtatctgatgaaaaccacaatttagagtacacttatgtatgagttatttgacaatgcttatttatgagatattgaatgttatttatc

SEQ ID NO: 27641 - DNA, 2290 bp, Zea Mays
gcttgctggacggggcaaccggcaaccccactctttacaaagtagggtaccctacaaagtatcaccaaatcccacaccattgccagtttggcaccctcctcaccccactacctcttcttcctccgcacagcgcacaagccgcggaagcagcgcagacccggcaaaatagtgatggctcagaagacgaaggaggcggagatcaccgagcaggattcgctgcttctaacaaggaatttgctccggattgccatatacaacatcagctacatcagaggcctattccatgagaagtacttcagtgataagtcggttccagcactagagatgaagattaagaagctgatgccaatggatgctgagtcaaggagactaattgattggatggagaaaggtgtctatgatgctttgcaaaagaaatatctcaagaccctcctcttctgtatctgcgagaaggaggagggcccaatgattgaggagtatgccttctcatttagctaccccaacaccagtaccgaggaagttgcgatgaacatgagccgtacggggagcaaaaagggcagtactacattcacttcaaatgcttcagaagtaactcctgatcagatgagaagctctgcttgtaagatgatcagaacgctggtttcacttatgagaaccttggacccaatgcctgaggagcgaaccattctaatgaagcttctatactatgatgatgtcacacccgaggattatgagcctcctttcttcaagtgttgtgctgataatgaggccataagtatatggaacaagaaccccttgaagatggaagtgggcaatgtcaatagcaagcaccttgtgttagctttgaaggtcaagagtgtccttgatccatgcgatgatgacaatgttaacagcgaaggtgatggcatgactgtggataatgagtctgatcatgatgatgacttttctgacactgaggttcatccaccaaaggcggatcattacatcatagctcctaatgaaggaaaagacaaagatcaggacactggtactatttcagaagatgatactcaagatactgctcatgaggaagagctaacttcccaagtgaaggagtggatatgctcaagggacagcggaacaattaatgtttcagatgtcctttctaacttccctgacatatcaatggaattggttgaagatataatggacaggctacttaaagatggtatactatccagggcaagcaaagatggttatacggttaaccagaaggctgatccaaaaacaccacatataaagaaggaggccatcatgccagatgtatcaccaactaatgtaaccaaacacaacaatggggatctgctatatatgaaggcattatatcatgcacttcccatggattatgtgacaatagccaaacttcaaggaaagctggatggggaagccagccaaaatacagtccgaaagttgattgacaagatggtgcaagatggatatgtgaagaattcagccaaccgaagactgggcaaagctgtcattcattctgaatctaccaacaaaaggctccttgagataaaaaagatactggaagtcaatgaaggcgaaaagatggccattgacaccaatacagagcatcctgagcctgagcacaaagaccttctgagagtctatgaagtgggagatggctccactatgggttgcctccactcaattggatctgatcttactcgtactcgggagctgccagagctgcaacagaatgtgtccatgcagagcgggcaagaagcttccacagtgggtaaggattccagcaggactccaacaagtgtgcgtgagctggctgtacctgtttgttccctggaaagtggagtgcttggaaagagaatcaaaaggtctctaactggtggaaatgagatgcagtctacccaggacaagcgatccaggaaggctagcatggtgaaggaagcaatactccaacatgtcaagtgccaaaaccctcaggctcagtgaggtggggtgacaggagtagctaaccatagttcaggtccttgtgcaggcagacaaataaacaagtacaacagtcaccgcagaagtagcttccactccctatgttttgcaaggtagagagttccacaatgtagattgcagtcccaatgttttgcaaggtagtaaaagttatacgcatctgttagcctatcgatctggtgatgaacattttcttctacaaagtcaaaagatgttttattgacacggaaattggacatataaagcttctgttgaatgcatgatagttcaatagattatggat

SEQ ID NO: 27642 - DNA, 995 bp, Zea Mays
cggaaggcaagtggaggctcaagatgtatctacagctgctgtagcgaaggaatcattggaagggcattgcatctacgatggtggctactgcacatggtgacaagagcagagactatacaattccagctggcgtaatccaaggggtgccacctggtgtacaagctacatcctctgggtggcaaggtaacgttcaagcagctggggcatatgctgccccacccggtgccccttcgcaaagccacggtgccaatggacatgtgcagaactggaatcccggcaactcagtctatcccccagccccaggaccaggaatatatccaggccagatgtactcatctccctcacagtatgcagcgtcagggggcttccctaataccccatccactgctccgccacactatgcagcatcagggggcttccctaacaccccactcccagctcttcctggtgctcctacacaacagttgcacgcttcgcagcagatgctgcctcagcatggaaatcagtcgggaggcgcatccggaactagccaaccggcgccaccagcatcatactaccgttgagttgaaatcttcttttgctattgtacttaacctgttttgtcactgagtttgttattcatcatctaaaactgcaacactgttgtccgtagctgtgtttagatgatgttgggggagaacaacaacatagcaacatgattatattggtggttcttcctctcctaagattgggaaaggagaagatattgcgagtgtttcatattggtggagtttgaaacattgttgctggagatagttttacataagcaaacataatcttcagttataaaggaatataagagccattgctattcatgaacataagcttcagtgtcatcattgtatattcgggatctctctgatggcacgaatacaatagcaagcgcagactcaaatgattgatcctgccgtctatttataggatgtagcatttatataatagcaagcacagtttta

SEQ ID NO: 27643 - DNA, 2405 bp, Zea Mays
gcacaagcaaaggcgggggagagagctccgtgcagtcaccgtcgtgttcggaacgagcgagagagcgggagacgagtcgcggcgcctctgctgtgctgtcttcttctccccctctgctctgcttcggctcctcacgcggcctcgccgagacccgcagaaaaacagttggaagaacttattctcatacatagggcctggatttctcgtctcaattgcatatattgatcctggaaactttgagacggatctacaggctggagcacagtacaaatatgagcttctttggatcatacttgttgcatcctgtgctgctcttattattcaatcacttgcagccaggctaggggttgtgacagggaaacatcttgcagagcattgcagggctgagtatcccaaggtcacaaattttgtcttatggattcttgcagaacttgctgttgttgcatgtgacattcctgaagtaattggaactgcttttgctctaaacatgctgttcagaatcccagtatggtgtggtgttctaataactggactcagcactctaatgctcttattgctgcagcaatatggggtccgtaagctagaatttctgattgcatttctggtgttcttaatagcaacatgtttcttagttgaacttgggtattctaaaccaaatgctccagaagttgttaggggcctttttgttcctgaacttaaaggaaatggagctacaggccttgctatctcattacttggtgctatggtgatgccgcacaatctttttctgcactcagcattagtattgtcaagaaaagtgccacggtctgttcatgggattaaggaggcctgcagattctatacgattgaaagtgcatttgcccttacagttgcttttctcatcaacatatctatcatatctgtcagtggttctgtctgtggttcaggtaatttaaacccagaagatcaagcaaattgcagtgatctggacctaaataaggcttcatttttgttaaagaatgtccttggaaactggagctcaaagttgtttgcagttgctttgttggcatctggtcagagttctacaattacggggacatatgctggacaatatgtcatgcaggtttttggaacttataccttatttcagttctagttcgcaagttgaatggcaggttgttttatgatgcatattactcgaggcatttgatgttgatcagaagtaatcaagcatttgcttgcttgcaacattagtttgtttagctgttagatatgaaaagtacagaaaataaattagtacataactcttagatttgcaatgaacaagcttgggcttatgagtttcagtgccaacctccaaggttctcttggtcagctagattgcagagaaaaaggacagatacggggggtttttagatcttcggatgaaaccctggatacgcaatcttgtcacgaggtccttggctatcctgccaagtttgatcgtgtcaattattggtggttcttcagcagctggccagttgattatcattgcatcgatgatactgtcatttgaactcccttttgctttagttccactccttaaattcaccagcagcaaaacaaagatggggcagcatacaaattcaatattcactgctgtgctgacatggatgatcggctcgtttattgttgtcatcaacacctactttctgataacaagctttgtgaaattgctcgtccagagcgggctgaccaccatttctcaagtattttccggtattttcgggtttttgggcatgctgatttacatagttgcgatcctatacctcgtctttaggaggaacaggaagtccacccagccattgctggagagcgatgctgagcttgcagtatcgggtagcagtgctgatgccggagcagaatgctcgctgggccatttgccccgtgaggacatctccagcatgcaacttccgcagcagcgttcagcttctgatctagattagataacagctgccaggaaaataaatgttttttttgttttttatatagtatagtaattacagaatagggtacgtcaggtattggcttctgttcatcctactgatgatgcttaaggaatgtatacaagaggacggatatctatgctgccaaacaaaaaaatggggcacaaaagaatttagtgcctgtttttgggaagtgatgtgaactgaatcctggaaggggcaaaaaaaaaaaatgttggaatccaattgttgaaaattcttcattctaaacatgaggccgttggtaaaaaatgtctacatgctgtaaacatactatattttgacattattatcacagttaatatatactggacatgctgttttatgtgttgtgcattccagtggctgcaggccttgctcagagctagtttggtgattagagaaatggagaagttctatgta

SEQ ID NO: 27644 - DNA, 3121 bp, Zea Mays
tcccgaatcgatatatagccgaacacgaaccggcagtcctcaaatacagttgctgcaccgcaaccccgcgccaaagccagcgcggccaaacgacgtgacgaccaaacgaagcaaccaggcgccgaaaaggatagccgaagtgcgaaacccaacagcaaggagaaggcgaggggaaaaaagaaagaaaaggcgcatcgaaaaggtatctaacagatcagctacaaaaggttcatgttgtcaatgaagctaataaggaatttgtgattgaagcattgcgatcaattgcggaacttatgatatacggtgaccagcatgatgctttgttttttgaatattttatggagaaacagatcatgggtgagtttgctcgtgttctaaggatctcaaagctgtcaagagtgtcactccaattgctacagacaatgagtatcatgatccaaaatctgagaaatgaacattcaatttattacatttttagcaatgagcacatcaacttcttggttacgtacccattcgattttcgaattgatgagatgttatcgtactacatatcttttctgcgggcgataagtgggaagttgaacaagaatacaatttctttgctcgtgaagacgaaaaatgatgaggtcacttcctttcctctttatgttgaggccttaaagtttgcttttcacgaggatagcatgattcgagttgctatacgtaccttgacactcaatgtctatcacgttggagatgaatctgttaacagatttgtttcccgcacgcctttatcagattatttttcagacatggttcagcattttcagaagcagtgcattgacttggataagttggttgcacgctcctcacgaaagggaaattcttctgtgccaatatcttctattgaagatgcaattgtgcaaattgaagacacactgtattatttcagtgatgttatgtcttctggtattcctgatcttgaaaggttcatcactgaaaatatcttgcgagttctggtatttcgattcttactcccgtcactgcagaggcagagcacagatttggacttaagtgtcactacatccatgtatctactttgttgtatactacacatttttaagaataaggatatggcaagtactgtagctgctgccctttttcatcaacctgatggccctgatgataggaagcaaaggacacctaatggatatacatctgagcatgatagttgcaaatctgagaatcattgcaccactgcctctggtatcgagcaatcaagtgaggagccaaattctttgtcttctgttagttggaaacacttgcccaacaattcatcgcgaagtgattgctgccaaggaaacacaccaagggaacacttgctgtcctatatcacagaaggagatgattcacaagctttgggttcattgtgcttattcgctacattattgcagacgaaagaacttgatgaatcaatgctggatgcccttggaatcctccctcaaagaaagcagcataagaaacttctattacaagctttagtaggtgaagaccttgctgaaacacaattattttcgtcaagcagcagtctaactgatgacagcatttgtagtgattttgatatttatgtaaggaagcttcaggataaatatgggctacaatgtcaccatccacggcaaatgacttccaaagctcacagatatcaggtgctcgatgctttagtcgaccttttctgcaggtcaaaggtttctgcagatgttcgtttggttggtggctggcttttccggcaactgctgccccatggagaggaagagttcactgcttttcatctaagacgactaaaggattcacacaaggattgtagctcaaagctttctgaggaatctggaggatgctggtgtgacatgcttcttcctattgttaaagaagcttggaggaactgcaagaaaggcatcttcgccaccaaaaggatccaaatctattattgtacccatggatttgtgttcatttgaaggtgattcttctgttgccatcgcagaggcactctatgagatggttaagggttttgtgctgcagcatcaagttatactcttctgtcttggagaaactttcacagagctacctcctatttaccctctggttgatttgcctataaatactagggcaagcgctgcagattttggtggttcagttcctaaacctgggcttgaagtcaacttagtcgacgctgttccttgtcgaatagcatttgagaggggcaaagaacggcacttctgctttttagccatagctcatggaacttctggttggattcttcttctagaagaattacctctaaaacgggaacgaggaattgtccgtgtcatggcacctttggcaggatctgatccaagaatagatacaaagcatgggaagtggttacatctacgcattcgcccttcttcggtcccttttttggacactgagaagcataaagcgaagacaaagaagtatcttgttgatgggagatggacccttgcttttagggacgagcagtcctgtaaggttgcagagagtatggttattgaagagatgaaactccaacgaggtgctgttgcagagcaattgaagccattggttgaatttgacatgcctgaggatggaatgcagcacccccagacttcacatgaaaccccttctgatgatggatcatgactaaattttcatcaagtgcagtgttgagcttctcaattaaggagacatggcaacagatggccgcaaaagtgccgcattgaacatttcaagcatgctggcaggaaaacccaccatggcaagtcatcgacaattctgtacattacattgggagattagagatgtctccttgttaacacacaactgtagagtttcgggccgtcctgagttgaactagctggataggattctttgtacaatagtttgtttctctccttgcccgttgtaaccttatatatcacatcaaaacccattctttgttaagtttcagggcacagttgtgttgtgcacacgaaatgtttaaagaaatttgcagttagtcatacctgttgtcaaagcaagccttgcctatgtggtaataaaatgtcagatcgataatttttcttggaaatatgaatgttcatggactgtt

SEQ ID NO: 27645 - DNA, 1593 bp, Zea Mays
aacgagccgagccgagccagctcgtttccttaacgagccagctcgagctcggtcgagccgagccgagtggctcgatatccaccccgataatcacgtaaattcttttttgtgcgtgcattggcgatagcgctgcctcctctttgtagctgctacctgctagttctcacgtcactgtagtctgtaacgtcgtcttcttactccccctatccgacgccgggacaggaatcagcttcccctccatgctccggctggagcaatatctccggttgctgccggcgaccagccacgctacagcgcccgcgttgatctcgggttactctttcctctccagtcctctccctcgcctcagtgccctccggctagcccgctcgcggcctcccccgctcaggggcaaaacgtcgagccccgtgcgcgcctcggcggagccggattctacggtaaagcgcgcgcccgagatggcccagagggaggtggcgcgggtggtcgcggatcaggcggtggcgcgtttgggcgcgcggctgctgccgtccgccgtgcctgccgacgtcgtcgagtttcgcaacgccgccgggaacgccgtcggctcgctcgacgtgcaacggggctctcctggctcgtcgattgatttcatgctgcagtcctcgcttcactgtgaagtcccgaacggtgccattgacatcacctcaattctcattttcctgaacgcctcgacggacgcaccacatttcctactggagctcatacaaggcagctcaacttcaatggtggtgattctggacctgcttccacggaaagacctcgcgtttcacccggactacctgcagaagtactacgaggaaactggaatggatgagcagcgcagaaagatcgaggagctaccgcaggctcgtccatacagatctccgtcactcttcgtgcgcagcgcatgctcgcctacagcaataatggtgagcattgactgtggacaagggggtgagaaagccttggaagagataatacatggacagttagcaaaggtcattcaggaggctcttcagacttggcttgacaactgtgttgattccaccatagagatggatgaggcggagagggactgcctgctcaagagggaccggattgtaaggtcgaaatcgatagaggttgacctgactgcaaaccttcccaggatgtttggtccggatgtgtctagtcgggtcataactgaaatccgcaaggcctttggtgtacaagagccgtaagtcgttcataaatacaagcatgtagttactttattgtagagaaaaattgttgtgagtccatgaaacccccttatttgaacaatcgaaagtatatgtgctaaataaaaaaaaaaacagagagagagggactaactccaaacatatcgtgctgcagctgcagatcggccgggagacgaattacggcatgcagaatcctaacaatcacgaactggaacagaaacaaacagattggatgtgcaataaccccgccagaaggagatgaagcaagaacaagacagcataatagatatgccacgaaaaagcacggctccattccagttccaaacgtgcggtggtggagaggcggacctggaag

SEQ ID NO: 27646 - DNA, 2297 bp, Zea Mays
ttggttctgtcgatgcagctcatcaattccattcccagctccggaaaatcgagaaatttcgattggttatttgatttgatttgattctggccgtgccgaaccctagcttccatctcggtccaatctcagttccacatattgttactcctcggcagcagaggaggccgtcgtggaatgagttgaggatgacggcatactactcgtgctcctaggaaaggtcagggaaaggaagaattcgagccatggaggacgaggcggacggcggcggcgaatccttcgtgctgcgctccggcgtccgcgcgggcctcaagcgcgaattcgccttcgccatcgcctcgcaggccgtcctttcgtcctcatacgcacccctgggccgcacccgccgctcatcccgcatcctcaacccatcggccgcttcgaccccctccgtcgccggcgccgccgtctcgacatcctcctcctcaacccccgacacaaagccaaaagccaagcgcccgcgcccaccagatcctccccctccccctcccttcccccctccaccagactatgcccctgcccccggagaagaccatgacggggccgctgtcggccccgtgctcgccttgatggctgctgctgggcccagccctccgccgacgcctttgactccgcaaccccatgccgacgcggatgcggatcccgcacacctcgccaacatcatcattccgccggagtcgtcgcccaggcgcatcacgcgctccatgctccagcccaagtctcgccttcctaccgccgctcgttctcctgacaatgcggcaccgctcaaaccaaaactggaaccgccggaagaggaggatggcaagccggttccagcgttgaggcgcttcaccagatcactactggtcaaggacaaggacagcaacgacgacgacctctcaggcaccaccaccgccagcaatgcctcctccccttcgcccaaaaccaacaccacaagtaccagcaggagcagcaacaaggggaataagaatacaaacaagattcccaccaacctcagggagctgctcgccaccggcatgctcgaaggtcagcccgtcaagtacatcatgaggaaaggcaagcgagcggtactccggggagttatcaaacgcattggcatattgtgttcatgctcttcatgcaaaggccgaaaagttgtttcaccttactactttgaggtgcatgctgggagtaccaaaaagcatccatcagactacattttcctggaaaatggaaataatctgcatgatgtgttgagggcatgtacaaatgctacattagacatgttggagcctgcaatacgaaaggcaataggcccagcacctcaggagagaatattcagatgcaaatcatgcaaaagttcattcagtacactccgcagtgggaaatttgctttgttttgtgattcgtgtcttgagtccaagggagctaagaataatatcagttcatccaaagttgggcgaagtcaaacttcatctgccaaggtatataagagtgcatcaccaggagcaaagtcttcaagtgtaggaaggcttacaagaaaggataagggtatgcataaggtcgttttcatgagtggcattttaccagagggcactgatgttggttactatgttggtggaaagaggttactggatggatatataaaggaacttgggatctactgtcattgctgcagcacagtggttagtccttcacagtttgaaggtcatgctggtcgagctgctcgacgcaaaccttaccacaacatatatatgtcaaacggcgtttcactacatgagctgtcaatttcactcttgaaaggtcaaaagatgtcaaacagacaaagtgatgacttgtgcagcatttgttcagatggtgggcaactactcctttgtgatacctgtccaagagcttttcatagagaatgtgttggcttatcttctgccacaaagggaacttggtgttgccgatattgtgagaatagacaacagagggaaagttgtttggcatataacaacaatgcaatagctgctgggagagttgaaggagttgatgccttggaacaaatattcacgcggtcgatacgtattgctacaacacttgagactggatttggtggttgcgcactgtgcaaagaaaatttggcaaacttctcatcaagtaatgatatttgttgaataagctggttaatgaatcggaagctcaatgttcgagcgctaaatctctttacccatttcgaactctctgattacttttgcataaatgttagtttcattaatcttactttaagctttatttgc

SEQ ID NO: 27647 - DNA, 819 bp, Zea Mays
atgggcccatgttggccacgcaaggcacgcacgcatgagacacaggagtacagccgtacaggacacagccgccgcctgttcgtgttccttcctgtgcgagtcggcgaacggcgaggcgtctccggagtccggactgcggctgtggacagcgactctgtgacggcgactcggcgaagccccaagctgccaagcccccaggtgctggttggaatggcaagtacagcatgctttgtgattgtcagtaagaatgacatcccaatctatgaggcagaagttggatctgcacccaaaaaagaagatttgtcttatcaccatcagtttattctgcatgctgcattagatgttgttcaggatctagcatggacaacaaatgcaatattcatgctgcttcatgactcgcgtagcgaggatggaataaaaagcttttttcaagaggtccatgaactttacatcaagatattcctcaacccgctttacctgcccggctctcgcatcacatcctctcatttcgataccaaggtgagggcgctcgcgaggaggtacctgtaatacgggcatatgctggggtttcatcgtaaagcaggcacgccgatttttttgtgccatcatcatctgataacacatacgtctaatttttcttggcgttggctttgttatgaccgacctatggatcattttttttttcgagaacaaaatgacttgtctaatttttcttggcgttggctttgttatgaccgacctatggatcatttttttttcgagaacaaaatgacttggcgataatgttcaaactttaattgattgtgtcgtgcatcgcag

SEQ ID NO: 27648 - DNA, 2658 bp, Zea Mays
agtttttcgtttgggaggagagggagggaaggaaggaatcagattggcgcagatgaggctggagggagaagggaggccagatcagttcaccagtcgacgaagcaagcggcaggaggaggcggactagggagtggttggcgcgtcgccgtcgcgagccagtgagctgcctaggagcgctcctttttagtcgctgcgacgcccgcgcctgcgtaggcgccgtgtgctcctgccggccgcactgagcgtggcgagctctgggccagactcgagcgatcttatcaggtagttcattgtatttcgccattcgtttttccattctttttgacgtccctgtgtgagacgatgctgtttgttcggccccggcgagcggagcggtgggagaggtatacgagatttgtgttgattcccccctcccccacagttttctcgatccatctcgctgaaacttggccgcgggtagatatcgtgtcgtcttgttcagatcgctggtttcccctcgacctcgacgtatattgggatgcttctattccacgcaaccgtgcgatcttgttgctcttggctctgtggccgtggattccatttctgcgtttggggaaagttcttttggctgctcactttgcgctgcacggcagcagtgtgaaggacttggttcttcagctactctagcgctttgatttgcttggggttactaacgattaagtgaatgaatcaagctgcggcatctgggaaagaattgatggcatctgggaaaaaattgatggcactaatcgaatctttctgttcgtgttcatcattaacccagtagattcgtttgtatctaccttctgccagtctactaggactacttagatagtttgattatttctgtataaaactcgtactatcttttatttaacacggaaataaacaatttgcttcttttctattaagaatagtttttcttctaccctattatcttcctgtttatcgctggctgatacgcgatgcactgtgcctttaattctgcttaatctggggaaactgacaacgatttgtaccagaggacacagattatcagctgattgtcacggaagatgtcgctagccaagaaagaagaggtttgcagtcaccgacttgtaccgcgcttggacgagcctgcggttggtgtgcctattaagaagaggccatttttcttgtctgaccgatcggttgcatctgccataccgctctcgacaaagcccccatctccaacgaatacaatgcctgttgctgctacagggtcaggctgccgcgaggaacccttcttcaacatcgctaactcagacagaaaagtcatcaccaaagacagtgctacaaggacgtctgcacccgatgatgaattgcaacttcaaaattttttggctctggatttacagttaccatctcgtcaaagtggcaaaaataataactatagctctcttaggaaggatgagaaactgggccagagtcgttcggaacactacaataacgttcctgttgcaaatgaaatcaatgcttctgggaatagtattgttgggagattgcctaacttggatctgaatatacctccggacccagctgattcacttgaaggtttgcctaaaatgcatgaaagtgggagtgggttctatcatcatagaacaattcaacatcagaaagctcaggtgaccccagccgcagccatttctacgataaacagtgggataggtcgaaatatgtgcagtactctgaacatgtctaattcatatgggctttctcataagtctggaccagctgatgttaccttagatttacaacttaaaccaccaactagacctgagctagggataaactggaaaggacttgctcctgctccagaactgagtctctctctatttggtaagcctatggacgagcctgagtttcctagcacccccaatgccttatttcattctggaactgctggaagttccaaaaaggtcagtggggaggctgctgctacacttgggtcagataaggcaccagttgagaagattgtaacacctgttccctgcaatgtaaatcctctgaatactacatcagcaactgtttctggaattgatcagctgccatctaataatttggtgaagaaagaacctgaagaaatatcccagcagcatattattgacggcgctaaaaagccaaatccattagaacgacaaagtgttggacaagttatcggttgtgctgaatctgaaaagacggacagtgcaccccaaggtgctcgtaaaattgggtttgatttgaattctgacatctttgcaaatagtagtatccataatgagtctgatgtagcagcagttgatgccccaataccagctaaaactttacctgatacttgccatgatacgagcatgcctgctgttcctgaagtagacaaatttgtgaagcatgaagaatccacaagtgccaccctcagtcctgttgtggaaacaggaaatggtcatactacactgttggtggaagcaaaatcacagcgttcgcaaggtaatgttgctagccctgctgttgggttatctgaatcctccagccagcccaccgtttctactgtttgcaagccaacagccggccatattcgtgctgatgaggatacgaggcagaggtcttgtgatactaatgaatcttgcggtgcattaccaagtt

SEQ ID NO: 27649 - DNA, 1291 bp, Zea Mays
cgacaaccaggcgtgggccgtgggcgcgtcgccgggcacggccaggtcgcctccgcagcaagccaagccaagccagcccaaccaaaacccgacggacggacacgcacggacataccagaacaaggcaagcgaacacatttctttcctttctatctccccccaccgctctcgctctcctcctcgctctagccgcgaccacgcgacgccgtgggcacacgcacaagcacacggacccccctcccccctacccgctgcctccgccgcggctcgccggagatggatggctccggcagctgggacgctatagactggaaccaaatcgaggatccgaggccgcggaggtcgggccaggccgtcaaggagagcatggacgacttcttgctcgaggacgaggaggtgctcgcgcagggccatggagttgttctactaaacaaccgtgatgctggtacactttcagttacaaatttccgtcttctctttgtgagccaagcaaaaaaatgtgtcatagagctgggtaccattccactgacgacaattgagaagctaaatgacgatgtgaaactccaacccttgccccacctctctgataagaaccacccccgtgaacttcttcaagtaattggcaaagacatgagaatcattgtgtttgcttttatccccagaacacagcagaaaaatgaagtgtttgatgctttgaggagatacactaaacctgctaatttgtgggatctatatgcattttcttgtgatccatccaccattaagcatgattctgagccaaagtggcgtctcttgagggaatactttcgtctttttaggagaagtttaccgctacagggagtcgaggaagtttctttgtgtaatgaatggtggaggctaactagagttaattctagttattcattgtgttcaacttacccctctgaactcattgtaccaagaagcataagtgatgaagatttatttcaagcctccccatttcgatcaggcaagcgcttgcctgttatttcatggtgtgaccctgggtctggagctgttctggcaaggtcatctcagccgatggtggggttgatgatgaactttagaaacaatgcggatgagaagcttgtctgtgctctcagcagcagaaccatcgatgagaaaggatctccaaggaaattgtacataattgatgcccggccaagagcaaatgctatagcaaatggggcaaagggagggggctcagaatcatcttctaactaccataaatctgagcaagagaagaacatatttgctgtctttaatccactgg

SEQ ID NO: 27650 - DNA, 2433 bp, Zea Mays
ctcagtaaagtgatgtttgatgcaggttcccctcgtcctgctccacataaaagtaacagtacttctgcaccaagccatggatatcctggtagtactgcacctgcacctgtacgtttgcctccgccaaaaggaaagggagaaggaaattttgctcatgctccaaaccatcccaatcaataccattcaacgtcatattctccaggatcagctctaccacctgcgcatccacctgacattcctgcatttagaaagcccaagattttggcaccagcgcctagtcaatcgctgctacctccaccaacaaattcatactgcacgacgccctgctcagatcctctgaccaatagtcctccaggaatgacatgcctctgtgtgttgccaataaaagttgagcttcgctttggtatagcattgtacacattctttacacttgtccccgaacttgcacaagatattgcatcgggagtgttcatgaatcaaagtcaagttcgtgttatgggggcaaatgctgcacctgatgaccctgaaaagacaatagtctttattgatcttgtgccactgggaccaaaatttgacaatgcgacggcattttcagtatttgaaaggttttgtaataagcaggtcatcataaatcataatcattttggaaagtatgacgtgttgtatgttctctaccaaggccttcctccgtcaccaccggcagcaagcatgaacaatggtcttagcaatgtaaatggtccaagtttgcatccgcttgctgctgatgtgggaaattatagagaaagaaaaggtcctgtttctgcaatggttgggaacaggctagaaagcagacctatttcggcatcaccatccttcagctcaagtttggtggcatataaaggatctgccaaaacatttaacctggttgagatggagagagctacactaggatttgatgagtccagaattattggtgagggtggttttgggcgtgtctatgaaggtattcttgaggatggagaacgggttgctatcaaggttttaaagcgggacgatcaacaaggtacccgggagtttttggctgaggtcgagatgcttagccgattgcatcataggaacttggttaagctgataggtatatgcacagaggggcatagccgatgtttggtttatgagcttgttccgaatggcagtgtggaatctcacttgcatggatcagataagggagctgctcagtttgattggaacgctaggctcaaaattgcacttggtgcagcacgcgcacttgcatatttgcatgaggattcaagtccacgtgtcatacaccgtgatttcaagtccagtaacatcttattggaacatgacttcaccccaaaggtgtcagactttggcttagcaaggacagctttgggtgagggaaacgagcatatttcaactcgtgtcatgggaacttttgggtatcttgctcctgaatatgcaatgactggccatcttctagtaaagagtgatgtttacagctacggtgttgttcttcttgagcttcttacagggaggaaaccggtagatatgttaagacctcctggacaggaaaacttagtggcatgggctggttctcttctgacaagcagggatggtctggaatcaatcatagatcattcacttgggcgcagcattccatttgacagcatcgcaaaagtagcagccattgcttctatgtgtgttcagcctgaggtggaccagcgcccattcatgggtgaagtagttcaagctctaaagctggtatgcaatgaaggcggcgagttcaatgagtcaacctttagccaagatttgcatatccaagatgtcgaggttatgagtagagcaagtacggatgtagacgttgacccaacgctatctgctgagctgttcacttcatcagcgcgttatgatgctatagatgcccctggttctttccgaagatactcaagttcaggtcctctaagagtagggagaactggactgaacaaagagaggggcctgtcaacaggcagctcaagtgaacacgttgggctacagaggtttaggattgatggagaatagtcagcctgcaagcagctcatgatgatgtgcgcatggaagaaatacacattggattattttcttccaagccagatttcatactcatcgtgaatagtatgtggaaaattgagaaaggcgtaaaaatcagtgtgccactgttcggtgctcccgtcgccttctttggaaagctcaaacaagacttcacacgaatttttgtacagttctagagatgatagatgcttttaggaaagaaggggtgtacacgagtttttcagctgtaattccccacgaaccgtattacgtttcgccgtagcatcagtgcaaatcaattaaagggcgtgcacgcagtcaccattttgagttcaatgaaaaaaaattcatcctgattgaccgcaa

SEQ ID NO: 27651 - DNA, 1662 bp, Zea Mays
gtcgggccggggatttgtttaatggtgcccgcggctagggttgttaagttggtcctctgatcggggcttcggcttctggcgatctgaggtctgaccatggccgcgccggggtcagcgatcaagcacaccttttcttctctcctgaagcaaaaaccaccaaagactagtcctacaaaatctaggggttctatggctgtttcaatgagggaggtggatcctgtttttcaaggtgcaggtcaaaaagatggattggaaatatggcggattgaaaagttacaggctgttcctgttcccaaggaatcatatgggaaatttttcacaggagattcctacatagtactgaagacaactgcccttaagaatggttcttttcgtcatgatatccattattggcttggcaaagataccagtcaggatgaagctggtacagctgcaattaagactgtggaactcgatgctgcccttggtggaagagctgtccaataccgtgaaatacagggaaatgagactgagaaatttctttcatactttaagccgtgtattataccagaggaaggtggtgttgcatctggtttcaggcatactgaagtaaatgagcgggagcataaaacacgattatttgtctgcagaggaaagcatactgttcatgttaaagaggttccttttgcacgagcatcactcaaccatgatgacatatttattttagatacaaaatctaagatattccaattcaatggatcaaattcaagtattcaggagagggctaaagcacttgaggttgtgcaacatcttaaagatacaaaccatgaaggaaaatgtgaagttgcggcagttgaggatggaaagttgatggcagatgctgatgctggtgaattctggggtctctttggcggatttgctcctttaccaagaaagacattttctgaactcaacgggaaagattctacttccacttcaaaattgctttgtgtaaacaagggccaatttgcccctattgattgcgaaattctaaaaagggagctattagattcaacaaaatgttacctactagactgtggttctgaaatttatgtctggatgggtagagaaacaactcttgaagaaaggaaacgaggcggctcagctgctgaggaattactacgtgaaggaaaccggcaaaaatctcatattattcggctcatggaaggatttgagactgtcacattcaaatcaaagtttgataaatggcccaagaaagctgatgcagttgtgtcggatgaaagcagaggaaaagtggcagctcttcttaagcgacaaggatttaatttcaaggatccagcaaaagctgctcctgtaaagcaagagcctcaacctcagattgattgcactggcaacttacaggtttggcgcgtaaatggcagtgataagactttcctttcgttttctgagcaatgcaagttttatagtggagactgctatatctttcaatacacctaccctggatatattggagatgaatgtcttattggtacctggtttgggaagaagagtgtccaggtaactgtttaatgcattttctatttgctgtattgcacatatgattgatacattgccatgaatcttactcaacgtctcattatttagtgcatgtttgtactttatcaacaatgtgctttgtgttgt

SEQ ID NO: 27652 - DNA, 1897 bp, Zea Mays
cagggttcacatcattatggcataagctaattgtcacagatggtttaaccatggctacattgtctgtatttttcttgtgacaagtatatgaaggctccttcagatattttgaactcatgaaacgttggatgctcattgttgatttggaagaagaggaagatgaggttgttaggatgaggaacactcctgatttctttaataagatagttgatagcatatgtcctaccgtctttggtcatcaagaaattaagagggcagtgcttcttatgcttttgggtggtgttcataagataacacatgaagggatcaaccttagaggtgacatcaatgtctgtattgttggtgacccaagctgcgcaaagtctcagttcctaaaatatactgctggtattgttccaagatctgtttacacgtcagggaagtcatcatctgctgctggtctgacagcaactgttgctaaagaaccggagactggtgaattctgtattgaggctggtgccctgatgttagctgataatggcatttgttgtatcgatgaatttgataaaatggacatcaaggatcaggtcgctatacatgaagcaatggaacagcaaacaattagcataaccaaagcaggaatacaggcaactttgaatgcacgaacatcaattttagctgcagcaaatccgaccgggggccgttatgacaagtcaaaaccacttaagtacaacgtggcattgcccccagctatcctttcaagatttgatctcgtctacatcatgattgatgaacctgatgaaaacaccgactaccacattgctcatcacattgtaagagtccatcagaaacgtgaagaagcacttgcccctgcatttagcactgcacaactgaagcgttatatatcttttgcgaagtctttgaaacctcagctgagttcagaagcaaagaaagttctggtggagtcgtatgttaccctccgtagaggggacagtactcctggaactagggttgcttacaggatgacagttcggcaattggaagcattgattcggctgtcagaagctattgctcgaagccatttagaaagagttgttctcccagctcatgtccgcctggcagttaaattgctcaagacatcaatcatcagtgttgagtcaagtgaagttgatctctctgactttcaagatgctgaagatggaacaaacgtaccttctgagaatgatgctggacagccagctgaagaaggtgctgctcctcaacagcaggatgcagaaaatgaccaagcagcgggataacggtaagaagaaattggtaataactgaagaacacttccagagagttactcaagctttggttatgagactaaggcagcatgaagagtcagtcaagaaagatggagatggtatggctggcatgaaacaaggggatcttatcatttggtatgttgagcagcagaatgccaaaggcgcatatagttctaccgcggaggtgaaggaagaagtgaagtgtatcaaggccattatagagagactcatacagcgggaaggccatcttatagtcattgacgaaggcacagcggctactgccgaagatggcagtcgctcaagaacatcagagagcagaatattggcagttaacccgaactatgttattgattagcaacagcatcgtaacatgctactaactcaattcagctgatctgtttaactaacagaagctataatttgggtgatgtgtctgttgtgccctagcattgttgtatcatctccgtgactgatgtcattgcaagggatcacatgatctccaaaactatataattcgtacagtattttgctttcttaagttcacccttttgggtccatttaagggctttcgtttcatcgttaatacatggggattggatggtattgagtcg

SEQ ID NO: 27653 - DNA, 2898 bp, Zea Mays
agcatgcgaatactgctggagttggcctaacccaacgaccagacgcaacacgacggcgacggccatggcttcgccggacctcgccgccggcgacggcagctacgactttcaccttcgctctctctccgcggcctcacgggactccgctgcggcctccgaccccgcctctgaccccaacctcctccaatctgagggtgtgcgagatgtgccgaacggcgaaggaagcgaaggacgagatggtggcgcgggcgttccccgtgatgggcaagctatttcagcgatgcgccgccgctcccacgcaggccgttgcctccaccggcgtgctgctcctcaccattttgcaattcttcttggattttggggaggctgttttgcatgatgctgatggtagcttgaaaaccttcttccgctcttgcttaaggagtttgcagatcctattgttgcagagcgcacagttgaattccttgtaacaaacaagacaaagatccttagctcctttcccaatttgattccacaggtgccaacacttgaaatatttacttacttggaattgacaattcccacatgtagctcctattattcatgctgttgcagatcattgctttgaaaaactgaaagatataaatccagcttccttctttgttttatagcatatttgtcaattttttatgtgaatggtgggggaggcccctacatgtatttcttcactaacagaagcaaagaaatatttacaatacaggaggctgtaggccaaaaaggtagagaaaaaacagaaaaaaccatatttgtatgataagctactcaaccaatcttttgtaagattctttatagaatatctctcttctcttcctattttccatattcgacttaatcttgttaacacatgccaatgcttgtgtatccttgtttatacacagttctatccattgttgttaaagcttattgcatcaaacggtgagaggtatgtgctcgtattgtcatgaacttcacatagctctatcatccatgttccctttaaatgactcagtacaggtaccataaatatccaatagcaatcccgttgaactacctaatttgttttctaacattctagactggagaataagttttcggaagtacttccattaatgatgtcagcaggatcttttcttcccctcttcctatcccttatggatttgccaatgttggtggtggcactggaaaaggtggaaagaagttctggaactcttattggtagtagtatagctacaatccagaagagcgctgctcctgagatgcttcttgcactgatggacgaggcatatactggttctgccgtagaagaacctagtggtaattcaggttctgatgatagtggtcccctagaccttactgacccaatgttcttagaccttctaaaagatgagaatgatggcattgccgcaaaacattggatatcccctacgatatcttcaacgttacaagcagcatttaacagcccacagtcggacagattgaaacagtcactggaaatggcacctcgctttcttactttatattttgcaacagcattgcgagacgttaatgactcactgctgtgtgctcttattccagtagttatgtcaagatatgctgcaatgttcccagacaaagttttctctttcaaggtgagggaaaggctttcagacttcattttggctgcattccagcggtctcccaacatcattgcagtactgaagaaacctattactgacagacttggtgaggctcatgataatcttgccaagacagagttagcattgcacttgtgctgggccattggtgagcatggagctggaggggtgggtcacaaggatgtagctcgtgaactatttgaaaatttggagttattattgtatgaaaacctggcaactagccgtttgggattaagccaagagccaggatctgattccatgggtgcatcatctagaaagtcatcccaagccaggcttctctgctttgtggtgactgctattgcaaaattagcaacatgccacagtgagttgcttccgagggcacgcgtgtcattgggtcgctcgttcccgaacctcagacaggagggtctggcaacgggcctgtgactatttagggctcatgaatgaaccagccatctgtttatctgtactgggaccgtccaccgcccaaggaaatggtcctggtattgtgaattggagtgaaggaggaacaaagatggtagctcatgttcctttttaccttttagcccagcaaaaaggtccaccgtctcataatttttcatttgccgacctcctcccaacagaatgaagaaaatatctgcatgagtgcattggtgcaggcatgatttctctagcagaaggccatataacgattttgttttgaagatccaagttcctttttaaaaaaggggctggtctgaacattcaggcttatttctctagcataatactcataaagagtcctgtacttttaggtcttgttcggttattcctataatacatggattgatggaattaaaaaaaatttagaagaactttgacttgcttaggaattcaacacatctaatcccactcaatccatatggattgagagctaatcgaacaagtcttacatggttgactatgcactcgagttatggaatgtatggtattacatttctaagtggtggatcgtagtgtaaaaaatgtacacgtctgaatttgttcgaaatgacaagtatctgttttgtttgaaatgacacgtctgaacttggcatagaagtgcatgaaaaatagaaggtcgaaaggttacattctttcgaaaacagcaggaatattaggccatggctctataagtaaactaactgagaatttaaaagctgcaaaatagcagtgaagacactcagcaataacgcaagtatgcaag

SEQ ID NO: 27654 - DNA, 143 bp, Zea Mays
cctgaatgaaatgcattatgcatatgaatgcatataaagaacaataacactagatattatgatgctacgcaaaagagaaataacctatttaatgatgaaacattacgtacactagttatcgatatattgttacttacgacaat

SEQ ID NO: 27655 - DNA, 2918 bp, Zea Mays
acccccgtcctcagtcacgccgcacctaacccttcgtcagtttcagtttggcacctccgaagcttccgtccgaatctctgctgcctccttcctcggccaggcttgcgggcgatggcggcggagcagaccgccgagcagttccggggccaggcgcggctgccccacttcgcgtccccgcggcgctacgacctgcgcctcacgcccgacctccccgcctgcgtcttcactggctcggtggcggtttccatcggcgtggccgcgcccacccgcttcctcgtactcaacgcagccgagctcgacgtcgcgaccgggggcgtcagcttcgcgcctcagggctccgaccaggtgctacaacctttggaggttaccaacgtgccagaagatgagatcctgattattcgcttcaatgaggtgctttctatcggggagggaactttgacgattgcattcaaggggactttgaatgataagatgcatggattctacagaagtgtgtatgagcttaatggagagaagaaaaacatggctgtaacacagtttgaaccagctgatgcaaggcgctgcttcccttgttgggatgagcctgctttcaaggctgttttcaaaattactctagaagttccttctgagacgattgctctgtcaaatatgccagtaattgaagagaaggtactagggtattttgctgtgccataccccctccccaaaatggacatggttgctattccagattttgcagctggagccatggagaactatggcttggttacataccgtgaaacagcattgctatttgatgagatgcactctgcagctgccaataagcaacgggttgcagttgttgtagctcatgaattagctcatcaatggtttggaaatcttgtcacaatggaatggtggacacatctgtggcttaatgagggctttgcgacttgggtgtcttacttagctgcagatcagttctttcctgaatggaatgtttggactcagtttctagaggaatctacagtaggtttcaagttggatgctcttgcaggttcacatccaattgaggtggacataaatcatgttgatgaaatagatgagatatttgatgctataagctataggaaaggagcttctgtcattcgtatgctgcaaaactatcttggggctgaggtctttcagaattctttggctgcatacatcaaaagatttgcgtattcaaatgcaaagactgaggacttatgggctgcccttgaagaggggtctggtgaaccagttagaacattaatgcattcatggaccaaacagcaaggttatcctgtcattaatgtgaaactcaaggatggaaagttccaactggagcagacacaatttctttcaagtggatctacaggagttgggcaatgggttgttcccatcacactatgttgttgttcctactcgcgccaagcgaagttcctttttcatgggaaacaagaagattttgatttgtcagcgtccgggtttacggactgccaaaagaaagatggcttctggattaaacttaatgtcaaccagactagcttctatagggtgagctatgatgaggaacttgcagcccgacttcgatatgcaattgaaaccaacaaactgggtgcagcagacagatatggcgtacttgatgatgcctatgccctctgtatggctggcaaacaaaagctagtctccttgctgcatttgatttctgtgtacaaggatgagactgagtatactgtgcttgcacacataatcacgacaagtctgcacattgccgagatgatggttattgctgctccagaggagttggttcatctgaagaagttcctaattgatttcctggagccatttgcgctgaaacttggctgggatgctaagagtgacgagggccatctgaacgctttgttaagaggtacactcttaaccgctcttgcagaacttggccatgaggctaccataaatgaagctgttcgtcgatttaatgtctttctggaagacagagagacaccactcctccctcccgatgttcgaaaggcagcatatgttgctttgatgcagacagtgagcaaatcaaacaaaactggctatgaatcactactgaggatatatagggaaaccgatctaagccaggagaaagttcgttctttggcatcatcccctgaccatgatgttgtccgtgaagtattgaatttcatattgtcacctgaggtgaggaatcaggacgcaatatttttgctaagaggggtgagttcaggggcacacgaggtagcatggcaatggctgaagtttcaggaaaactgggattacatattgggagcctactctggaactctgctcacctatttcgtcaacataactgtctcgccactggccaccgatgaacatggtgatgaggcggaggagtttttcaagagcagaaccaaggcgaacatcgcgaggactgtgaggcagagcatcgagagggtgaggatcaatgcccaatgggtcaagaacatcaaggccgaggctgacctcggcaatgttctcaagaagctggcttacaagcactgatcagagacggtccactttcatttctgtgttaatcctagtaccgagatgtaactttgttctctggaataagtggattaataaagggcactttcgtttgtgtgtcgtcctgagctgccttgtccgtagattcttacaaactgttctgtgcgaaagctaccatgatagatatgcgtcgaattgattgattctatatcctgataattgattgtgtatcgcccatgtcgcacaggagaacggtaaatttgttccaatgattgtctgactgcgagttggcttccaaacctgcacttcatcattattttagggtctgactctattactccctccgtttcgttttagttgtcgctggatagtgtaaaattaaacta

SEQ ID NO: 27656 - DNA, 1075 bp, Zea Mays
actactctactcggctgacgactgacgttccattcccgctccattcgtcgtcgcccttcgctccccctcctcccgaaatcccagagcggcctccttcgcaggcccgtacagcctgcgggggggccggtagagtagcctccaaggtcgccgactcgtcgtagttcctgctgtttcgtgcgtgacaccggagcgagccggaggggggaggaggaggcatggaggcgggagggaggaggctggcggcgggcagggtggaggcgagccccgagcgcggcaggccggcggcgtacgcgtcggcggggaggccggcgccggcgaggcccatgcggagggtgcagatcatctactacctctgccgcaacgggcagctggagcacccgcacttcatggagctcgcgcagcacccgcaccagccccttcgcctcaaagatgtcatggacaggctgacgctgctgaggggcaagggcatgccggctctcttctcgtggtcctgcaagaggaactacaagaacgggtacgtgtggaacgacctgtcggagaacgacgtgatctacccgtcggacggcgtggagtacgtgctcaagggctccgagatcttccctggctgctcttcttccggagctgtaggcccggcggcgttgctggtggtgccgccatcggcgaggaggccatggatgaaggcgacggaggggtcaggggaagatgcatcccggggaggaaaaagccgccgccgcagcagcagcagcagaaatagcgcatttggctcatccttctttatgtgtaaacgcaaatcttgatctgaagacaagcgtagctttgtttagcattttcaattttcaaacatgccgttgtcgtggaggccatgcaggcagcaagtacttagctgtgtctaagtgttgaaaacttgaaatcacgttgagcactacacttgtcttcttttaacgagtgcgggacgctgtaggcccgaggggccggtggccccacgtgcgactggaagcgatgcatgatgctgtcattcactgttggatcctgtcgtgcactgtgctttcctgacggctagctgacgcaccggcca

SEQ ID NO: 27657 - DNA, 2839 bp, Zea Mays
gggccactcatttcgctttcggcctttggccaccaccatgcaagaagcgtcacgaatcatgagccaagggaccgacggggaggttgccggcgttgtaaacagccatgacgacaaggaccatgtccatggcacgatcagacgcgtggccgaagccgattccgagaaagacgaagtgcatggtggtggccaggagccaatattctttcagtgccttgatcaggagcaaccccccgatccggtgcatttggaggacgctagggtcgaatttccctccgacgaggatggtgacggtgatgacgtccgcgtctcctttgcaaccgccgatggtgatcgcctcctcgaggagcaggcggagctggacctggacgtggaggaggagcaagaggacacatccaggtatgactacgttacgtggatggcgccggagcccgtgtccatccacgagcgccgccgccggctgctccaggggatgggcctcacgagcagcaaggacctcctccgcagccggaacgcgagggcgaggcttccgcctgacatccctcgctacgtaccccggagacagcagcagctacccgcggccgaagcgccgagcacaacgagggccgcgccggccgtggccgcggcacttcccgagttcgcggaacaccaccctaacgacgccgtcttgacccggtcatgctccgacagccgtctcgtcgtccgcggaggcggcgtaaggaagatgcaaccgttccgccgcgtgtgctcgctgccgcactctctgcaaggatcgccagcccacaaggcactcagcgcggctgcccggtgtccgttatcatcagcgccgtcaaaggacggaggaactagcaaaaccactgccggtgacacgggtggtggtgggttcaggaacccgaacaacgacagggaattccaggcgaacagccaattgaacagtgctcagcgcagtgctccgctgaacaaagacgagctcgagcagttcatcagccacgctccgctcgtgacgcagcccgtgcgccgcagccagagccagccggtgccgggggctggaacggccaagggcgacgaaaaaccggctgagaagagaagaacacggtggctgaggaacatcaagctcgtcgcgtctgctgccgggctcagaaacgacaaggacggcggcggcggcagcagatcggcccggacgccttcggtgaccatgtccaagtcggcttcgaccaccgctgccatgtcgtcggccgccacgggccccgagcggctcaaggtgcaccactacggcaagtccagcagggagctgaccgggctgtacatgcggcaggaggtgcgcgcgcacgagggctcgatatggagcatcaagttcagccccgacggccggttcctcgccagcggcggagaggacagcgtggtgcgcgtctgggaggttctggacgtggacgcctcctcgtccgccgtggcgcatgagatggagatgtccacctccctgcctccgcagccgccgcctgcatccaccgacggcggcaggtcggtggcagcgccctggctggcagcgcagctgtccaggaaggtgaggagggggaggagcagcaaggacgcgctcccggagcacgtcatcgtgccggagtccgttttcgcgctcgccgagcagccgtcgtgcgctttggagggccaccaggatgacgtgctcgatctgtcgtggtccaagtcccagttcaatccagcggacgatggctacttcatcagcggctcgctggactgcaaggtgcgcatctggagcgtaccagaccggcaggtcgtcgactggagcgacctcaacgacatggtcaccgcggcgtgctacaccccagacggccaggctgcgattattggttcgcacagggggagctgccgattctacaagacaacagattgtaagcttaaccaggaggcacaaatcgacatgagcataacgaagaaacgcaggtcccaggccaagaagatcaccggattccattttgcgccggggaacccgtcagagatcttggttacatcggcggactcgcagataagggtgttcaacggcatcagcgtcctccagaaattcaaaggcttcaagaacaccagcagccagatctcggcgtcctacaccgccgacggccgctacgtcgtgtgcgccagcgaggactccaacgtctacgtgtggcgccgcgtccccggcagcgtcggcggcacgggcggtgccagcatcagcgtcagggccaagacgtggctcaccagccggtcctacgagtacttcttctgccgagacgtgtctgtggccgtgccgtggcccggttcgccgtgcatcccgtgcgacgcgtcccggcgcgtcaacggcaacggcaacagcgacacgcccaggagacagacctcgtcgcgccgcgacgacgacgtcgttggcgctggctgcgtaccgcgggggaccatgtccgggacgatggcgtaccatggggggcagttgttgcagccggagctgtcccgtcgtgagtcacagtcgtccgctcggtggcacggcggcgctgagggcggcaacgcgtggggtatggtcttggtgaccgcgagccgtggcggtgagattcgggtgtaccagaacttcggcctgcctttgaccaatctcttccactagctagaaaggatagccagagtttgctggtgctgtctcgtttctggtctaatatttccaaaggaatagattttgcagatgagctgatgtacaggctgatataccagaagaacattttcaggaaaaaaatagacgggaaggatagaagtgcagtgtaaacccctatacctgagagtagaaaatttgcgtggcattatatttgataac

SEQ ID NO: 27658 - DNA, 2519 bp, Zea Mays
aattctccttgtctctctcactctctctgtctgtgggaggaagttgagaaggcgaggagccagacaagcgacgcggctccactcccttctcaggcggccccctgctgctcaccgcccagctccagttattagagaaataagggtcggcttggttgcccgaggcctacccagcgcctgcgatggaggagaaggctatggcaaatggagcagcgactgctgatgttgctgctcctgataataaggataacaccaaggaagaggctagcgagagcaaggaaccagcagccaatcaggatgccgatgaccagaacaaaggcttggaaaatggcgccgagggccagtcaggtggagatgtcaatatggcagatgctgaggtcacagaggaaggcgatggtgatcctggtgttgcaaagcaggtggattctgaagatatcaaaacggatgccgatacaaaggaagatggcaatgcaaaggcagaagaagttgaggatgtcaagatgactgaggctgacacgggaagtacagaggtcaaagataaagaagagaagggagatgaagttgtggacacaactgtggataagcaggatgaatcgaaggagcaagaggaaggtgtttcggctgagcaagatgagaagcaaggagaggaagcagaagaaaaaggaaaagaaatggatgccgatgagaagcaagaagaggaagcagaagaaaaaggttctgctgatgagaaagatgaagatgaaggtgaccagaagatggaagagaataaggaggagactccgaagaataagaaagcaaggagtgccagggatagaagccagggaaatgataataaacatgatggatcaaaatctagggaagccaaaagtttgctgaacaccccaagcccatatggtaccgatcgtcctcaacgtgagaggaaaatagtggagaggttggttgaggtgattgagaaagagccaaacaggaatttcgtggttgagaagggacgagggactcctctgaaggatataccaagtgtggcacacagaatatcaaggaagaaaccttctgatcttaaatttcttcacagtattctttttgggaggaaaggcaaggctgtcgattttaaaggacatatactccagttctctggatttgtttggcatgaaagtgatgaaaagcacagagtcaaggcaaaagaaaagcttgacaagtgtgtaaaagaaacgctgttggacctttgttggacccttggcattccaactccaaaagcaaacattagaaaggaagatattgtgtcaaagctgttggactttattgctgaacctcactctgcagctgattctgggctctctgatgaccagaaatttatcaatgacagcacttctagtaaaaggcagaaaaaagcgctcgagtatgatactgatgaggatgaatccatgaagtcagacagtgaggaaaacagagatgaagattcagatgaagctggtgacaaacaggaaggtgactatgtatctgggaaagaaaaggcagggaagttctcagaggtaaaagaatcttcaggcaaaaagaaggcaaacacagggagtggccaccaatcaggtcctccaaagaaaattatcagaagtccggtaaaaaaagtatcatccaagattcatgaggaaaaagaaagccccaataatagtgcaaaggttttttctaggaagaagaaacccacagcagaaaaggagatcaaagaaaaaaagtcatcaggcaaaaaggtgacaaagggtaaaggagaatccgttgaagcagttcttcccagcaaggatgatctgaggaagaccattactgaaatcctcaagaaagttgacttcaacacggcaactttcagtgacatccttaagaagcttgacaatcactataaaatggatctggccccaaagaaagaagccatcaaagttatgatccaagacgagttaaccaagttatcagaggaggacgaaggagagggagccggagacaccgagaagaaacagcagcagcctcaggcgaaggagatcgaggcatgaggattcgtggaaccccatagctgtagtagccgctgttaattatcctgtacttaatgtgtttgtttgcgtcgcctgtacaggcatctcgttgattatcgccgcaccaactcgagaacctcacccctgatcgtgtatgttatggggcatgatgtgtaggcagcctccacacctttttagctgactgatcggagagttactcctaggcaactcttgtttctagatttgcaaatggtgtctgaaactctgcgtttgctgcggcagaacgtgtacttaattgttcgtgataggtctgaataacacatggatggtatcagtctgtagcttattttttttacttgatccgtttcttctgtgggttgtgatttgtgaatgaccaaaagatggatgctgtattccagtttctgttctctcagagtaggcatgcaagaataacagctgaaccaaaccgagaaacagaacagtggctatctcctatctttagtagcttcc

SEQ ID NO: 27659 - DNA, 1411 bp, Zea Mays
gcggctgaaccagtgccagtcccacccgttcccagaccagcctcacgcgctcaccgtgctgcctccaccaccgatggctctccctcccggcgcaggggcggtggcgccggcgacgcccttcgccgcgaatccgtgccgtctccggcgggcgtctggtcctcctgccgccgcccttcggctcgggccgctcttctggccatgggaaaaggtgaaaatcggtcccctttctgtttcccccatgggttttggaacatgggcatggggaaaccagctactttggggctatcaagaaagcatggacaacgaacttcaggattgcttcaatctggctctaaggaatggcataaacctttttgacactgctgactcttacggaactggaaggctgaacggacagagcgaacggctactcggtaaattcatccttgagtttgaagggaggattaaatctccagatgatgtggtcatagcaactaagtttgctgcatatccttggcgacttacatcggggcagtttgtcagcgcctgcaagtattctcccgatttgtttgtttcatgtcttctttggaaagattacaacttgataggctcgggatagggcagctgcattggtctactgctaactatgcacccttgcaggagcgtgccctctgggatggactagttgaaatggccttgtaagtgctgtcggtgtcagcaattacgggccgaagcagcttctgaagatccacagctatctagcttctagaggagttcccttgagctcagctcaggttcagttctcgttactgagcatgggtgacgatcagatggagctgaaaagtgtgtgtgattcattgggcattcgcatcatcgcatatagcccgcttggattaggaatgctcactgggaagtatggtgcttctaacctcccaaaaggaccaaggtcagtgctgttccgacaaatccttcctgggctggagcctctgctgtcttgcctgagaaggattgccgaaaagaaggggaagaccatgcctcaggtggccatcaactggtgcatgtgcaagggcacagttcctatcccaggcgtcaaaacggtgaggcatgtccaggagaacctgggcgcgctcggctggaggctgagttctgccgagatctcggagctcgagtccgcagcgatggcggctccgaggaagatgatccagaatgtcttccagactgcctgaccgtgctgaatacatgtgtgtgtatgcatgtttctgcaatcgtctttactgaaaaatctgaaaccgggcagccgtgaaccttttcttctcgtaagattcataatatagatagtcactgccatgttctattagttgtcgtttttgacaaagtttaaataaaacttataaaattttgactataaataaatgttttattatttagtttg

SEQ ID NO: 27660 - DNA, 2122 bp, Zea Mays
cttcagaccacacttgttgggctctatcagggttcattgaggcccataatcggttcgctgatacagaatgcagtgaggcccacgtccctctcgtctcgtacagacgacgacggaaagaggatgatgcggggagtcggaggtccgctgctcaccatcggggatctactcagcgacctcgctgtcgacgacccactcgtcggcgtcggagatgcgtctgtcccatcatctccatcggcggcgcagcaagcggggaaggccaatccgtccgatctcagccggctctttgaggaacactatgacgatttgatgaaggctctacaagagaaggatccttcatggccctcactgatgctgaagctgtgcgcggcgctgaagactgcggataggctgatgagttgcgcggacacgaacgcggaacagctgctggagaaggtgaaggcactggagggcgtcctcgacaggagcggtcatgcggtggcagagattgtagaagctctccagaggtcaggcctagccaatgatggtcacggttccccgtcaaaatcggctagcaagtagacgttctggtctgctttttgttcgtcttctatcccatgcaaatctctgggtattgtgagtgagttgtatgtcgacctgtgcctccacggctttgcggcctgccttgttttttttttttacccctcaccgctcttggaatgcgcgtttgtgtttatcctgtcagaagtagcgggcgatactggatttgcggtgtacaagcttcttccttcttggatcattagcttggtttcttgctaagttgcaccaagtctgaaatcaactcaaaattctggagcagaaagacgctaaaaatgccagattgcgtacgctttgtgaaacgtgagaacttgaccgccttcaatgtttgaacgcagagcatcttccgaaccagtaaaaaaaagcggtttcatctcatttgtggacgagtttacatgaaacatttcgattcacataaagtctacagtctagcgtgccaggacgtctcgaatttcttccaaaatattccaaaatgggctatcagcatccgaattccgaaggcacgatgaatttgcacttcatatttgggagctggaactacagtccctcaccctgttcattcattcagaaaagtgcggtggtttctcgtgaacgagcaacccagaaaaagtacacctgtcgcgtaagcgtcctcaggcagcagctccccggtcgcggtctctgtctctctgaagggaaagctctgtttccccttcccggtgccggagtcggggaaggtcaccgcgggcgcgagccgatggacagcaacaacctcctggcggcgtggccggtcctggggccgggcgtcgccggcgccgtattcggcgcaggctggtggttttgggtcgacgccgtcgtctgcagcgccgccgccgtgccattcctccactacctcccagggttcttcgcctcgttcgccgcgctcatgttcaactgcgtcaaccgggaggacatcggcgatggctactactcaccgtacgacgactccgagtggagtgggtttcttggttcaagatgcgcttacggatacggggccatctgcgtggactggcagtgctggcatcctgcagtgcgtgtttgtgttagtgagtgggctgatctactggacgtgccactctgaagattgacttaagaagtataggtatatatggccaaggaggaggaggatggagactgcttttctcagaagcgattgcttttccgtagtacgtttctggaggcacctttggaccgtgctttccgaaacgggtggaataaagagccattttctagttgtttcaagagagatgtagataagctgtactactattttacacgtgtttatagtcgtgtatcatgttgcttaaaactactttgtgaggtgttgttttggagcaagaaacttataggggtgctaagtactcgctctgtttctttttagctgtcgccggatagttcaattttgcactatacagcgacaactaaaatgaaatgaatggagtagtcaggaaacatcgttacatttttccctgttggcgaatttctcgtgcaaggtttgacaactctagtctgctcctgtacctcccgagga

SEQ ID NO: 27661 - DNA, 3023 bp, Zea Mays
agcaaagcacctccgactccaagtcgcgagagccttctcattcgtcttcctcctcttccacccatcctgcctgctcacttccgttccgtagtccagctagatccccgggcaaccgatccaccgagaagcttgtggttgtggcggcggcggagagggaagcgggaggtcggaggtaggcgcggatgccactgttgtgccggcgccggcggggccggtgatgcccgcttgagctgggccaccgtgcgtcggaggtggacgagggagcgaggcggcgccagaccgaggttgcgtcgggctcgatttctactgggctgctgtctgctgagagtaacagaaattggatcaattcaagtagaggtctaggaggagatatgaggtactacttgcgtcaggtccagcgtttggttggagatatggaaggaggagctctcttgtttatagacgacctcaactccaagtgacaaagcgaacagctgttgaacgtttcccttctatttctgtttctttttgccggatttggagatggaggtgaattcctctggcgaggaaactgtggtaaaggtaagaaagccgtacacaataacgaagcagcgggagcggtggacagaggctgaacacaaacggttccttgaagccttgaaactttatggcagagcatggcagcgcatagaagagcatgttgggacaaagacagccgtgcagatcagaagtcacgctcaaaagttcttcactaagttggaaaaggaagctatgaacaatggtacttctccggggcaagcccatgacattgacatacctccaccacggcctaaaagaaagccaaacagtccatatcctcgaaaaagttgtctcagctccgagacacaaaccaaagaacttccaaatgacaagtcaacaaaaccaaatatgcccttgagcaatgggcatgtaaaaatggtaggcgatgcatctcttcagaattttcaaaggaaggagttgtctgaaaaaggaagtcgctcggaagttcttaatctcttccgtgatgccccatctgcatcattttcttcagttaacaaaagctcttcaaatcatggggcacccaggaggaccgaggcaagtaaaacagaaagccgagatatgtccatcatggaaaataattcttttaaccccaacacccaagaggatgtaaaggtgatcagtgatcaggaaatggaaaggcttaatggtatccagatcagatctaaatgtgaacattctcatgaggggtatttggacatctcaacgcaacaaatgaagctaatgccaaagtctgtggagacaacatatgtggatgaacaaactgcaagagcttcacacaccctagcagagagcgacgggacagctagcattccagtgactgtacctgaaggaactcatcctgatcaaacaagtgatcaagtgggaatcaatggaagcatgaacccatgcatccatccaatggtttctgctgacccaaaatttggtagtagtgccacaccacagactttccctcataattatgcggcctttgctccaatgatgcagtgcaactgtaaccaagatacgtacaggtcattcaccaacatgtcatccaccttctccagcatgcttgtttccacgttgttgtcaaaccctgccatccatgcagccgccaggctcgcagcatcatactggccagcagctgaaggtaacactcctattgatccgaatcaagaaaaccctgcagatggcgtccaaggaaggaacataggctctcctccaagcatggtttctattgtagcagctacagttgctgcagcatctgcatggtgggcaacacaaggtcttctccctttcttcgctccacccgtggcttttccatttgtaccagctcctagtgctgcctttcccacagttgatgttccacgaccttcagagaaagacagagattgcccagctgaaaatgcacagattgaatgccaagaagctcgaaaacaggtacagttcgaaggtttaagaattgctgcttcttcagagtctgatgggagtggaaaaggcgaggtgtctctccatacggagttaaagctatctcctgcccagaatgctgatgccacacctaccacaggagctggcacaaatgatgcattcaggaataagaaaaagcaggatcgctcttcatgcggttctaacacaccttcaagtagtgatgtagatgcgggcaatgttcctgaggaggacaatgctaatgagaaggcgaagcaagcctcctgcagcaactcttcagctggtgacactaaccaccgcagatttagaagcaatggaagcacaagtgattcatggaaggaagtttccgaagagggtcgtctggctttcgatgcgctgttcagtagggaaaagcttccgcaaagcttttctcccccacaagcagtagactcgaaggaggttgccaaggaggaggaagatgaagtgaccacagtggcagttgacctcaacaagaatgccacaagcattgatcatgatgacctcgacacaatggatgagcccagggcttcctttcccaatgaattgtcgcacctgaagctgaaatcgcgccgtacaggcttcaaaccatacaagagatgttctgtggaagcgaaggaaaaccgggtgccggctagcgacatggttggtaccaagaggattcgtcttgatagcgaagcatccacataattgatttcttcaaagttatatttacatctaagctactataggacttcagatcttgcaatgcagtgcttcattaaaactcaatctgttgtgtgctgtattttaatgcttgtcaagcagcccgctagactgctttaaaaccttatctcgtagagtctgatttaagcatcatgcaactatcaaacttttttttttggtcaaaatgtattttccttatgttttatatttttggaaaggaaaataattgaaatattatttattttgaaggctcatgcaaaggtttatttgatcaaggtgtaggataggctgagcgagagggtgaacattatgactaatatagg

SEQ ID NO: 27662 - DNA, 2955 bp, Zea Mays
acatcgccccgaccaaagcttccccagacggcaggagacagcagcaggccggacgccggactcctcctccctcccccgtacgcatccactgagatccttcctgtgcgaaggaaatctccagttcttcggccccggccaggttttcaagtgttgcttgccccgccggagttttcctctaacccgcaagtccaattggctaagaagttgatgggatcggggggacactggaaggctgtgtgagatcgcgaaggggaccgtgaattccttgcagggctgcggcgattcggctgcgctgctgtatgaactgtttcgtgaacctgggactcaactcgaactcgaaccactacgtcgcctgcctcctcatcttcctgctgcatttctccccccagttgttaaatccatccaattctaattcaaatagtaattgtgaaggagttcaacagagctgcacagatggcgaacaacagggaacatgcctcactactaaccctccatggtggagggggtagaggagggttgatgtgagaacaacaggcgatctcggcaatttcacaacttggtaggcttctttatgttacttctgtatgaactggtcttttatcatttggaggtactctgctctctggagcaaaatatcagtcttatgctaaacccatccatattagcaaccacacaattgcatcaaaatttgcagaagattaaacttgagcaggttttgtatgtcatccaaacactacagcagtaacggacatgtgaatgtttcaggaagtttcttttatggatatagttaaaaaagcaggagtcatccacctttatttccttcatttctctgtgtgcaaatcgtgatactgctggaataacaaatttgattagaaatgtctttgaaccttacctttccttctcaatacgatcaatagaactaaacttgttcttctgaacacattttgtacttaaacattttatttcctgtgttacatgtactgagataaagcatattttgtccatgtcaggctcatatggtgaaaatgctaggagaaagccacacacaccatctgctattgttattggtggtgggtttgctggtcttgctgctgctgatgctctcagaaatgcatccttccaggttattctactggaatcccgtgataggattggtggcagagttcacactgactactcttttgggtttccggtcgatttgggagcatcttggcttcatggggtctgtgaagaaaatcccttggcaccaataattggaaggcttggacttccactgtaccgcacaagtggtgatgattctgtgctgtttgatcatgatctagagagttatgcactctatgacactaacggacgccaagtaccacaagagttggtagaaaagcttgggaaggtgtttgagaagatactggaagagactggcaaattgagggaagaaatcaatgaagatatgtctatcgcaaaagccatcgcaattgttatggctagaaatccgcacttgaggcaagaagggattgctcatgaggttcttcagtggtatttgtgccgtatggagggttggtttgccaccgacgctgattcaatttcactacagggttgggatcaggaggtgctgcttccaggtggccatggcctcatggttcgtgggtatcgtccggttataaatactctcgcaaaaggcttagatatacgcctcaaccataaggttgtggaaattgttcgccataggaacagggtagaggttaccgtaagcagcggccaaacgtttgttgcggatgctgctgtggtcactgttccgttgggtgtcctgaaagcgaaaaccattaaattcgagccgaggctgccagagtggaaagaggaagcgatcagagaacttacggttggagttgagaacaagatcgttcttcacttcgggcaggttttctggcctaacgtggagttcctcggcgtcgtttcctctagcacctacggttgcagctatttcctcaaccttcacaaggcaacaggccacccagtccttgtctacatgcccgccggccgccttgctcgtgacatcgagaagacgtcggacgaggctgctgcccagttcgccttttctcagctgaagaagatccttcccaatgcagctgagccgataaactacctggtgtcgcgctggggctcggacgagaacacgcttggttcgtacacgttcgatggggtgaacaaaccccgtgacctgtacgagaagctgcgcatccccgtggacaacctgttcttcgcgggagaggccacgagcgtcaagtacacgggcacggtgcacggcgccttctccacgggtgtcatggcggccgaggagtgcaagatgcgggttctggagcggttcagggagctcgacatgctggagatgtgccaccctgccatgggcgaggacagccctgtgtctgtcccgctgctcatctctcggctctaaaagcagacgagtagtagttgtgtatgggatggatcggcacctgagagtaggctgggacatcccactgattgccggagggaagcagggaggaagaagctcccctcgcttcgcttctcctcggcatgaggcatgtgcctggcgttacttgtggcgtgccaagtgccatatttccctaaacttattctgcgtgggaaccctctattatgtatgtatactgtgaatttgtgactgttcaggtaacacgagttatcgtgacatcttcgtagagaaagataccgtatgtatgatgtatgtatgatatacatatgatattatgatcaacaattgtagtagtagtaataataaataatacatatatgtgacttaactgtttggagtattgagtgattgtgacatgtaacacccttacatctaagcaagtataaagcaagtagtataagagcatctccaataaattagttaaatggctcgccgagccaaatttttgctactcaacaaaaaaataa

SEQ ID NO: 27663 - DNA, 387 bp, Zea Mays
acctagacaagtgcacacagtatttgaacaagctggcacaagctaagaaaaatcttgctcaagaggcacatggtcacatactcacatggaggagatggaggagagggagagataggacccgagagaggacatgagaggcacatggtcattatattttgttggctgtaactgtaagcctgtaattgttggttgcaactgttgctaacctggcatattttgttggctccctacaactttgtcctgaactcctgaacctgaagtcctgatctataattgttggctgcatcactgcgtgtattttggttctagaactgaaactctgaaagtatggaattatggattatggaatggaactattatgaactataagtctataattggtggctg

SEQ ID NO: 27664 - DNA, 2739 bp, Zea Mays
gcatgccaattaattagccaccactccatcgaaaggacccgatcaaactttagtctaggccagttgcactcgtcctcctcttctcgcagcagccagcagaccaatcgggacaagcaaactcccccgattagtttaagcagcccgggcccggcgacgaccagctccgttccgcgcggggatttaaacgcgcgaagcgagaaggcacgcagcaggcggcagcggcaagcaacgaacgcgatcgcgcgccgacgacgacgcgcggtgccggcgcctggtggtgccgtgttgcggactccgctgcatcgcctcggtcggtcgtcgtcatatcatgggtgtccggctgccggtggcgtggtccgccgtcctcgtcctcctcgtgcgggcggccgtggcgcgggagtacgcggccatcttcaacttcggggactccctggtggacgccggcaacctggtggtggacggcatcccggactacctggccacggcgcgcctgccctacggcatgacccacttcggctaccccaccggccgctgctccgacggccgcctcgtcgttgacttcatcggagctgggcgtgccgctgctgccgccgtccaaggcgaagaacgcgacgttccaccgcggcgccaacttcgcgatcacgggcgccacgtcgctggacacgcccttcttcgtggagcgcgggctggggaagacggtctggaactcggggtccctgcacacgcagatccagtggttccaggacatgaagcccaagctgtgcgggcaggagcaggagtgccgggacctgttccggcggtcgctgttcatcgtgggcgagttcggcgggaacgactacaactcgccgctgttcgcgttccggccgctggcggaggcgcacgacatggtgccgcacgtggtggagtccatcgggcggggcgtggagcggctcatcgcggagggcgccgcggagctggtggtgcccggggtgctccccatcggctgcttccccgtctacctctccatcttccgcaggcagccggccggcggctacggcgcccgcagcggctgcgtcaaggagctcaacacgctgtcgtgggtgcacaacgccgcgctgcgccgcaaggtcgaggagctccgcgccaggcaccccggcgtgcgcatcgtgtacgccgactactacacgccggccatccagttcgtcctccacgccgagaaatacggtatcttgtttataagatcacggaaattcgtccgttcacgcattcaaaaaagtatgggggacgacgacgtgcgggagcgagtaataattgaagcagaagcggccgcggcacgtcgctgggcgaatctgccttccattccatcgctggccgctcaaccggaacccaggggcgaatctgccttccattccgacgagaaatccacggtcttacgcgggcagggacgcatttctgggcgaacaaacgaatcaagcgtggcggggcggggtggttgggacggctgcgtgttggcgcggtcccgtgacctcatcgatcagcctaaaataaaaagagagcgactttgaagcgcgcgggcctctgctctgctctcgaacttgcgctccatgttctgagaagattgtttctgctgtgcgccgcagggatgctgaagcagacgccgcgggcgtgctgcggcgcgccgggcgtgggcgagtacaacttcaacctgacgtccaagtgcggcgagccgggggcgtacgcgtgcccggacccctccaaccactggagctgggacggcatccacctcacggaggccgcctacggccacatcgccaggggctggctctacgggcccttcgccgacccgcccatcctcgacgccaagcacctcggctaacgtcgtccatccaccgtcttctccaacgccggccccgcccgcccagtacagactactcctccggctctgggcgccgtcgtatgtgcgtccttattaccgacctgcaaattggattggttgcttgtagtagaagtgtagagagagcgagacagagatagatgacaaacacgaaacgaaccggaaggaggacgataaggcgcgcgtgccggccggtcttctactcctctctgttcatagctgtcccatatctatcgtagtcaagaaaactgagcagggaaagaaaccgggcgatatttctgttgcatcttgctttgtttgagagtgtgcgtgcgtgtgcggccagctcgatctgaagtcgataggcaggtgcgtcgcgtcgtggatgaactggtccgtggacgtgatcttgtttatttttttaaggagcaggtgttgtcaaaagtccatcgctaagatgtgcttaaggatctcagcccaggagactgattttaaagaccaccgtaacaataacacggcactcgagtctttgagtcctgttaaggacgaagggaatagcctaatattaaatgacattatataaaagtatctaaataagatgactctccatatgctaaaaggcacatcggaccgtccgatgcagcatgattagagctgggcattcggtctattagagtaatttggttcgatctattcgggttttttaaatttcggattctgaaaaataagaaccgaaattttcaaaaataattttagaaactgaacccgaatagacccacaaattcggttcggtctattcagtccaccaaatagacccgaatagtagagagactagtatattttgttaaactatatacaatgaataattaattggaagtactattatt

SEQ ID NO: 27665 - DNA, 4184 bp, Zea Mays
cagagctctgcactgccgtgtccaccgtctccctcctcgcctgcgtcgcgagccgcgactgtgcaagctgctattgctggtgccgctgttccacgtctctgtctccgcttttaaggctgtcacctttccccatcccctgcgcgccctcctgcactctccccactcaacaatcaaccacggcgtcacaaccgcacccctccgaaccctagctagcaccgcgcgccggagccccggagtaggtgcctgcttgccctcctgcggtggccgtcgcgctgccgccgcctgatccgattcgtctagccgtgtcaagcgccaccaccggtgatcgatgcgaggcgccgcgggaggcggctcgggctcgggcaggctgtgaggagaggctgtccgctcgctgcgtcgtgcgcctgtctgcgcgcgcgtctgctccgccgtccgcgccaagccgtccctcgccgaggggggctgcctctcacggccgctcggcctcgccgcgcgtctgcttcccaccacccacgcagggatcctcgcgggctggaggtcgaagcgcgagcggagagctaagagcaacaaggcgacgagatttgtgtggctacgattttgcgttgccgacggaacatgggaacaatggttgcagcggtggcgttgcgagggggaagcagcgatagcggaggatttgataaggttcccgggatggactcgggaaaatacgtgcgctacaccccggagcaagttgaggtgctcgagcggctctacatagattgccccaagccaagctcctcacggcggcagcaactgctgcgcgagtgtcctatactctccaacattgagccaaagcagatcaaggtctggttccagaaccggaggtgccgcgataagcagcggaaggagtcttcgcggcttcaggctgtgaacagaaagttgacggcaatgaacaagcttctaatggaagagaatgagcggcttcagaagcaagtctctcagttggttcatgaaaacgcgcacatgcggcagcagctgcagaatacttcattggccaatgacacaagctgtgaatcaaatgtcactacccctccaaaccctataagggacgcaagtaacccttctggactccttgcgattgcagaggagaccttcacagagttcctctcaaaggctactgggacagctattgattgggtccagatgcctgggatgaagcctggtccggattcagttggtatcgtggccatttcgcatggttgccgtggcgttgctgcccgcgcctgtggtttggtgaatctagaaccaacaaaaggcatagagatcttgaaagatcgtccctcttggttccgtgattgccgaagtcttgaagtgtttacaaggtttccagctggaaatgggggaacaattgaacttatttacatgcagatgtatgccccaacaactttagtccctgcacgtgatttttggacactacgatacacgacaacaatggaagatggcagccttgtggtctgtgagagatccttgagtggttctggtggtggtccaaatgcagcctctacacaacaatttgttagggctgagatgcttccaagtgggtatttagttcgcccatgcgaaggtggaggatcaattgtgcatatagtggaccatctagatctcgaagcatggagtgttcctgaagtgcttcgaccactgtatgagtcttctagagttgttgctcagaaaatgactactgtggcactgcgccaccttagacaaattgctcaagaaacaagtggagaagtagtgtacgccttgggaaggcaacctgcagtcctacggacctttagtcaaagactaagcagggggtttaatgatgccattagcggtttcaatgatgatggctggtctgtaatggggggagatggcattgaagacgttgttattgcttgcaactcaaccaagaaaattaggaataccagcaatgctgggattacatttggagccccaggaggcattatttgtgcgaaggcatccatgttactgcagagcgtcccaccggcagtactggtacgatttctgagggagcatagatctgaatgggctgattacaatattgatgcgtatttggcttcatcattgaagaccagtgcgtgctcacttcctgggttgcgacccatgagattttctgaggggcagatgatcatgccacttgctcacacagttgagaacgaggagattcttgaagttgtccgccttgaaggtcagcctcttactcatgatgaagctcttctttcaagggacatccaccttctccagctttgcactggaatagatgagaaatctgtgggttcctccttccagcttgtgtttgcaccaattgatgagcatttcccagatgatgctccattgatttcttctggctttcgtgtcataccacttgatgtgaaaacagatggtgtatcctctggtaggacgctagatttggcatctagtcttgatgtgggctctgctgcaccccaagcctcaggggaatctccagatgactgcagtttgagatctgtgctgacaatcgcctttcaattcccgtatgagatgcaccttcaggacagcgttgcagcaatggcccgtcaatatgttcgtagtgtcatttctgctgtgcaaagagtgtcgatggctatatctccctcccaatctggtctaaatgctgggcataggatgctttctggcttccctgaagctgccacacttgctagatgggtttgccagagttatcactaccatctaggtatggaattacttaatcaatcagatggagctggtgaagcattgttgaaaatgctctggcatcatccagatgctgttctgtgctgctcctttaaggagaaacctatgtttacgtttgcaaacaaggcagggctggacatgttagaaacatctcttgttgccctgcaagacctgacgctagacaagatcttcgacgagtcaggaaggaaagcactattctcagacatctcgaaactaatggaacagggctacgcgtacctgccgtcaggcgtgtgcatgtcaggaatgggccgccatgtttctttcgaccaagctgtagcgtggaaggtgctcggcgaggatagcaacatccactgcctggcgttctgcttcgtcaactggtccttcgtgtgactgacgcccaacccgtcgggtggttatggcgagctgaccctttttttgtatggaaaatcatcagctgtgacaaaaggcatatgttgcatgcactagttgaagaaactggtccaaatgctttttttgtttgtcattccattcagatgttgctaggtgtggagtggaaatggggcaatagtgtcacggttacacatgacccagcattaaccaaacaaccgcgtcgccagtttctttctattcgatcagggagatgcattttctggcaaaaatctcctatttttttgttgcaaatttggtctatgtatatggaactgctgctggacgccgagaaagcaagacatatgcggaaactcactatggctcgaggaaaatatatgcctacactgtcttcagaaaacataatgcagtaatgcttttcgaacccaaagcacacttgacacaaagctggagcacatgtaaagaggcacgccagatgagcaggtagggtctctcgcaaggctgatgccaacaattaaaccgacgacccttcacaacaaaatcacgattctttgttctcatcctgctccagttgaggctccttctctgcagcctcctcaaatgtctctccttggacaagctcagggacgtcgtcatcatcctgtgcagctgcttcagcaccaggaatggatgcttgcactgcagcaaaacggagaaagattgacaatgggaagtcaataatctgcgggaaccaacgtattcgcgtggcgagattttttcacctttagggttctgaaactggataacaacatcgtccttgaagatgttgacctcctcgataccaggaatggtgttccccccgatccttttcaaggtgctctgaagccgcttgtcatcggtggtcgtggtcttgtgaactgccttcttcttcctgccagcattttgtccctcataaattagttagcatgggactatgggtccagaagttgactctatgaacagatcacaaacccaacaggcttaggtgcttggatatctacaactcaacttgtcacaaaaaaaaa

SEQ ID NO: 27666 - DNA, 2875 bp, Zea Mays
aggggtaggagttgtaaaagtaatgggacaaaaaagaatacgaattcattcgcctccctgccctccatatgcagtcgtcgtcgtatctttggaataagtaaatagcagccccggaggcgactgactgactggcgcaactgtgttgctcgatccatcgaagcagacgcaggcggcggattcgcggaggagagatgatgagggagcagagcctcctggaggcgacgtgcggcgacctcttcgaccacatcgacgacctgctcgacttccccaaggaggactcggccgccgacgtgctcctgctggacgcgccggcgccggggagcccgctgtcgtcggcgcgcatcatcgacgtcggccgcgccggcagtgcgcccgctccccccgcgctggcgccgtcgcttcccgcgcagcaagacaccaccgccttcttcgccgccgcggggcccgacgtgttcgaccccagggacgtcggcgctcacctcggctcggtgggtgcctccttcctcgcattgcccgtgccagtcgtgcaaccgcgacgcgtttttcttcttcttttttccccccttttctctaaccctgctcgtgctgtgcgggcgattcctcgtggaatggagcggagttcaaaatagctggacgccaacgccgcgggcaccacgggacacgccacgcgcgtcggccacggccacgacctggtgcctgccttgcgtcgcgcgcgggacgtgatgacttgttgtcttgtccgtgcgctgcgcggcgcggtgcggtgcggttggtggttgctggttgggacaggaggaggagcgggcggtgtcggtggccggtgggagtcgtgaccggagttaccaccgcccggccgctgtttggtttgttggttggacttggatattacggccgggcccgtgttacgtcggtcggggggcccgtcgcttttcttgtgcaaacgtgggccccggcctggcacgtaatgtgtgcagtgactgaagtagtggggaaagacgatgacgtcattcatggcagatacacagtgcgacgacattgacatggacatggacatggcgcagctggagtggctgtcggggctcttcgacgacgcatccatcccgcacgagccggcgttccccggcgcggcgcccatcatcaagagctccgcgctggcggccggcgcgctgctgccgccggacaagatggaggacgcgctgctgttccgcagctccagccccatctcggtgctggagcacggcagcttcaacaacgccaacggcggtggcggcggctgctccgcgtcgtcggagtcgtcctcggcgtcctcgtcctcggagtctttctccggcagcgggagcgggagcggcgaaggccacgcgtggtcggcgcccgtgtcgccgccgcccgtgctcgtcataccggcgcgcgcgcggagcaagcgctcccgcccgtccgcgttcacgcgcgccggggcggaggcgcccaccatcctcgtgccgacgcccatgtactcgtccgggccgtcccactcggaccccgagagcatcgctgagtccagcccgcacccggcgccgcccatgaagaaaaagaagaaggccaagaagccgccggcgccgcccgcgcccgcctcttccgacgacaacgacggcgacgccgactacgaggaaggcggcgagcgcgcggagccgcagggcggcgccgtcaggaggtgcacgcactgccagatcgagaagacgccgcagtggcgcgcggggccgctggggcccaagacgctgtgcaacgcctgtggcgtgcgctacaagtccggccgcctgttcccggagtaccgtcccgcggcgagccccaccttcgtgccgtccatccactccaactcgcacaagaaggtggtggagatgcgccagaaggctgtccggagcggtgacccgtcgtgcgacctcctgcagttcatccgccgccgggattgacgtcccggcacggcgtcgccggactgtcggtcggtctcgtcccccttatagctagctatatagtatatgtatacatgctagtatgtatgcatgcatggttgcttcagcagtcgtcggtcgtcgtcgtcgtcgtccatcatggtcatcatcaccacttcaccggtcaccgccatggcatggatcccacccctcatcacatgcattggtttctgtcaacatccatccaatcccaatccatcgccgggcatcccggcgcgtttagttcattaggtcttctttctcatcgggggctagtgttattttacctttcttcttttctgtctattggttaattggttccccctgaatgtttttttgtttgtatagagagagaaagagagaggagggtgagaggagaggcaggagaaatagatgaatcagagtggttgctgcattgcagttgcagttgcttgcaggttaggtactaggtgagaaggagagctaaaccagcagcagagggagacagatctagagaggaaactttgcagctagtcagtcagtcagtcaatcaattagaagaaagcatggagagtgcttttaagcaaatgaaaggggaatttgttggtttgctaattagaagggaggttatgcagggcaggtcagtagtagctatcatcgtccatgatgattttaaaacttaagaagagggggacagccatcatccatcatagtctgtactctgtatccggagcttggtgtactgaactctgaaacttctttttgcagttcatctatgtttagggatttgataagtgttgtttggtttcttctatactagtagtgctacctcttagcgaataattaattatatatgcttttgctctcgttcttttctcctgccttgttgcctccatggctccccatccatacagaagctgtgagctgagggc

SEQ ID NO: 27667 - DNA, 1998 bp, Zea Mays
tgggtcacttgccttccgcacccgtcccgtgtatacttcggcaacccgctgtcccatgcgctcacatggaatggaagctcccgcacgaactcgaaccaccttcgcctcgccacctcttcctcttccccagtagccgccgtcacccacccactgcggcagccaaaccacgtgaggccttccacccagctcaagcccacagcatccactgacactgccaccgccgctcacctccccggcgttcccggctccaccaactactgcaagcatgaggcagcccaccagcgcgggcggcgacgctgggttcgtgcgcgcggaccagatcgacctcaagagcctggacgagcagctcgagcgccacctcggacgccgggcggagcggggagtcggcctaccctccgggacggggagccgcggcggcgagtccgcgaggctgggcccggaggagctgacgccgctgcggcggtgccgtgaagactgggagatcgaccccaccaagctcgttatcaagggcgtcatcgcgcgcggcacctttggcaccgtccaccgcggcgtctacgacggccaggacgtcgctgtaaaattgcttgactggggtgaggatggtcatagatcagaacaagaaattgctgcactgcgagcagcttttgcacaagaagttgttgtctggcataagcttgaacatccgaacgttactaagtttattggtgctataatgggtgcaagagatttaaatatacagacagaacatggacatcttggcatgcccagtaatatttgctgcgttgttgttgagtacctccctggaggtgcactgaaaagttttctgataaagaacaggagaaggaagcttgcctttaaagttgtggtccaaatagctcttgacattgccaggggattatgctatctccactcagagaagatagtgcatcgtgatgtcaagactgaaaatatgcttctggacaaaacgagaactgtaaaaattgctgattttggtgttgcccgagttgaggcttcaaaccctagcgatatgacgggcgaaacagggacacttggttacatggctccagaggtatttggttttaaccatccgtctgttcctaattctaaacatgcacatttggagaagttatcctttatatatcaatagatattcttttctcgaggctgcgtctatatccattgtttttcacaccgttgtatcatctgcaaggcagcatgattttcccactgacctgagatttgttttggttcctttctctgcgcttgcatttttatttcctatttcttcaaagagtggacccgcggtttgctttgctggcatatggttgcaggttctcaacggccatgcttacaacaggaagtgtgacgtgtacagctttgggatctgcctgtgggaggtatactgctgtgacatgccgtaccccgaccttagcttttctgaagtcacctctgccgtggttcgccagaacctgaggcctgagataccgcgctgctgcccgagctcgctagcgaacgtgatgaagcgatgctgggacgcgaacccggacaagcgtcccgagatggcggaggtggtgtccatgctggaggtgatcgacacgtccaagggtggcggcatgatccccaaggaccagacgcagggctggctctcgtgtttccgccggtaccgaggcccctaacgcagagttgcttttacccggcgaaatgatgatattggtctccacgactcagtgtaatctaatcgcagaactggctataattgagagttttctcgttgtcctgggcgtaaatgcatggatgggccggcagttgacgattgatgtccgttcaaatgcttgctgtaagttaattcaggtgtagagggagttgctgtggccgtttgctcacatcgtttaatttcatggccgtgacgtgaagcaggtcatttttagaaaaaaaatatgtattaatatttcagtctctatcgattgacacatatagttgtccaaagttacatctaac

SEQ ID NO: 27668 - DNA, 1059 bp, Zea Mays
caaaggcctcggagttcggtctcctctcttccgttgtgtcaacggctcaacgcttaaaaagtaaaaaccctccggcggcggtggggttcctgttcctccggtggaagctcccggcgctcaaatccggcgaaagaaaagaggggaaagaggcaggagccggctcaaatggacagcggaagcgattccgacggcgctcccgaggagctcaccgccgtccagggtgttgagaagcacgaagagatcagtcaagttgagaaggatagtgccatcagagtaacacgggaaggaaaggagcggaggaaacgctgggcccaacgaagaacatcctctaaaccagataagaaggcaccaaaggaagtagtagaagatgaaggtaccaaacaaagcgaggagacagatactatgcctggaatgctccccactagtgtaattgaaattctagcagctcgtgagaagcaaaccttcgcatcagattctgaggaagaaaatgtaaagcagaaggtccagaaaaggaagaagaggatgaaaactgctgggcctgaaactattctgctgaaagatgtccggtcaacacagcacgtgaagaacgcccttgatttcttggagcaaaggaaaaaacaggttccgagatcaaatgcagttttgaagaatgccagtaaggctttgcgtctcctatcttcgaaagatatggtcgagatactttggaccgatgtatttgaatggaatcgatctggcacgtgagatgtgatgcagtatatcctttggtgtggaagtgtgatgattagcacacgtgtgagttttagttatctatttttgtggatttgcgctgcaaatttctgaagaaaactctgaaagatctccaaattttgatagccatgtggcacttcttgtatcagactatcagagggttgtcgtgttgacttgttgtatactctttctattaccattcgtctggagatgttttacctgtgctctgttgggtgcatttgtatctttttaaggttagtttggaaacacaagggattttcattttcctatggagaattagttcattttccc

SEQ ID NO: 27669 - DNA, 1468 bp, Zea Mays
agatagttgtttaaaagtcaaaatccttgctggtggccgagggctgggaactttcaaaaagcggactgcaaggtggtgtccatattgttaaggctgaggaagctgaattgattgcaagtaaaatgttaggccagattctgataacgaaacaaactggtccagagggaaagattgtgagcaaggtctacttgtgtgagaaactatctcttactaatgagatgtactttgccatcacccttgataggaaaactgctggtccgctcattattgcttgcagcaagggaggaaaacactatagttgacctcaatgttcaaaggatggccagaaagccaggaacagaacttaggcgttggcgattggcatctccctcccctaagccatggccaccgggcggcccgtacgactcgtgctggatgcctccctcctcctcgacccctcctccaccagggaggcggcggcggtggctctgcggcccggggtagaggagctgttgcggcggttgcgctactccaacctgaatgtggcaatctgctatgcagagggcatgccaactaatgagatgctctacttatctacattattattacatccctctgaagttgtatcttcagaagttcacattgacagtatttgcttcctcttgccatacttacccatcatggcccatggggtgtctatcttatcatgccatcttcaaagaatggcatcatgttaacaaaaatgaatgagaaatcagtcatttctaatggaaagtcaggctttcttgaaaaggtcgcaagctcacacttgtttggctctatagcacttcttgcgaaaagtgggaatctttctctaactgaattaatgttagaatggagccaaacaagtttatgtttttatgcgacttcaagagttgacaaaggtttaagttctgagctccagaatcagaattggagagttctttctgtagctaatgaatgtagcatagaggttcctggtgttttaaatgttcaaaggcttcagcagttgcttctcaccttggctactctaataaaagggaactatgtgactcatctgttctggtgattggatatataatgaaaatattctgtgaggaagacttcgcaaggagatgtggttctgtcacttatgtgaccgttgtcgtgtatggagacgtgtatggagacgaggacaagccagcgcttataatgtttacagagatgtggttctgtgactgttgccgtgtactcaggctttatttcaacaagatttaaatatgagatgtagagtgattgatgtacatcacttcactaatcatgaaatctgtagaaggcgaaactactagccatatatgatatgcataatccgtgtggtaaacattatcaatatcacacaaattatttctaatgggttttgaattatcatagtgattgttgtcgttccgtttttatgtttcatacaaattttttactcccgtcgcaacgcacg

SEQ ID NO: 27670 - DNA, 1330 bp, Zea Mays
acgcttcccatgtcacttgggccacccagaccccagtaaaaaccctagttcccttctccatccgcaccctcgcttccttttccttctctatccgcgagcctcgtaccggcgcagccatggcggaggagcccgccgttgtcgtggcctcctccagctacgaggttgacctcgggaacctcatggcgtacgatccgtcgcatcacgtcgccaccgcctccagggaggagctgagacaggagtgcctgcggaagggtacagagctggcgcaggcggtggccgacgtcctcttcgcgctgccgcccaacgaggaccgcgacggccccattatccacctcccgccgcccaccttcagactcccgcgggagaagcatctacccaagcccaagccaccgaccaagtgggagctgtttgcaaaggcgaaaggaattaccaagcgcaaaaagaacaagcgtgagtgggatgagcaaactcaatcctggaagcggactcatggctatgaccgtgttaatgatgacaaagacattccaatcattgaagccaaattgactgacgagcctggtgttgatccatttgcgcaaagaagggatgagaagaagaagagggttgaaaagcaagaaaaaaacagactggataacttaaagaaagctgcaaagtcatatacagcttgctgcgaaggcgttgcccatcacaggaacaaaagctgaccttccaaaaaaatctagaaaagaggatcttgagagtgttgtcggcatggcttcatcagcaacagcaagtggtgggaagtttgatgagaagttgcctggcgagaaacctccaaagcaccctggcaaacacagaaagttcctcccagttgccgaagggaagggaatgggcagcctggagaaacagcagaatgacaaaatcctgaactctctacttgccagaaactctgatgaaccacttgatgtcggcaaggcaattacaatgtacaaggtgaaaaaggagaagcagagaaggaaagagaaaggcatgtcatcgaaatctgataagcttaagccccagaagaaaccccacaagaagtcatcgaagaaaaaggcttaggtccacatctttcaggtgaccacagttttgaaagctcaagcaaggaggcctgtcagcatattcaattgtatttttctgctttgaatctatgagagaaatattgttattccgtttactggctatgacacaaaaacctgaatgctgttataatatatgcccatcttgtaccttttcaaattatgtttgggatgtggtttgtatccctattggttcctgaaacacgtccaaaaggagcagctgtggctagtgc

SEQ ID NO: 27671 - DNA, 3914 bp, Zea Mays
gcagatcgccgcgcgcgtataaataggggccattctaaaagcaggcaagcgcaaaagccgcggcgtccatccaccccgacccatccaatccgttccattcctacgtcggctcggacctcggagacacagggatcgtcttcgtccccggcctctcgccttcctccacccccctctcctctctctcgctggctcgtggccaacccacccacccacctccgctccgccccgcttccatcgatccattccgcgatcggccttacacgtctaacagtacatgagtttctaactggtgcgagcccaagtaaagttctgtaattagtcacattcctgcacaatgtcgactgcgaaagtggtgcttgagcctgcatttcaaggagctggccataaaccagggacagagatatggaggatcgaggatttcaagccagtcgctttgccaaaatcagactatggcaaattctactgtggagattcttatatagttctgcagacgacatgtaaaggaggtgcttttatttttgacatccatttctggatcggaaaagattccagccaggatgaagctggaactgcggcgatcaagacagttgagcttgacagcatgctcgggggccgtgcggtgcagcacagggagccacagtgctacgagtctgataaattcctctcgtattttaaaccgtgcatcatacccatggagggcggctttgcttctgggttcaaaaagccagaagtggacaagtttgaaacacgtctatatatctgcaaagggaagagagctatcagagttaaagaggttccattttctcgttcatcgttgaaccatgatgatgtctttatcttggatactgagaacaaaatatatcaattcaacggtgcaaactccaacatccaagaaagagccaaagccttggaagtgatccagcatttaaaggaggaataccatgacggagtgtgcgctgttgcaatcgtcgatgatgggaaactgcaagcagaatcagattcaggagaattctgggtcctttttggaggttttgcgccaatagggaaaaaagcaataagtgatgatgatgttgttcttgaaactacatcaccaaagcttttcagtatcagtaacggccaactgaagttagaagacgctgtccttacaaaatcaattttggagaacaccaagtgctttttacttgactgcggggctgagctattcgtgtgggttggtcgggtaacacaggtagaggacaggaaagctgccagtgcagcagttgagaaatacattattaaagaaaatagaccaaagacaacaagaataactcaagtgatccaaggttacgagaatcatacgttcaagtctaagtttgagtcatggcctgtaagtaacacgtcagggagtgccagcacggaggaaggccgagggaaagttacagcactcttgaagcagaaaggtgttgatgtcaaaggaatctcaaaaactagtgtgccagtaaatgacgaagttcctcctttgctggatggcggtggaaagcttgaggtttggtgtattgatggcagtgccaagactgctcttccaaaggaagaacttggaaaattctacagcggagactgctatgttgttctctacacttatcattctgctgaaaaaaaagaagagttctatctagcttattggattgggaaaaatagtgtacaggaagatcaagaggcggcttttcaaatagctaatacaacttttaattctttgaaaggaagacctgtccagggtcgtatttatcaaggaaaagagccaccacaatttgtggctattttccagccaatggttattcttaagggtggtactagctctggttataagaaatttgtagaagagaagggtctgaaagatgaaacgtattgttctgatggcactgctctcattcaaatttctggaacagcggttcataacaataaaacgcttcaagttgatgcggtcgcaacatccttgagttccacagattgttttgttttgcaagctaaaaactcgatgtttatatggaatgggaatgcaagttcttttgaacaacaacagtgggctgctaaagttgctgaatttctgaagaccggtgttgctgtcaagcattgcaaggagggcactgagagctctattttctggtcttctattggtggaaagcagagttatacaaatagaaatgctgcacctgatgttgttattagagagcctcatttgtataccttctctctgaggaatgtgaccctaatttttcattttcattttttggcttcaatcgcgataacatcgtcaccatttgtcagggaagctggagatgatctgttgaccgaagacatgatgatacttgatacacactgtgaggtttttgtttggatgggtcagtgtgtggagacaaaagaaaaacagaaagcatttgacattggccagaaatacgtacaacatgccgtggcctttgaaggtatttctcctgatgtgcctctctataaagtcaatgaagggaatgaaccttgcttcttcaggacatacttctcctgggatagcgcacgatccgtgggtggcaataagggctcaggtgatggtgggccaactcaaagggcatcagccttggccgctctttcatctgcattgaatccatcgtcgcaaggaaaacagtcagatgagaagcccacaagctcagatgacagcgagcatactcaacgagcttcagcaatggctgccttgtcctctgcccttaatccatcgacaaaacctagcagcacacagacacaatctcattcaggtcaagggtctcaaagagccgctgctgttgcagcactgtccaatgttttgactgcagagggatctcatagcccccgccacagtaggtcgtccccaacagcagatgcagacaagactgaattagttcctacttctccccatcaattagaaacagggactgcagaagatgtccgaacagagcctgatgtctcacaggaacaaacagctaaagaaaatggaggccagacaacctttagctatgaacgattgatatcaaagtccactgaccctgttagtgggataaacaacaagcgcagagaggcaaggttattcacaataaagagtaaatggacatatttggtggacagtgaattcgagaccgtatttggcatgactaaggaggagttctacgagcagccaaggtggaagcaagagttgcagaaaaagaaagccgatcttttctgagacaaggctggcttcgaactaataaaagcccttacgtcgcacaggattgtccagcattctcatcatgctcgttccgcgtatgatgatcgatcaccagcagctttatccgtgagttgtataggctactcttttatctgcacatggtttgggagcattatatatatatcccccttgcccgtccattattctgaggtcgttcttgatgttgacctttcacgtgttttctttttttattgtattataaaaaatcaaactggtgtaaatggcattactagtgagatttttgtaagtaatggtgcatgggcaccaaggtgtatgcaacatatttttgttgtaagacttcagcttctattgttctggtggtgttctattgaccactggtctaatcatctttactggcttaggtaatggccaacatatcatggaccatgcaaaacactgtttcacattatagattactttatttataaaataaagtttgaaataaaagacgtagataagtaagctgctggagatagcattaccgctgagcactgcagctgtgctcaatgatgatatggttggtttgacaccctactagtcttcttgatggtgtggctgcggctctggaaggagaggaacaggctattttcaaagtatgaatctgtatggtgatgataaaaatttccaattagcctttcataaaaaagaa

SEQ ID NO: 27672 - DNA, 945 bp, Zea Mays
gaaacctgtgagggtcagtactataaatatccgatctcgtcggaaccctacccttttgagaactccccttctccgccactaccgaagcccttgtacccctcaccgccgccgctgctgctagggagcttccatccgcgcgcgcctacaacgagagctagcagcggtagcggccgttatcttgtcgctccggctccgttcgtgtacccaagtcccagcctagatgccgcagatggaggggtccactgatcagatcgccgccggctggttcgctaaggagccggcttccgagcggcccgtgggcttgccgaggaccggctcttccagtcgcctcaacgcgcaggcgccggagttcgtgccgcgggggccgccgccaccggcgccggcggttgtgctgccgcctccgccgcaggtgatccgcatgttcgccgcgcctcccccgccgccgcgtgggggcttcttctccgcgccgcagccccggccgttcgagtactatgcgcctatcggtgaacgcagcggatttgctgccaaggagcaacaggcgccggagctggaagcggagatgctcccgcccgccgcggtgaagacggagccggtggtggatgggctcgacgacgaggtggtgcacaagatcaccaagcaggtggaatactattttagtgacatcaaccttgctactacagaacatctgatgagattcattaccaaggattctgagggatttgtgccaatatcggtaattgctggctttaagaaagtaaaaacttctgtgcgcaataatgtgatgcttgctgcggctctccgaacctcatcaaaacttgttgtaagcgatgacggtaagagagtcaaaaggcagcagccatttacagaatctgatttgcaggagctccagtcccggattgttgtagcagaaaatcttcctggatcattagaaaaagtaatattttg

SEQ ID NO: 27673 - DNA, 4896 bp, Zea Mays
cagaaggacagcaccgttgcccttcggcttcgataaacacccctcaacccccattgctttctagccccagatccccaatccccaagaccccaacgcctcacgcacccctcaaccctaccgcagctgcgcaggcacacgacctccgtgtgcagcgcatcgccgccatgacgggtcccttacactccagctccggccacaacgccgccgccggcggcgggggcaagaccatcgaggaaatgtaccagaagaagacgcagctggagcacatcctgctgcgccctgacacctacattggctcggtggagaagcatacccagacgctctgggtctacgaggacggcgccatggtgaaccgctccgtcacctacgtccctggactctacaagatcttcgacgagatcctcgtcaacgccgccgacaacaagcagcgggatcccaagatggacgcgctccgcgtcgagatcgacgtcgacggctgctccatctccgtatacaacaacggcgacgggatacccgtcgaggtccaccaggaggagggcgtctacgtgccagagatgattttcggccacctcctcaccagtagcaactacaacgacaacgagaagaagacaaccggcgggaggaacggatacggcgccaaactcactaacatcttctccacggagttcgtcatcgagaccgctgatggacgtcgccaaaagaagtacaagcaggttttctctgaaaacatggggaagaagtcagagccccagattaccaagtgcaagcagggcgagaactggaccagggtcaccttcaagcctgatcttgccaagttcaacatgatccatctcgaagatgatgttgtagccctcatgaggaagagagtggttgatatggcaggcactcttggcaaaacagtgaaggttgagttggatgggcacagggtgcccataaagagcttctgtgattatgtcgacctgtatatgaagagtgctaactgtgacagacctgataatttcaaaaagatttatgagcaagtaaatgatcggtgggaagtgtgtgttagtcaaagcgaagggcagtttcagcaggtcagctttgtcaacagaattgccaccataaggggtggaactcatgttgattatgtcaccaatcaaattgccacccatgtgatggcttttgtgaataagaaaaacaagaatgcaaacatgaagctacacaatgtgaagagccatttgtgggtctttgtcaatgcgctgattgacaatccggcctttgattcacagaccaaggagaccttgaccactcgtcagggaagctttgggtcaaagtgtgagctttctagtgatttcctcaagaaagttgagaaatctagtgtaatcgataatgtcctctcttgggctgatttcaaacttagcaaagaattaaagaagactgatggaagcaagaagtcaagaatttctggcatccctaagcttgaggatgcaaatgaagctggtgggaaggactctcacaagtgcaccttgattctgactgagggtgactctgcaaaagctcttgctatgtcgggcatagctgttgtagggagagattactatggtgtatttcctctcaggggaaaactattgaatgtcagagaggcaaaccacaagcagataatggacaacgctgaaattcagaacataaagcaaatccttggtttgcagcatggaaagcagtatgatagcaccaaaggtttgagatacggccatctcatgataatgacagatcaggatcacgatggttcccacatcaaagggttgctgatcaatttcattcactcattctggccatcacttcttaaagttccatctttcttggttgagttcattactccaattatcaaggcaaccagaggccaaactactaagtcattctacacgttgccagagtatgaagaatggagaaataatttaggagcaagtgcaagttcatggactataaaatactacaaggggttaggaacaagcacagccaaagaaggccgaaagtacttcgaagatattactgaacataaaaaagattttctctgggtagatgaccaagatggcaatcatattgaattagcattcagcaagaaacggattgctgataggaaacagtggcttacaaattttcagacctgcagcgatcaataccttcaatggttgacggccttaaaccaggccagaggaaaattctgttttgctcattcaagaggaattttgttaaggaagctaaggtggctcagttctctggttatgtgtcagaacactcagcataccatcatggtgagcagagtttagcaggtacaattattggaatggctcagaactttgttggcagcaataacatcaaccttatgtaccctagtggtcagtttggcaccagagctcaggggggcaaggatgctgcgagtcctaggtacatcttcaccaagctgtctcatatcacacgttcaatttttccgaaggatgatgatattcttcttaattatctgaatgaggatgggcagtcaattgaacccacctggtatatgccaatccttcctatggtcttggtcaatggtagtgaaggaattggaactggatggagcacatatattccaaactacaatccaagagacattcttgctaacctcaggcgattgctgaatggagagtctactgtaccaatgcacccatggtacaggggatttaagggctctatagagaagacagtcaatacaaaggtagctggttccacatatactgtcactggaatcattgaggttcttgacaacactacactgaggatcactgaattgccaatccgccgttggactcaggattacaaagattatcttgagagtttggctccagatactaagaacaaggacaaagtaccattcatagaggtcgttgaaaacaaaaacgcttccaattgtgttcataaattttccaccgtcataaatgctattcctcaattgcaactattttacaggatgtcacatgtcaaggtgataatgaagatgtttacattcagttcacattaagtgagaaaaatatgaatatagctatggaagaaggactagtgaagaagtttaagctgacaacaacaattgggacatcaaatatgcacttgtttgattcagatggtaaaattcggaagtatgacactcccgagcaaatacttgaggagttctgtcatttaaggcttgaattctattgtaagagaaaggaagcattgttgaaaagcatcaagttggacttaaagaagcttgaaaacaaagttaggtttatccgctgtgttgttgataatgaaattatagttaacaaccggaaaagggcagatctatttttggagcttcggcagaagaattttgatcctttcccaaagaaaaaaaagagggctgaaccagctgctgtaggtgctttagaagaggaggaaaatgaagagagtcctgaagctgctggagcggaacctagtgactatgagtatctcctctcaatgtcaattggtacgttgactttggaaaagatacaggagcttaatgctgagaaacaaaaattagtggatgatgttgaggaattggagaatatgtcaccaaaatcactatggttgaaagatcttgatgcttttgagaaagaactggatgtgcttgatcaaatggatctagcagaggaactgcaaagggaaaagaggataaatgctggcaaaaaaggaggatcaaaagctgcacccaagaaaccacgtaaaaaggctgcatctaaaaagctggatagcgatacagaagatgatgattttgaaccagcggttgcaaagcgtggagctcaaccgaagaaaacatccagcaaggcaaatgattctgcgtctgaagatggagattatgtggctgctgaaaatcaaaagaaacaatccaagaaagcaagtgcccatgtggacgaagaagttgacatgccttcgttaaaagaccgtctggctgcttttaatatcagcgactcctctccggatcattctgccatggaaactgaagtaacagaattgacagaacagcagaatgaaaacaaagcgacagagggagcaagcaaaagaggcggacgaaagaaggcgtcatcatccttggcgacgataccatctgatgttgatgaggaagtcctagaggtccaagctcagaagaaaggtagaggaaggaagcctgctgccgttgtgaagcccaaggctcctgccgccgccaggaaaagggcgccggctcagggcaaggtaacacagaagaaaatagatgagatgctcaaggccactgaggataacaacaccagtgcatcttcccctgagaagaaggtccggaagatgaggtcctctcccttcaacaagaagagcggctcaatcttacagagaggctcgaccgcttctgcaagctctggaacaactgttgaagcttcaccaccctctggcagctctgcagagccagttggtgctgcacaacctagaaggacagccagggctaccaagaagcctatctatattagcgatagcgaccctgaggatgaagtggagttgattgatgattcggactttgatgcggacggtgactctgacgagtgaagattgtagtcatccgtactttggctgcaacaatatccagtttgtgtcgttgcatgtgacaatttgataatgcatttcttgtgcgttgtatgtgttcgttgcgttgttcagaactgttgccaagagctcaagacaacctggttaactggttaactgaattgtatgtctaattttggcatacaagtgtgcctgtggtatgttttatgctctgatgctggcatgctgctctcagagcgcccattgtgtgcattatcaaagtttgtgcggggagtttccagggttatatataccaaatctaagtagttgaagaat

SEQ ID NO: 27674 - DNA, 487 bp, Zea Mays
tccacctgtcataagcgtcttcatccaaccatcccctccattcccacacatacaaacaccccgatgactccaaaatcaaaactgccagcccctcacctcctcctcgccatggctgctccgtgtgcagcaaccgcacactgcaccagcgagccgtcgacaccatcgaacctcatctgcattcgtggtcgctacgccctccgacgccaaggttctctggaggacatggttgttggagtgacttagccgtccatcttgccaccgggttggacagtcgagtgggaccctacctcagctgaggaggagcgtgaggagtgatgggagaggcttccccatctctccatttatcgttagtttatttctgttgcatttcgaacaatgagtactacttttgctaaaactccgatgatgatgtaataaatttaatactcccttaatgtatggttttatgttttattgtatttgctctgtgcctcaccatcgagtgagt

SEQ ID NO: 27675 - DNA, 2506 bp, Zea Mays
ctctcacctaaccaatcctgaaaaaaacttgaatcagcacgcggactatccgcgccactgaccgtgcgcgaggaccttgtgtgttcaacagttaacaccctgcactctgcaaatttccatttccacgcgacgacgacgaagaggaggtgggattcggaggagtaaatcctaacagccgtctcgcgccggtggtccggtgcccgcgcgagatcggggggggggggggggggggggggggggcgacatctagggcgcggtgccggccatggcgagctctggactcgcctaccccgaccgcttctacgccgccgcagcctacgcggggttcggcgctggtggggccacctcctcctctacggcctgcacagcagttggcacggacttggaagcatgccatcggctgaggcgatgcgtctttttgtcaaaatcttggaggaggaagatcctggatggtactcaagggttcctgagttcaactctgagcccattgtagatattcaaatgcataaaccaaaagaagagccacagattgtaccggcttcaacgaatggaacatcaatttcagaaccaaaaatcatttctgaaaatggaagttctgtggaaacacaggacatagatgttattttggaaggccttagtactgttagttctcttgacgaatggacaccattagctatcagtggccatcgtccgaagcctcgttatgaggataagatgtatatatttggcggaaaccataacgggtgttaccttagtgacctccaggctttggatctgaagaatttgacttggtcaaagattgatgccaaattggaagcagaatcttctgattcagcaaaaacctcacaaattgctccttgtgctggccattcattggtacgcttctgcacaactagttgagcacttgaactgttgcaaagtcagatatctgtaaaactgtagctaatggtggttgcctcttgttctgtaccattttgtggataacatggggcaacaagtttttctccattgctgggcataccaaagatccatctgaaggtgttacagttaaggaatttgatccgcatacttgtacctggtctattgtcaggacttatggaaaatcaccggtttctcgcggaggtcagacagtgactcttgttggaacaacactagttttgttcggtggtgaagatgcaaaacggtgcctcttgaatgacttgcacattcttgatcttgaaaccatgacatgggatgatgtggatgcaataggcacccctcctccgagatcggatcatgctgctgcttgccatgctgaccgctatcttttgatttttggtgggggatctcatgcgacatgtttcaacgacctacatgtccttgatttgcagacgatggagtggtcaagacccaaacaacaaggcctgacgccaagcccaagagctggccatgctggtgcaactgtcggggagaactggtacatagttgggggtggcaataataaaagtggtgtctctgatactcttgttcttaacatgtcaactctgacatggtcagtggttagcactgcggaaggacgagttccccttgccagtgagggcatgactctagtgcatagcaattacaatggatacgattatctcatctcatttggaggatacaatggacgatacagcaatgaggtttatacacttagcctcaaatcagattttaagtccaccacaaaagaagaaactgtctcagatctagggtcgtcgaaccagaggttgaaatggtgattggcgtggacagtgctgattcagacctgaagaacagtagtacagtactgatgaagcaagtgaacagttcttagcagctctcaaagctgagaaagaggaactagaagcgacacttaacagggaacagctgcaaactgtacaacttaaagaatacattgctcaagcagaatccagaaatgtggaactcacaaaggaacttcaagccgtccgtggccaacttgctgctgagcagtcaagatgtttcaaacttgaggtcgatgttgcggaactacgacagaagcttcaaagtatggatgcattggaaaaggaggtcgagctgcttcgacgacacagagccgcgtcagagcaagcagcgctggacgcaaagcagcggcaaagttctgggggcatgtggagctggctcgttggtacccctcctgatgataaatctgaatcgtgatcgcgtcgtgagggcagcactttagttcatacaggccgtgattcatatattatacttgtaacatttatatacccgttgatattttttttacagttactgaattcgtgttcattttgaccacagaagataaggaaatcattagttttatgccttgttttggcgtattgcaatcactcaaatgtatcaggaagtttcaacattatttcttgaaaagctagatttcaacattgtcatcatgtattggtcctccttttgacgacatggttcaatatatgttattcgtttgagactcttgttttttaaaaaacca

SEQ ID NO: 27676 - DNA, 6824 bp, Zea Mays
atgagcgggcggcggggtccagctgccacaggaggcggacggggaggcggaggcggaggcggcgggaactggcggcggagcgggtcggcgaaggcgaaggagcagcggctgcgcctgggcgcggaggagctcctcgagagccggctaggattcgcgccatacactgatggggagcggcgcctcggatggcttctcaccttttcaccgtcatcatgggaagacgaggacaccggaaaaatctacagctgtgttgacttatactttgtatcacaggatgggtctacgtttaaagtgaaatacaagtttcggccttacttttatgctgcgaccaaggacaagatggagttggaagttgaggcatatattaggcgacgttatgaaggggaaatttctgacatagaaataattgagaaagaggatttagatctgaaaaatcatctttctggcttgaagagaaaatacctgaagcttcagtttgacaccgtacaacaattaatgcgtgtaaggaatgaccttttacatgttgttgaaaagaacgaagaaaaaatagatgctgtggaggcatttgaatcaattcatggtgtaaaaagggtagaaaggccacaagattacataaattacatcattgatttgcgtgagtatgatgttccatatcatgttcgttttgctatagataatgatgtcagaagtggacagtggtacaatgttaatgtatctggttctgatgttttgcttcagagaagggaagacctgcttcagcgtgcagaagttcatgtctgtgcatttgatattgagaccacaaaactgcccctgaagtttccagatgctgaatacgacaacgtaatgatgatttcatacatgattgatgggcaaggatacctgataatcaacagagagtgcgttggagaagacattgatgatttggagtacacacctaaacccgaatttgaggggtattttagagttaagaatgttcaaactgagagaagagggctgcacaccatggaataaaaatgaatgaggagattggtttccaatgtgacaataaccagggcgagtgtcgggctaaattttcttgccatcttgactgttttgcttgggtgaagcgagacagttaccttccacaaggaagccaaggtctaaaggctgttacaaaagccaagctaggttacgatcctctggaggttaatccagaagatatggttcgctttgcaatggagcagccacagacaatggcttcgtattctgtatcagatgctgttgcaacatactatctatacatgacttatgtccatcctttcatcttttctcttgcaaccataatacctatgtcacctgatgaggtactgcggaaaggaagtgggacactttgtgaaatgctgctaatggttcaggcattcaaggctagtgtcatttgtcctaacaagcaccaagctgatcttgagaagttctacaataaccgtttattggaaagtgaaacctacattggtggtcacgttgagtgtcttgaaactggcgtctttagatctgatctccctacaaagttccaacttgaaccattagcatatgagcaactcattggaaatcttgatcgtgatctgcattatgtcattgctgtagaaggaaagttggatattgattctgtcacaaattatgatgaagtcaaggatgccatagagcaaaagcttgttgcattgcgtgatcacccaattcgcgaagaacgccctctaatctatcatctggatgttgctgctatgtatccaaatattattttaaccaatagactccagccaccatccatagttacagatgtggactgcacagcatgtgatttcaatcgtcctggaaaaaattgcctcagaaagcttgaatgggtctggcgaggagagacctacatggcaaaaaagaatgactattatcacataaagaggcaaattgaatcagagctgattcaatctggtggcattgcatcgtcaaagccttttcttgacctctcaaaaccagaacatttacttaaattgaaggatcgtttgaagaaatactgccaaaaggcgcacaaaagagttgttgataaaccaattactgaagtcagagaagcgggaatatgcatgcgtgaaaattctttctatgtagacacagtgcgtagctttcgtgatagaagatatgaatacaaaggtcttaacaaaacatggaaaggaaaactcgcagaagcgaaagccagtggaaattctatgaaaattcaggaagcgcaggatatggttgttctatatgattctttgcaacttgctcacaaagctgggaagaagctaactatatcttatccctgtgtcatgcttaatgctgacgttgcaaggaacaacactaatgatcaatatcaaacattgaaagacccagtaaacaagacatatacaacacacagtgagtgttccattgagtttgaggttgatggaccttacaaggccatgatcttacctgcctctaaagaggaagggattctgataaagaagagatatgctgtcttcaatgaagatggcactttggcagaacttaaaggttttgaaatcaagcgtagaggtgagctgaagctcataaaagtttttcaggcggaggtatttgacaaatttcttcatggttcaactttggaggaatgctattctgctgttgcctctgttgctaaccggtggttggacctactggataatcaaggaattgatattgctgacagtgaattgcttgatttcatatcggagtcgagcacaatgagtaaatctttagttgactacggagagcagaagtcttgtgctgtaactacagcaaaaagacttgccgaatttcttggagattcgatggttaaagacaaaggactacattgccaatatattgttgctcgggagccacaaggcactccagtgagcgagcgtgctgttccggtagctatattcgagacagatcctgagatcgcaaagcattatttaaggaaatggtttagattctcctctgatgcaaacattcgatctattgttgattggtcttactacaagcaacgcttaagttcagctattcagaaaatcattacaattcctgcagcaatgcaaaagatctcaaatcctgttcctcgagttcttcatccagattggttacacaaaaaggtcagggagaaagatgatcgatttcggcagcgtaaactgcgtgatatcttcagtcccttggctaaagaagaggggctgcataacttgaataggactggagatatggaagatttattaatttcaaacaaggatttgaggaaaaatccttctcatggtttagacattgacaaagaaaacaatccaaatggagcatcagtgggatctggtttgaatattagtaaaaaacaacaaaactgtatgactgggttaaatgttccttgcacttcacaaatccaaaatgctgcttcttatgaaacagttgataagggtactgactatcaaggatggcttgatgctaagaaaagaaaatggaaatatgtccgtgaacaaaaaaaacgtcgaaggttgggtgctgccgccacttttgacgatcctaacgctttgctctcggccagacatgccaatcagctacctgtcaacagtcggaatagatctacatttttccagaaacaagaattggccctctttagatcacattggcagataatccagcttgcttcaagtacagtgcctggtcacttttttgcgtgggttgttgctgaagggattatgttcaagattcctattaatgtgcctagaactttttacctaaactcaaaggctcctgtcacagaagagtttccaggaaggcgtgtcaaaaagattctcccacatggtagaccttgtttcaaccttattgaggttgtaacaactgaagaacagttcagggctgaaggcaaaaaacttgcagctcatctagcagagccagatgttgagggaatatacgagacaaaaattccaccagagctcaatgctgttctccaaatcggatgtgtctgcaaagtggacaagtctgcaaaaagacgaagtatacaagatggatgggatctagccgagttgcaaatgaaaacaaccgccgagtgctcatatctggaacagacattttcatttttctatttataccacagcttgagtgaaggaagggctgtatatgtattttacttccccacgtctttccgaatacatgcagtgattgtcaatcctttccgtaacaaagaaatatctccgtcatttcttgaaaagcaatttggagatgcttgccaagcccttggttctgtccctgagaatctgtctttccatgtggactaccaaacatcaattgatgctggaagcaaatacgcacaaagaatgttacttgagtacaggcaacaacattctggacctgtcgtaggcatcatagagtgccctaagctccaagctataaaggtagctatacgagcacttgatgatttgccatgtgtaaccattcctagcaatgcacgtgacaacaactatcaggctcttggctggcaagcaacagctggccgaacaagtatgcagcgttgtgctgcatcaacccaatggttcaatgaacggatttcactcgctaaatatgcacatgtgccactgggtaattttgaactagactggcttctttttactgccgatgtattcttttcaagggcattgcgtgatcaacagcaggtactatggatatctgatgatggcattcctgatttaggaggcacttatgaaggagagacatgttttgctgatgaagtcattcagcctgcacttacttatcctggtgcatatagaagagtttctgttgagcttaagatccaccatttggcggttaatgctctcctaaagagtagtcaagtggacgaaatggaaggaggatcaatcggtagctttggaaacgacgtgcctccgggttcaaatgccactgaaactgactttgatgatgctagcttatgtatacctgctttccaggtgctaaagcaacttattcaaagatgcatttcagatgcagtgtcgtctggaaatgtatttgctgatgcaatattgcaacatctctaccgctggctttgcagcccacgatcgaaacttcatgatccagctctccatcgtcttcttcataatgtgatgaagaaagtctttgctctattgttggccgagttacgaaagctgggggctaatgttatttttgcaaacttttctaagataatcatagatactggaaaagtagatttgtcatctgcacatgcatattgtgacagcttattaaggaccttgcagacgagggacctcttcgagtggatagaattggaaccattgcacttttggcattccttactgttcatggatcagtataactatggcggaattcaagctaaaacacaaaacgtagactcttcagatggtgataatgatattgatattgtctcaagctggaacatggcagaagatttgcccaaagatacacaggatcattttgtcttaatcgtatcagaattcctatatattccgtggaaattcatgaaggaacaagtagctgctcaagctaccataagggatgatacctcatgcactccatctgtaacaatcatggctgctgagaatcttgagggccaggtgatagaacacctccgtgacaagattagcaattactttgcagacaagcttctaagaactgtaagtgatatacttcaccatttcaaagggaaaagcaaacatgagtcagatgaacctgcaaaatctgatcctcacacgcataaaggcgatgctgcattggagttcattaagcatatctgtgcagttcttgctcttgatcaaaatgttcagcatgatattttgagaatgaggaagaacctgttaaagttagttcgtgtaaaggagtttgctccagaagcacaattccaagacccatgcgcctcattcactctgccaaatgtgatctgcagctattgcaacgattgccgggacctggatctctgccgcgactcggcactccagggccaggagtggagatgcgcggtgccgcagtgcgggcagccgtaccaccgcgagcagatggagaacgcgcttctgcaggtggtccggcagcgagagaggctgtaccacctgcaggacctggtgtgcgtgcgctgcaggcaggtgaaggccgcccatctgtcggagcagtgttcctgcgggggctccttccggtgcaaggaggagccttcgtatttcctcagcaaaatgcgggtgttcctgaaggtggcggtgagccaaaagttcccgctcctgcaggactgcgtgcagtggattcttgaagccagatgacgcgggctgctacttcaacatagttcattagttcacctgatcgctaggttgtacaacgtgcacaggctgtagctccgaagagtgtataaacgggtgtatagcgctgccacagttcattgtagctctgccctgcttgcaaaaggttgttgttgtattgtagatattcaaaggtggatggcgagaaacgatagtaaccttggtatcgaaacatctggataactagccctctcgtatgtgattgctgggcatagactattctaagttatgatgtgggcatgtggttgcataagcggtttcgatgacgtgaatagaaatacacgcgtcggaccgtatgctgccagcctgccagtacactgaccttggccacgtcatactagttgtctgtttctgttgccaatcctacactgtattatctgcacaaaggaaaatgaaacggaggacgttgtgctttcgaggggccaggactcgttgggtggatgaagcacgcgtgcccggtgacctcagccttta

SEQ ID NO: 27677 - DNA, 2676 bp, Zea Mays
aggcagccgcccagccttgaagccgtcagcgtcgacccgcctcacgcttgttcgcccgttctccctcttcccggagttaggtacgacgacgtgccgccgctaggtacctccgcgcgaagacgacgcgccgctggtaggtaggccgtaggcgcgcagcccgcagccgtagagctgcccaggcccggccgactcccgatctgcatctctcggaccgcccgatgccctgcgggctgcgtccagcgtaacctcgcctcccagcgccagggtaaaccggccccagcgagggacgcgcctcaagcggagcccgacagaccggcagctgaaacccttgccaactggctcctgttttgccgggttgaagagaaccatgcaggacatgaagcccgccgctgctgcagtcgccaaggtggtggctggtgactcgcctccctctgctgctagtcctgctcctgcgccagcagtggccaacagcaatgggacaccacagaagccgcctcctattcctgccgccgccttcgacatgcccaagccaaacctccggggccttaacaagcccaagtgcatcctgtgtggtaacatcgcccgctcccggtgcccattccagtgttgcaagagctgctgctacaaggctcagaatccttgccacatccatggtatgtgtgatatactcctgataatctgcacttgaagttagtgacctacaagcagtttggtgaatggtgatattctatataaatatctgcacacttgcatatctggtctagccagtttaccaggcatcccttctattttttggttaggcaaaattgcctctatagccctctccatgaatcattcttaacatactactctccaaactcagtgttctatcttatcactctctagtccctactcagttttccccacccttgtgctgtgcgacacgattgaaaaccagtggcacaggttggaatgcaggattctcacagttacattctctgtctccaaggccactcgtcactcacaatcccctgtcgctttctgtctttactctcaatcttctacccctgcagccactgcagatctcaccatcctcagtgcagggcactctctagtggacatcaccatggtgcttgatgtccatgagcaagcaatgccacctgcatgaggtcatctcttagggactacaccaggagtgaagctgtgctccatgcacataaccgtgcgcgtgggggtggatgagggagagggagttctgaagcagaccaacacattgccagataagccgtcacctgcaactgctcctgcaacaacagaacagcaatctaacaatttacctgcaaccagttcagcgtcaaggctggctgccttgcaaaagcttccccagcactttctgaagtttctccaaacaaagaaatcagttaccaaaaaggacgttgcgggtataaacaagtggaggtttatgaagctaaaggaacatatgcaaggagataccgacgctgaaaacgaagcgtacgagaggtatacgcagaacgtcgggttactggaggaagcattctgtcccatggaagaagatgctgatgttgatcctgaggctgaagcaacttcttcttcagaggaagaaaggatggacctgttggtttcggcggcaaaggcgaggttgaagtcggataacgaagctgccaatagcttcagggagagggttgccactatcttggaccagaagctgaaggacctgcgcgggagccaaagcgccagtgagggtgacgaaccgtctggcccaagtctggacgatcgtctaaccccgaccccgatgaagttcagcacagcgcagaagatggggagagccacggaactgaacgagctgctgggtaagctgacaggagcacggagcgaggacgatctgaagccttgccgtgatcttgccgagcagctgtttgggaaggaggacggctcctctgttggcaattcgaacagagtggatacggagactgagccgggcgatcaggagtcagctgcagcagtagcacggcgctattccgtcccaacgctgtgcagcaggatggaggtgggtgaggacttcgcctcagagatgaacgatgaattctgctctttgactcaggtggcccagctatgaaacctgaaacctggactaatcgcaatgtgacatttttaggggatttcatcacatttaagcctagtttagaaactcaaatttcatccgaaattcgagtgaactgagggaaaaataaaataatttctctcaatcccctccaactcctgagtatttaagttcctaaactaatccttagggaacttaaatccttttttggaattgaaggggattaaggaaaaatatagttacctcaatgtgctttccaatttagaaggagatttgagtttttggaactcgcactgtagtgtcagcaagtgtttggctgttcgaagtgaggccagagcagtgtgggacgttttgtcgtacccctgtttcttagcccgtatttgttctggtatacacgaaagaagcatggagtgaatggatcgaacacgtcgcctcgaagttgcatggacaattcttgagcagctctctttggtgaagtacagtcagagatgcaaatgggtttgttctgctctttgatgattgggttgcattgcatcccaagttcccgatctgttatctggcagaattactattag

SEQ ID NO: 27678 - DNA, 3169 bp, Zea Mays
cgtgtggatgcctggccgcccgcccgcccacgcatctcaaccgcctcccgacgctttctcttccatgcgcgcgtcttggtcagagacaggcagatgcaggtgcgcgtgcccaagtcaacatttccttctacttctaccattcgccgactccttgtgccatccggcctaacctcttgtgatgctcaaagtaaaagcatctgtgaccttgatttcagctcactattctttgttgctaatcaatgtgttggtgtttgactcttctacacacttcacactagcaaaccccaggccgtctctaaggacaaatctagctagtctggtgcagccaaaaggaatcttcgtgttctacactccacaaagaccacaaaaagtgtcatctttttcttccttttcttggtcgacgaaaggaggaggaggaatgagctcataggaggcaacaagtgatgaggggtttaggattcgtgttgctgttggtggcagctgcagcattgatcaggccatcagaagtagtaggggcagaggaggaggactgggagcttttcttgttgcagtggaggcagcataattctcttccatccccacttctcaatggggatctggtggatagaatatggtcaatttgcttaccagacatggccggtgcacaggaaatattgggcaatccactgcaatttgcttcagatcagctattgagtcagccatcagaaaatgctttgaaggcaatgctgtttctggagtttctgtctcttctttcccctgaaaaattatccagtacctatggttgcatccatgcaaactacttcggtttgggcattccacaagaactcagtgtttcactggcaacctaccttgagagccatcagctgttgcttggttcgaacttctatgcgagacggcatttggctgacaactcaattggagatgctccttccatggctccagattttgcgccgtccatgtcctctggcgatgacgtgaagcttcctcagtctgttacagaaacaccgtatgcaccttccagctcttacaacaatgaaaatccaaaccgacctcatcacagtaaacctgcacagaagcatcggggagtacctccaatttcacttctggagaagcataaagactatgttagattagtcttgatcgtggttctaccaacagcggcattctcgttcattgctgcttttctaattttctactgctgcggatgcaacaagaacaaggtctctgtcggtgagcaacgagatgatcatcctcttcttcacatgcagttggctaatgtacctggttcatcacccgatgcccgtgtttctgccagtcaccttaacaaggataatcgaagtcattctggagtcagcatgagtcggtgcttttcatgctgttttaaaagatccactgatgccacaccatcttcagaagtgattggaggaacaccagagaataatgtcacaagtgatgctcctaaaccgatgtcgcctccagctcctccacctttgccacctccgatcaagaaggctcctcctcccccacctggacctcccagaggttctaaagcaagacttgctcagctgtcacctgttgagtcaagtcgttctgaaggatcatctgccagcgagcagaccagcgaatcatctgaagcagaagttaatgctccaagaaccaagcttcgacctttctattgggacaaagttcttgctaatcctgatcagtcaatggcatggcatgatatcaaattcggttcttttcatgtgaatgaagatatgatagaggaattgtttggttatagtggtggaagcagaaataaccttaaggataaggaactcccctctgcggatcctgcatctcagcacatttctcttctcaatgttaagaaatcatgcaacctggcagttgttttaaaggcaatgaatatcagggtacaagacattcatgacgctcttattgaagggaacgaacttccaagggtgcttcttgagacaatcttgagaatgaaaccaactgacgaggaggaacagaatctcaggctttataacggggatttctcgcagctaggccttgcagaacaagtgatgaaggcattaattgacacgccttttgctttcaagagggttgacatgttgcttttcatgtcctccttgcaagaagatgcttcaagtctcagggattcgttccaccaattggaggccgcttgtggggaactgaagcaccgcctttttctcaagttactagaagccgtgctcaaaactggaaaccgtttgaatgatggaaccttccgtggtggtgctaatgcattcaagcttgacactctcctgaagctatcagatgtcaagggtgctgatggaaagaccacattgctgcactttgttgtgcaggagattgttcggtccgaaggtgtccgcgaagcaaggctagccatggaaaacggaagaagtccagctcatagtgcttcagatgacacttccaatggatctcttgaagaggacggtgatcactactccaaccgcggacttagcattgtgtcaggacttagcagtgagatggacaacgtcaagagggtagccgcactggatgctgagcctctgtttgccactgtggtgaccctcagacaagagttgctgaaatcaagggagttcctgaatgaaattgcgacagtagaagagacgagtggattcagacgttcgttggaaagctttgtggaacacgcggataatgagacggggtttttgttgaaagaagagaagaggttgagatcgttggtgaagaaaacaatccggtatttccatggaaacgactctaaagacgacggtttccggttgtttgtggttgtgagagatttcttggtgatgctagataaggcgtgcaaggaggtcggggcatcacagaagggtacgaataaatcacgaagcagtggcagtggcagtggcaatggcaatggcaaccctacgttcccgtcaatcctacaggagcaacagttccctgctgttattgatggccattcagatagttcacatactagcaattgacgatgagatactaacctttttttgtaaagaaaaaaaaatccgttttggagaggaaatacattttagcatacatgtagatttacatacgtatcatcctacgggatctttttatttttaatattttaatcaatattttaataataaccgtg

SEQ ID NO: 27679 - DNA, 621 bp, Zea Mays
gcgaccgatcgcccgccggcatgcaccattagcagcggatgaagcaggcagcggcggccgcggccgcggcgcagcaggcactgctcctgcagcagcagtcgcagccgcccttgttccccgtgcaccacccgcaccccggcctcctcgccgcaccacagtcatcctttggtttcattgactaccatgatcgcagatatgctgcactagcaattttatctctcaatggcagacaactgtatggtcagccgattaaagtcaattgggcatatacaagtactccgagggagggcacatcaggtcattttaatatttttgttggggatctttgcccggaagtcactgatgctactttgtttgcatttttctctggttactctacttgctcagatgctagtgttatgtgggaccagaaaacaggacgatccagaggatttggttttgtttctttcaggaaccagcagatacgttaattgatcacgaaatacggagggcacgagatggattaatctcaagtgaagctgatgaatgaacttgaagattggatgatctgatcaagtgccaggatgggacatgctcgacaagcgagtatcatctaacaacactaacttagtgttatcacag

SEQ ID NO: 27680 - DNA, 1333 bp, Zea Mays
gtctgcgtctccattctccaccttcttcaaaggttcaactcagagaggagagaactagagaaagatccccacccccaggcgacgcgaccggcgagccccgaaaccctaggtcgcgcgacccgggcagcgcgcttctgcgtgactgcgtgtctttcggggaggggacagcgttaggacgcgacgaggttagcgaggccgtctggccgactataagcggaagaatctcctccgaagccttcctagagctgtgaagagcgcgtggatctcctggatttgcagactcgaggggagctgagacaagacatgggttggggaatatccaggttgattggactgaaggctgctgccctgctttctgtagcatgttttttccaaggactaggagtgacccttatctcatttcctctcatatatgcatccataattgcaatactagtctcgatagcttcccgcccatctattgatcttcctttactccttggcaaggcatccgatggaagttttccattgtggtcatggatcatcttctcaccatttcttcttttcattcacctgttcgtgctgctacggagatttgtgaaaaacgagcccttatacactgaggttgcagatggtgtgtttgttggagggtggccttcttcagttgaacacctgccaccagccatcacagattgagtctgccgtgcaatgggctgtgagaaagcggtcacagaacaagcctgtctatgtccactgtgcctatggtcatggcagaagtgtctgtgtgatgtgtgcgcttcttgtcgcattagggttcgctgaagattggaaagctgctgcacaaatgatccgtgagaagcgaccttctattagcatgaatactcttcaccgcaaaagcttggaggaatggtcaaaacatttgctctcctctaaaagaagtggggaatcagatgtgagttctgttatacattcggattataaccggaaataaaattgaaccagcaagggacaggcgtgttcagttgctgtgacattgaagatgcattacattcggtagtattgtttgctgctgtcctagtgaatgcctatggttcattttaaattatccttttgtggcatttgtgttgtaaaaactatatgtatcaaattatattagtactgtaggtttacccggctagttcttcaaggaagatgtactgtccttgtctccttttttctgataccagtgcccttgcctctcatcgaatgcttgccagggaagtgctgttgccggaccctttggggcgagaaaaccctgcattcttgcattcctgctgggttctcatttatagctatatgtgatatgtttcttata

SEQ ID NO: 27681 - DNA, 1509 bp, Zea Mays
caaaatcctatttccctctcccacaccacgcgccgcgcctgtctgattctgcccgccagccacgcccgcagatctcgcttcggcgccctgattccgtcgtatgcaagtttacctctgcgcgtccctgctaaccgttccacatagtatcacaaaaaaatggcactaccttggcatcgtcttccccaattcgggtgtatggaattcttggagcaaaggaccagcacacggtcacctccaaagaaagacccaggctgcttctacaaggagctgtacaaagtgcttcacgactgcagattttggatgagatgatggataatggttttccactcacaactgagccaaacatcttgaaagagatgatcaccccacctaatattgtgaacaaaatgttgaatgttgttactggcaagagttctacccttggcagcaaacttccagatgcagctgcttcttttgtaccttggcgaagaacaacagtcaaggatgcaagcaatgaagtctatgttaacatagtcgaggaacttgatgcatatgtgaacagagagggggttcttgtgaaatgcgaagcatacggtgaagtccaagtaaactgcagcctcccaggatgaccacatgtaagcaataggtgctgctaccagcaaaaaggaagccagaggccttgctgctggaccaagattagtccaaaggttatctggttttggggaccatcgatctgcagacaatgtggcaagagtggtagaggaggagcttgcacatgcctctatggtttgtattgatttctcaaagaatgccaagtgatgggtcgtgaaccaagcaatactttccaagacttgataaaggagtacgaagttgtactgaagggtccattcaactacacggctcgtgatgaagctggtataccccgagaatggttcatgatagattagcttgtattgttgagatggaaaaagagaatgcaagtttgggataagcagttgaagtctcatcctccaaagaacgttgaatcagaaatcttgtgtgagcatatcaagaaagagagggagacagcaaaggctggaaaacgaccatactatctgaagaaacctgaacttcgcgaaaggaagctaatgaacaagtacaacgagctcaaggaggcaggaaagcttgatgcattcatggaaaagcggcggaggaagaatgcctccaaagatcatcggttcatgccgtaccgacgcagtggagatgcataatagtttcctgattctggagacgagcgaaaggatgattttaggacggtgttctcatggtggctgggacactggacagtcagtgtctctgttactttgttgccctagccgtacaatcgtcagctccgtgcacaatctctactacttcttaagaatagagtgcaggcgtccacagtggttttttatgtttctcatttcactctctgcattttcagttacaactacactgcatatgctggcagatttgttcatatattactccagctgacattttcactatcgc

SEQ ID NO: 27682 - DNA, 1977 bp, Zea Mays
gcggcacctacgcggagggcggacgacgacgacgggggagacccggtttgacgcgcggcccgcgggatgcggatgcctctgctctgctctgctcggccgtgcgaatattttactgctcggcctcggccgcggcccgcgggggagccgttgccgttgccgttgccgttggatgtgatgtgcgtgggtggcagtggcagccgcagccgctgccgctgcgtgcgtgagtcaccgcggagtcatcagtgccctgcctgccgttggtgcgctgcctcgtgcctgcgcctacacgaccagttgcttcaaagttcaaatagcgcatcgccaccaccaaagtcggtagtactttcgctagctcccttccgttcccttcccacgaaaaccggagagggagtgagaagaagcaacaagaagcggagagccaacgcgcaacgcaacgccctgagatggcggcgccggcgccggcgccgaagcaggaggagctgcagccgcacgccgtcagggaccagctgccctccgtctcctactgcctgacaagcccgcccccatggccggaggccgtcctcctcggcttccagcactacctcgtcatgctcggcaccaccgtcatcatccccaccgcgctcgtgccccagatgggcggcggcaatgaggagaaggcgcgggtggtgcagacgctgctgttcgtggccgggatcaacacgctggtccagagcttcctcggcacgcgcctccccgccgtcatgggggcctcctacaccttcgtcgcgcccaccatctccatcgtcctcgccggccgctacagcggcatcgccgatccccacgagaaattcgtgcgcatcatgcgggggacgcaaggcgcgttcattgtggcctccacgctccaaatcatcatgggcttcagtggcctttggcgcattgtcgtcaggctgctcagtccgctgtctgctgctcccttggtcgctctcgtcggatttggactctatgagctagggtttccaagtgttgccaaatgtgtggagattggtcttcctcagattttactgctggtggcgctttctcagtacataccacatgcggcccccttgctgagtactgcctttgagcggtttgctgtcataatgtccattgccctcatctggctttacgccttcttcctgacggttggcggtgcctacaagaatgctgcccccaaaacccaattccactgccgtactgatcgatctgggcttgttgggggcgctccatggataagtgtaccctatccgtttcagtggggagcaccaacctttgatgccggtgaagcttttgctatgatggcagcttcttttgttgcccttgtggagtccactggtgcgtttatcgccgtctcacggtacgccagtgcaacaccatgccctccttccgtcatgagccgtggcattgggtggcaggtgtgtattcgaaaatatcgaatgacatctgggaactgacttacccgactaatttgtccgagtgccattccagggagttggcattttgctaggtggcatatttggaacagctaatggcacctctgtgtctgtcgaaaatgctgggttgctcggtttgacacgcgttggtagtagacgtgttgtgcagatttctgccgggtttatgatattcttctccatccttgcaacgaatctggatctcctcgaaggccacctagaatttggcggatggctggtcggtcggagctcccggccgtgcggcttcctcctgtgagttggttttgagcttggtgcaccctgcgccgctcctccccccccccttcttcgtcgtctacgcacccgctgtcctcgcttctctccccctcttctcgcttggtcttcttcgtgctgggggatggatttgtctcgtctggactttcgaccgggggtgctttttgaagctgatgtttggcgccggttttcctctcctgtttgccccggaagcccgcgctccccatcggcattctgg

SEQ ID NO: 27683 - DNA, 1892 bp, Zea Mays
catactcatcgatcggggtcaacgcaagaggactagaggagcaacaggagctatatgtccattggaaccaagatggatgcaatgtacacgtacgcacgcacacacgttacaaagtcaccacctgcacctgccggccggcggcgcgatcgaggctgctgagtctgatcttaacaacggcgacgtagggatctagccgatgatctggtcgagggcgccggtgttcttgagcccgagcacgatgccgacgccgaggatgtggccgacggcgccgcaggccagcgtgtcggcgagggtgaacccggcggggtcacccgtctgcaggccggagtcgcgcgcctccagcttcagccccgccgtcgccttgcggttcgcggacggcgccagcccgaaccgccccgcgaacagcatcagcgtcgtcgtcgtcaccatgatctgcgtgcgtgcatatgccgtcgtcagtgatctcgtcggtcttttcctcacgtacgtactcatcagacttcacatgtatacatatacctaccaggttggtggcggagccgatgtagtcgcagcggatgccctgcgacgacgacctcttcctgcccaccctcacggacggcagcgctgccaccgcggacctgggcgcggcgtagccccggaggccgtggaaccggggcacggcggcggagagctgggatgccatgtgtggcgcctgcgtcgtcgtcgtcgtacgtcgcacctctgtgccgctgtaccgtcctcagctagcgcggagtggtgtggtactggtggtagtggcggtggagctcaagtgcgtgtggcttaaagcctggacacggcgaggcgtgggatgggagccaccggggcagcttgtggcctgcagcggccactcgtggataggttcaggatcttcgctgctgacgtggcgtcgtctcgttagagcagggaagctgccacgtagatcggatcggataagatgtgatactggtctcctctccactcatgttgcttgctcaatgtgtggccggcgctgagactgagagctacagctcgctggctgagttagtggctctggccgtctgtgaaccaagaggacttgtgtgaggtaggtgaaacgaagtcgtcgagcgctctttccctctctctatacctctctgtctgcgacgcggttggataggctaccgccaggtgccgactgccgaggccctcaccggcggcgaagagcgcccgccagcaatggcagcaaggtgtagcctttcctcgtcatccctgtcggtccatggacccctccgccacaataaacccagcaagagactcgctccatgcctgccatcggcgccaagaccaggagccgctgctctgagagcgcgtgctgcgaaacttcctccaggggttgaagcgcccagggtgcagccgaagctgagcgagcccttcttggggttcacccagaccgcggagatttggaactccagggcctgcatgatcggcctcatcggcaccttcattgtggagctggtgctgaacaaggggattcttcagatgattggggtggaggtgggcaagggtctggaccttcctctttgaagggtgaccaaatagtaacattatcgtttgatggcgtattatgctggccgaaaaacatgagggtttcacttgcttttgacttggtggctacatatgcatgttcatcaagcatgtccttggatatccggatgttacaacatcaactatgttaatgacttggtggctggccgtttgacagggttaattggtgaacaaaaacgtgtgccttgtgaaacagaggaagataattgatgccaccgtgagattagtactggtttataaggtagtatacatcggtacgaatacgacgaatacacgtggccgacgattttgattctcgtttatga

SEQ ID NO: 27684 - DNA, 1244 bp, Zea Mays
attagtcttatcttgtcttaactgaaaaacgataataaacccagtgtcttagtcttacatactcgatcgaagtgtttttaggagaaaaaaaactatagcatcctgaattagacaagtatcaaaaggattgaagaaatggagaagtaggaatattatgtacgcataggttttgtcatgaagttcacattggaaccacgggtcatcagatgaaaacatgctatggtttcaagcgtatgatcaaggacagaccacatgaatgggaaccgggcaacttgaatgacatccttgttcctgttcaggctttccaccagaaaaatatgtttgagcatgagataaaacatgaccagcggttcgacttcactcgcgtcccagctgtacttgagctgtgccatcacgcaggtgcagacatacctgatgagattctatacagaagtggacaaatgtctactacactcaaaaccaacaatcagcaatctgctccaatcttgccagatgaactcagatatatcggtcagaaaacactggatgcatgggaaaacctgagattaggtgccacaaaacttctcttggtgtacccatccaaagtttgtaagcattgctctgaagtgcatatcgggcaatcagggcacaaggccagaatgtgtggagtattcaagtttgagggctggaaagggatgcacaagtggaacaaggctggagtggatgacctagttcctcagaacattgtgtggcatcggcggcctcatgatccacccgtccttgtggacggtgggagggattattatggccatgcgcctgctgtcgttgagctctgcatgcaagtgggtgcaatagtacccccgaaataccattgcatgatgaagacacacggcttagcaccacctgttggatgagaccacataccataagtcgactgcctgtatagatcagagaccaaaataatttgcttaaggatccaaaagactcttctggaagaagccatctattaactgtaatggctagctaaggagatacgctgttttgaagattattagtgttattagaatccagaaggtgagattgaaaagaaaagattttctgaagactagtagcggttgaaggccctcagacagtaggggaaattttgcattgtaaaagattataacagctttacttcattggcattcatttattcaacgttgtccttacattttcccccgcacttggattttaaccgtacgggcagttttgttgagctgccaaaa

SEQ ID NO: 27685 - DNA, 475 bp, Zea Mays
cggccgagcacccccatgttctagaagcttctcccttgcgtgaatgtagcaatagactccggcagttgggatctcctggcagcgaatcataacaaattttgtcccaaaatctaatctccgtagcgaagctgtcattgtttgttgcgattatcccggtagatttcgactcagactcgattccatcctgcgattataaaagtccagccaccatagccatgcgagcagcgcacgtcggagagggagctcgggtgtcgtcgagtgcggaaccagggagccccgtcgtccggggggcttcaccgcgccgcgctggtcaggtccgtggctttggccgggcaggttttcgcccagaattgcggattgggcggaccttctgtcacggagcttcttctcgtcgcgagccgcaccgattgtgcccggattcgtgtgaggttacgaatctcgaagagcaagttggtacctagaatctcaagtccca

SEQ ID NO: 27686 - DNA, 1184 bp, Zea Mays
ctttgagcttcctcctgtccttttgctgcaactagtagcactggcttcatctagagggaccgtctcctctcctgcacccagactcctctctctctctctctctctctcccctctgtgtgcggtgtgccctggcctcctccgccgccattgcagcgagcaagatcaatccctctgctgccattcatgagtcaagctggggcattccctcctgggaagaagatcacggtggtgtttgtcataggcggcccaggcagtggcaagggcacccagtgctccaagattgtcagacactttggattcacccacctgagcgctggcgacctcctgcgccaacaagttcagtcagatactgaacacggtgccatgatcaagaacctgatgcacgaagggaagctcgtgccgtccgacatcatcgtcaggctcctgctcacggccatgctccagagcggaaacgacaggttcctcgtcgacggattccctcgaaacgaggagaaccgccgagcgtacgagagcgttattggcattgagcctgagttggtgctgttcatcgactgcccaagggaggagctggagcggcgcatcctgcaccgcgatcagggaagagacgacgacaacgtcgacactataaggaagcggtttcaggttttccacgactccactctacctgttgttctgtactacgacagaatggggaaggtccgacgggtagatggcgccaaatccgctgatgcagtctttgacgatgtgaaggctatatttactcagctactgaccactcaggcaagccaaggtggcaatgcgagcagcaggcggagcaatccgccgctttgttcagtgctctaggatgaagcaacatacctccagctccaaataaaaaaaagaggatttcagaaaacacacacttgctgtgcgtatgtggtgtgttcgtgctgtgctgtgctgtgctgtgcagatttaatggcttgttaaaaagaaacagagaataatggccctccccagctgcagctggtatggttgttcgctcagtggcagcactagaggctgcgagcctgctgcaaacacacagcttgtatttctaattgtaaaatgtagcgaaatggatgaatgtgatgtgtgcaactcattcagtttgctttgctgcatctcatctgatgatgcttgtgatggctttcttccgcaaagct

SEQ ID NO: 27687 - DNA, 2358 bp, Zea Mays
ccgcctccttccactccctcgccaccaccacgcaccaccacctctgctctgctgtgtgtgtgcctaacgggtcggaggcggggacggccccaccgccccgagctcccaaccgccgacagtctccggcggctccaacttcaatacctccctcctcggcatgccggttgccgtcgcgttggcggcggccgccgcgctcgtcgtcctgctcgtcctgtccgcggtggccgccgccgttttcttcgcgcgcacgcggggcgccaggccgccctcgctgtcgcgcgtcgagcacgcgccgtcgtccgcctccggctcctcccgcgccgcgtcgtccgcgcgcaaggagaaggtcggcgcggaccaggtcgccgagccgggcgccgcctcctctggcgtggccagctcttccgcggccgcgagctccctcgagtcgccggtgaagaggaaggcggaagcggtcagggtcggcggcggcggcggcggggccgccgcgggggtggagatggaggttgggtgggggaggtggtacgacctgacggagctggagatcgccacgggcgggttctgcccagcgaacgtggtcggggagggaggctacggcaccgtgtaccgcggcatccttgccggcggcgaggtcgtcgcggtcaaggacttgtttgatcacaagccgagaaggaattcaaggtggaggttgaagccatcggcaaagtgaggcacaagcaccttgtcggtctcatcgggtactgcgcagaaggtccaaaacggatgctcctttacgagttcgtcgaaaatggcaacttggagcagtggctgcacggcgacgtcggaccggtcagccctctgacctgggaaatacggatgaagatcgccgtcggaacggccaaaggcatagcgtacctgcacgaaggcctggagccgaaggtggtgcaccgcgacatcaagtcgagcaacatcctgctggacaagagatggaaccccaaggtgtcggacttcggcatggccaaggtgctggggcccgggtccagctacgtgacgacccgcgtgatgggcacgttcgggtacgtggcccccgagtacgcgtcgacgggcatgctgaacgagagcagcgacgtctacagcttcggcgtgctgctcatggagctcatctccgggcggagccccgtggactacaaccggccggccggcgaggtgaacctggtggagtggttcagggccatggtgggcgcccggcgcgtggaggacctggtggacccgcggatccccgcgccgccgccgcctccgcgggtgctcaaccgggtgctgctcgtctgcctccgatgcatcgacgccgacgcgcacaagcggccccggatggggcagatcgtgcacatgctcgagggtgacgagttccccttccgcacggagcaccgctcgccgcgggcgtctcaccggacgtcgacgggctcacggccgtcgcttctgtcggagaacgtcggtgccaccgacgactcggacaagtcgatggcgagatgaaggatccgagctgcctgcacaagcaactctgcaaacaagcaagcaaccctccactaacggatctggcgccgtcgtgcggcgtgcgaggagctggagcagaggggcttgggggctggactgactttttttcacccgatgtaaatttttgctgttgattaacggcgggatgagcgttctaatttgctatgctgcttgtttggtttgacggtctttaccgtaaagtatgatttgacgtagccgaacacatcttctctttgttgtttgttattactaggcttccggatttgggcaccacccgaagctttcttcgaccggcgtgctccctccgccacatgatcggattgcttacgggacgacgggaaatcccggtgatgagatcaagtgtggaacaacatgtgatttaggggcgaaagggaagacgggaggggtattgtttggtttaggttctatatattttgtaccaacgattatgcacttagatatagatttcttttatatctatgtacctagtagaaatagtatatttctaaagttaaagaggtgttatagtttataatgaaggggacagcttcttattgcctagcaaaatagaagtctaagaggagatgatgcagataaaataatcgttacatgccaaaggagcccaatttctgacatagttaccctatttcgatctaattccctgacatagttaccctgaccaagatggatctgaccatgataaaactagttggcatccccaaacataattaccccgaccaggttggacccgacctcgaccatcccaagcaaaagtcttgatccaagttgtcctagtcggttggcctcgactttagtcacgccaagata

SEQ ID NO: 27688 - DNA, 3668 bp, Zea Mays
ggccacaaagctcccacctccactcccctccattataaccacccccgtcccacaaaaccaccacgccgaggcagagcagaacccagcagctccaattaatggactgcgcaacagcgcagcgcagcgcagcatttcaaaccgagccaaaccggccgcagcatcgcagcgcaacgcagcgggcacgcgccttgggggtggagggaatgacggaggcgtcggcgatcctctcgttctccgcggccgccgtggtggaagacgtgctgcggcagcacgggtgccgcctcagcgaacgcgacctcgcgtcccgcagggccgaggaagccgcggggaggaggaacgaggcggcggggtggctgcgccgcacggtgggggcggttgccgcgcgcgatcttccggaggagccgtccgaggaggagttccgcctcggcctccgcaacggccagatcctctgcggcgcgcttaaccgggtccacctgggtgccgtcccgaaggtggtcgtaaacacggcggcggactccgtgctccaggccgacggcgcggcgctgtcggcgttccagtacttcgagaacgtgcgcaacttcctggtggcggcgcaggagatcggcctgccgtgcttcgaggcctccgatttggagcagggagggaagagcgccagggtggtgaactgcgtcctcgcgctgaagtcatactgtgactggaagcaatgcggtggcaccgggccgtggaagtacggggggaatcttaagccatcagtgtccggcaagtccttcgggaggaagaactctgagccgttccagaggagccaatcgatcaatgaaggtgaagtgccctatgaggaagctgggttcaatggctacgctcattttgattccagcgacatgtcaacatggcgcccccttaaaatgttggtcagtgcagttttgtccgacaaaaggccagatgaagttccacaggtatactaatttgcttcactactttttgtaagttacctgttcaatggacttatataatcgcttttattgttttttatcctatgggattaccagttccatgatgtttttattctgttgtttgtatgcagctcttggagtccatgctgagcaaacttgttgaagaatttgaaaatcgtctaaacagccaaaatgaactggtcaaagcggctctaaaaaatggtattgataacaccagatccttttcaaaatcaaaggttctggttgagaccactcctaatactagtgggagaaagatggatacagcagatatttactgtaaccataaacaaacaaaaaaagtagcatcaagtgaattggcactgaagcaatattcaattctacaacaacagtcaaagaatgttgaggaacttaagagtgatttaataaatacaagggatggtatggagtatatgcaaatgaagtacgctgaggatctcaaccttcttggaaggcacctgtttagcttggctcatgctgcttctggttatcacaaagttcttgaagaaaatagaaaactatacaaccaggtgcaggatcttaaaggaagtattagggtatattgtagggtgcgtccctttttgccgggacaagcaagtccgtccactgtggcttccattgacgagggcaacataacccttgtcatcccttccaagtctggaaaggaagtacggaaaacttttagcttcaataaggtttttggctcatcagcgacacaagatgaggtgttcttggatactcaaccccttattcgctcggttcttgatggatacaatgtatgtatctttgcatatggccaaactggatcagggaagacatacacgatgagtgggcccaaaaacatgactgagcaaacccaaggtgtcaactatcgggcacttggtgatctatttaagcttgctgaacaaaggaagagaaccttcatttatgatattgctgtgcaaatgattgagatttacaatgaacaagtcagggacctccttgtcactgacggtctcaacaaaaaattagagattcggaataactctcaaaatgggctaaatgtgccagatgcaagtcttgttcgtgtggcatcaacaatggatgtcatggaattgatgaatgttgggcacaagaatcgtgctgttggtgccactgcactaaatgacaggagtagtcgttcccacagttgtttaactgttcatgttaagggaagggatctgacatcagggacaatccttcgcggttgcatgcatttagttgatcttgctggcagtgaacgggttgataaatcagaggtcactggagaaaggttaaaagaagcacagcatataaacaaatcattgtcagccttaggggatgtaattgcttcgcttgcccaaaagaattcacatgtaccttacaggaatagtaaattaacacaacttctccaagattcacttggaggtcaggccaaaaccttgatgtttgttcatataagcccagaaagtgatgctgtaggagaaaccatcagcaccttgaagtttgccgagcgtgtgtcaactgttgaacttggtgctgctcaactaaataaagaatctggagaagttagagagcttaaggcgcagattgctcaacttaaatcagcattagctgcaaaagatttaggatcggagcaaatcatcagtcatgacactgaggcatttaacataaagatgccttcgcctggtttttcaattaagcgacagggtagctgtgatctactgtctacccaaactaacttcagacaaccattggatgctgttggaaacatagaggctagagccaatcctacactgaggcaaaagaaaccaagctttgacctccaggatttattaacagcaaatgattctccttcatggccagatagcaatttgagggtaaattttcagacgggagatgaaagagaagtaattggtggggactggatagataaggttgtagtgaacaacaataattcagtcggtgactgggagggtgacaatgcagctttacctgacttcttttaccagagatatcattcaggtatgagggagaagcagtaccagaggaataacacaagacaaaaggatgaccatgagtatgaagagcaaaggtctcgattttactctaccaatactgatgattctgatgacattgacatggcaacaagtgattcctcagaatcagatgcgctatggcagcagctcaatgtccaaagcatggataactctattagtttgagcggttcaaaggttaagaaaccacaaataaagcttagagatggttcagatgccaggacaccaatccattctcaaataccatcagcgtcaagaaaagttgcaaacggttcaaacagatctgttaggcagcctttaagcagaagcgacagcagaaggctttcatcaaatggaagacaatctggtgcaaagtagggacttacaatgatcgtgtgcattttttgcctttttctcagtgtttgtcacgagagattgtgaggatgttcttgagtacagcaatgagtgacaataaacccgattgattgtgtcagtgtggtgagttgtgatctcaacaactggtgtgtgaggccattaacctttttttttccttattggccttcaggctatgttgagttatagctagttctttgtatctgttcataatataaatttatataatgaaaagaaagcaaatcgattgatc

SEQ ID NO: 27689 - DNA, 1879 bp, Zea Mays
accatgcatgctcagctcaggtgaacatgttaatgttactagcctgccttcttctgatggagttggtgacgaccagactagacaccaccagctagttgagcagcattcagcgtgtggtcgtcaaagtctctctgctaggtagagacaagccgctagctccattcctcggaccccctgggctgacgctgatccgacccaccaaagtacagccacacacacgcacgcacccgccgcgcccgcgcaccacggccgccgcaggctaataagctgtgcgcccatgtgctggctctgctctgctctgctctccggccatccacctccttttcccacaaaacaacaacgacgccggcatggcctaacgcctttaataattggcatggcagccacactctcttgtcactgaccggcgcgtagatatgccacccggacatgcctctttcgatatggggcctcatatgcatgcatgcacgcatgtttccatgtcgctctcacatctagctgatatcatcctatatatatatatccttattatgtagttgcagcttccatgttacatttagctacttctgctataatgtagctgagtgtgtgtgtgtgtgtgtgtgccagtggtccatggatgactgatcatttagctacattcgcacagcgccgtgcagaacatagccatgtattgttgctgtcggtcccctgaactgagatcgatgcttcgagtgcaagaaaattatgctgccggtcgctaagctaggttgttgttgttggatcggcacgcaccggtagcgggtggagagcttcatcgagcaccaggacgcgtgcaactccagccggatgcgcggcgaggcggtggtggtggccgtgcccgtgcccgtgccgccgccgtcggcgctcccggtcatccgtcccgccgtcccgcggcatccgcccacggtggcagtagcaccgccgccgccgccggtgctccagctcctccccgcctccgcggcggcatcagcgccgcggactagtagcgccacgacgaccgcctctccgtccaccaccacaaccgcgtcccaccaccaagcaaaaccccacgcggcgacaacaacaaagctgcagctctccatcggccccatcgtcacggctgcggcggcggcggccgtcgactgcggcgaggacgagtccgaggcggaggagctgcggcgcgcggtggaggagaaggccgcggcggacgcggcgcgggagcgggcgcgcggggaggccgcggcggcggagcgcgcgctggacgaggcccgccgcgccaggcagcgtgcccgggccgacctcgagaaggcgtgcgcgctgcgggaccacgccgctcgcctgctcgggcaggtcacctgccacgcgtgccgccaccgctcgctcgccgtcgccgtggtcaggggtgccgccgagggccacgccgccggccccgcggtggcctgcgactccatcaggggaggaggcttaggagcaggcatctagctagctccaccactcgtgcatgccattgccatgcatagttcatgtgtgtagatcaagctaagctaattcgtaggccggacttgtgcatagtgtcgtgtggcgattactgcttgcaaccacgcacccactttggtttctagggtgctacaacttgcaactttggcctggtaaaggtatggtgaatgagatcatgcacgttaaaaacggagtgtgtattggatatgttctcacacttggtaagggaatgaatctaaaacactcggtaaaggtacagaagtaggtattgactttcttaagtatttgtcctttgattttcctctagtggtattgcatatgtttaatatgtaagagggagtaatgttagtgtgttacatttttctggtttcataccctcatt

SEQ ID NO: 27690 - DNA, 1807 bp, Zea Mays
cttttatcgtcgagtctcggagccatgcaactttacatcaagatgtgccaaggaagctcttgaggtggtccacagaaaatagctcaaggaatgcatgtgaaaggtctgggttgaatgaaaataatcaggacattggtgattcttcagaaaagcaggagcatctcctggctgtgccaggtgtgattctcttatgctgtggccttatgttaccatgctttcatgctgaaaggaaagaagtcagcaggcatgacaatgcaaccattcagcgcaacgcacttgaatcagtttcatcctatgaaggaagcatgtcatctgagaaagtcccaccaactccacatcgaatacctccaagtccctctagatttgcgccgtctccacagatagctagagttggatctgtcaacttaagcatccagcagatcctcagggcaactcagaacttctcaccttcatttaagttaggtgaaggaggatttgggatggtctacagggctgtattgccagatggcaatgttgttgcggtcaagagagctaaaaaggatcagtttgcaggtcctagggatgagttcagcaatgaagtagacttgcttgctaagatagaccaccgaaatttggtgaggttactgggttttactgataaaggaaatgagcgcattatcatcactgagtatgttccaaatggtcaacatggaagagtcctagattttaatcagcgtctagaaattgcaattgacgtggctcatgcacttacttatcttcatctgtatgcagagaagactataattcatcgtgatgtgaagtcatcaaacatcctgctgacagatagctatcgggccaaggtgtctgactttgggtttgcaagaagtggccctagtgacacggagaagacacacatatcaacgaaagtgaaaggcacagctgggtacctggaccccgaatacttgaggacataccagctaactccaaagagtgatgtcttctcatttggcatattgcttgtagaaattctttctgctcgcagacccgtagagctgaagcgaacccctgaagagaggatcacaatcagatggactttcaaaaaattcaacgaaggcaacacgagagagatactggacccattgctggaagatcacgtggacgacgaggtgcttgaaaagctccttagcctggctttccaatgcgctgctccgacacgggacgaccggccgaccatgaaggaagttggggagcagctgtgggagataaggaaagagtacggaaagagtgttaggaaggtgtgaagatcatggaaaacatttccctgtttctcaagactttccctggaccaaggggactaagggggtgtttggttttatagggattaaattttagttcttccattttattctatttaagtccctaaattaccaaacacggaaatcaaaactttattttagttttagtatttggtaatttagagacttgaatggaataaaatggatagactaaaaataagttcctagaaatcaaacaccctctaagcatgcgaagtatttgtgcccattggataaacacctgatcatctatgtttcttggaagatgtgacctgaagaaatgtacagtgcgataacaccgccatcagtttgtgctttcttgtctcagtttgcagtgcactccctctatggagaatgtatattttggagttctcgcatttcttgattctgttgatatggtattctgatggatgtacccgcatacattactgcaaacggtctgaaataatatacgaagggaaattgtttgtattggaagacactgaagcttccgg

SEQ ID NO: 27691 - DNA, 613 bp, Zea Mays
acttccggtcaaatttccagcactagtcccatggtgcgatcctagtctggcgcccacggggtagttagtagcgccgccgcagccccttctcgatctttgaggcaaagctacgactccaccaccgctggcatggcgttcgagaagatcaaggtctccaacccaatcgtcgagatggacggtgatgagatgaccagagtattctggcagtctatcaaggacaagcttatctttccatttctggacctggacatcaagtactatgacttggggatactgcaccgtgacgcaactgatgacaaggtcacagtggaggctgcagaggctactctcaagtacaatgtggccattaagtgtgcgaccattactccagatgaaactagggttaaggagttcaatttgaagcacatgtggaagagcccaaatggcacaattaggaacattataaatggtactgtgttcagagaaccaattatatgcaaaaacgttccaaggcttgttccaggatggacgaagcccatctgcattggaaggcatgccttcggtgatcagtaccgagctactgatgcagttctgaaggggcctgggaagctgaagctagtttttgaagaatgga

SEQ ID NO: 27692 - DNA, 2677 bp, Zea Mays
atgtctattgtgccttgtgatgtgtgtgtctgtgaattctcaatggatcgtgacccatgggcaaaattccgacgcccaaacagtgagcacccagcccaatcagaggagacacgcacgcaccagcaccctggtgtggccggtgcccggcggccaaacgcgatgccatctccgtctccagccccgccgccagtgctgccgatctcggagcacgaggacgagatagtcgccgcggtggacgcgaacccagtggtggtggtcatcggcgagactggctccggcaagagcactcagctctcccagatcctccaccgccgcggatacacccgtcggggtgccatcgctgtcacccagccccgccgcgttgctgcggtttccgtttccagaagagtagctcaagagcttggtgttccacttggggatgaagttggttatgcaattcgatttgaggacagaacttcagaaagaacatgcataaaatacctcacagacggcattcttctccgtgaaagcctttcaaatcctgagttgaagcagtactcagtaatcatactggatgaagctcacgagcgtagcttaaacactgatatccttttaggtttgatgaaaagattgatcaaggaccgagcttcagatttaaaagttttaatcacctctgcgactcttgacggtttaaaagtttcaaagttcttctcaggatgccctgtgttaaacattcctggaactttattccctgtggagaaattttacagcactgatcgcccaacaaattatatagaatcttcactcagaacagctatagatatccatgccaaggaacctcctggagatgtcttaatatttatgacaggaaaggatgatattgacaagatggtatcaaaattggaggaaagaattcgaaatcttgaggagggctcctgcatcgatgctcttgtccttcctcttcatggttctttgccacctgagctgcaggttagagtatttgctccagcacctccaaactgccgacgcttcattgttgcaacaaatgttgctgaaacttcgctgactgtagatggtgtcgtgtaagaagcaaacacaatcagttcgtgattgattgtggttatgtaaagcagcgccaatacaatccatcaagtggaatgtattcacttgatgttgtccaaatcagcagagtgcaggctgatcagcgagcagggcgagctggtagaactcggcccggcaagtgctataggctatacccaatttccatatatcagaatgagtttcttgaggcaacagtccctgaaattcaacgctcttctcttgctggaagtgttctgtatctgaaatcgttaaatcttccagacatcaacatactgaagtttgattttctagatccaccatcacgtaagataaaacttcagattctttattcttatagtttcaatcattcttgtggacctgtctgtatgcacctatttgttgcctagttacttattttgtttggagttcgatggctaatttctttttttctcgaacacgcaggagagctacgtatcattatattaaaagaagaaataaacaaggtctaaaatagaccggggtacaattgacgccttacggcagcctgaacgacactaacatagactgacttatctatataactctaggctacatgagagagggaagcaacaagggaggtcaaccccttggccccggcagtctcccacagacggcgctcatccccaacatggattaggaaattagcaatattaggggaaaggccatcaaagatgcatctgttccggtgattccacaaaatttcaactgactgttttctgaagcattgcaaaattatgttattactatgaagtccagtgaagaaactacttttgtgatgactactcatgtcacttttgaattgttacacgtggttaggggaggaaacctcttggaggttgtagttctgatgggtggtatggtagggtgatgggctttgttgctggcaactcgtgatggtttttccagccttggtgaacattggcagtggctacagcttgggcaggggctggtggcagcgcaaaggagagtgagagggaactttaaggcaaaaacacttttctggttaatccatatggatacatccaaaagatgttatatatatgatccacccttcttaattcaattcaagctttcgccacaaagctctcttattctctaatactgataactttttggcggccccgaattggaggggtatggaggttgcagcatgctagccgtaccctctggttgctgcaacatgtagatgtaggtggtggctactgcctcttgggttcagctgggctgcttggcccatgggcattatgccaaaaacataaatgtgtaaaagtgtacttacagaagacataaatggccaaaagggggagctatttggtgccttgaaataaataaaataaaaaatatgttctttggcttctgcctactatttaaaatttacaaatgatttgcaggtgagtcattagaagatgctttgaggcaattatacctcattgatgcaattgatgaaaacggacaaataacggatgttggacgagttatggcaggaatatgctacaagttcttatagcacaatggaatcgtgaatcgtagctgacacctgacagactatgacaatcgaagtgtttggtgggattttcac

SEQ ID NO: 27693 - DNA, 1210 bp, Zea Mays
gctttttttttttgcagccacacagcccaaaccttaaagcgccgcgcccatcccttcttctcacgtactctactacacgtctacaccttggctctccttcggtcctgcacactcccgcgtcagctgccatcccggagctcggagccgtcggcggcagcggcaccactccactcgcatggccgacaagcagctctccacgatcgtcctcaaggttgaccttgaatgcgagacatgctacaaaaagatcagaaaagtcctccgcacaatccaagacaagatgaacatcgagacgatctcgtttgatgagaagagcaatgccgtgacgatctccgggccgttcgactccgacatggtctgcaacaggctctgctgcaaggccggcagggtcatcaaggagatggacgtcaaaggcaacgagaaggacaaggagggcaagggcgacaaggaggataccaagtcagacagggcagagaaaggaaacaaagacgggaaggcggaggccgagacggtggagttcgacctcgacgtggacggcgtggcctccgcggcggacgcgaagcccggcaaggccatggcgatgccgcccggcatgaccaaggccgacctcggcccgctcctggagaagatgatggcgccgggagccacgcagagcgtggtcgtgccgtccatctggcccgcgtccgccgggttcgtgtccggctactacggctgcaacccgggctacgaggcgccgccgtcctactacggcgctggcgctggcgctgtctacggcggctactacggcgtgccggtgtacgatagccaggggtggtactacggcggcggcgcccggcagcagccgtactacccgcaccagcagcagcactgctgcgaggaccccaatgccgggtgcagcgtcatgtgatggcgatgcccgtaaacaaatggagagccacataaatcagtgtgtggtcagtggtcgtcacacaccatggtcactgactcactggtcagtgccaccgtgccggtggggggtagaaccttttttccccgcgtgtcatcttgttgtccgtgttttctagatagaaacacttttaaacggtaacagtaaaaaattgaagtgttccctaaaatatgttcgcttgcctctctccgggtcactagaggcaatgaaaatacaaataagagtataaagcttataaccgttgcaaccaaagatttctttttatag

SEQ ID NO: 27694 - DNA, 2370 bp, Zea Mays
gcttacgtgtgccggttactgcccgcgccgccctggctagaatcttccgtctctttcgctaactgtttggatcattttacgtggagattgcatgccatcaccttccttgaagtgaaaaatatatgggctgatcttggcatttcatgggaggttttgaagatgatgaaccaccctcaaaacgcgcaagagcatcctcagtagaatctgcaagtttaccagactgtttcttgttttcaaaatctgccaatcctttgggaagtacaatggctagacctttgccttcccaagggaaagaagctatggttggttccaagggtgttattaagaaggaggaatttgttaggataatcagcaaaactctgtatagtcttggatatgagaaaagtggagcagttctggaagaggaatcagggattactttacataaccctatggtgaatcttttcagagagcaggtgattgatgggaattgggataatgcggttgttaccttgaataagattggccttcaagatgtaaacatcatgaaatctgcggcatttttgatattggagcagaaattctttgaacttctaagaaatgacaatgtcatgggcgctatgaagactttacgacgtgagatcacaccccttggtgtgaatagaaaaagagtgcatgaactgtcgacttgtatgatttcttgttctccacagcagttgttccttgggttttcaaaacttggcattgattcttctagttcaaggtttaagcttctagaggaattgcaaaaggtgctccctccaactgttatggtgccagagaggaggttagaaaatttagttgagcaagcacttactgtacaaagagatgcttgctacttccataattctgttgatgggttgtcactttacattgatcatcattgcgggaaagatcagctaccatctcgcacgttacaggttttgcatgcacatcatgatgaagtgtggtttgtccaattttcaaacaatgggaagtatttagcctcagcgtcaaatgataaatctgcaattatatgggaggttaatgaagatggagagctattactgaggcatacattgagtggtcatcaaaagtcagtgatgatggttgcatggagttcagatgattgccagctcctcacatgtgggcaggaggaagccatcagacgctgggatgttaaatctggcaaatgtcttcatgtttatgaacatcctggcattggtttgagatcatgtgcttggtttcgagatggaaagcaaatattgtctggtctagctgatcaaaccttttgcatttgggatttagatggtaaggaagtagattgctggaaagggcagagatcggcaacaacatctgattttgctgtagcaaaagatggaaatcttataataagcttgagtagggacaatgcaattcttctatttgatagggagacaaaacatgagagaataattgaagagggtagtacaattacttcattttctctatcagaagatggtgatttcctgcttgtaaatcttgtaagtgaagagattcatttgtggaacataagaaatgatcctgttcgagtcaaccgatacaatggccataagcacagccggtttgtgataaggtcttgttttggcggatctgagcaggcgttcattgctagtgggagtgaagattcacaggtctacatatggcatagagccactggtgatctcattgagactctcgctggtcactcgggcacagtcaactgcgtaagttggaatcctgtgaatccccacatgctcgcatcagcgagcgacgatcacacagttcgtatatggggggcaaaggtcagtcttaagcgcaaggatgttgggagcagcaattgcaacagtaacgggttccaccactcgaatggaaatgcacatggcaatggtttcgctcaccagtgcaacgggaacagcaccaaatgatttgccaaggcaatgtacccccatggatggttgactggcatctgtaaatccccctttacttccctcctagaacaagagtcgccgccgaaatagtaaaagaaaagaaaagcaaaaaagaaagctgcagcacaaagtgtgggcaacctgctgggtttcgtgcgccatctttcccttgttctatcatgacagccatcacatttatttcttaattcaagatgggatggaattatgatattactttgcgtctttgatatcttgatttatcctccctgattgattgtaacttcattttgatggtggtgatggttaactctgattgctgtctaaacaaccggacggaacttatcataaatttaagtaaaatcagtcatctagttcaagggatcaagtggtttgtttgattgccatattattccctataagaaaa

SEQ ID NO: 27695 - DNA, 1383 bp, Zea Mays
cttcttaacagtcggaactcggaatcggaagtggcgtgaagcaacgaaacagcgacacgccatcaacagtaccattcagatcggaatcccagttagctctctgtgccctacctgtcagtgacacagaaatccagtcggcggggctgccgcctgccgcatcctcccctcgcccaccgtcgacgacttgatcccctcccaccgttgaggccgcctcctcacggcagcgagccagcgactcctctcttcgtctcctacaagtagccagacaccactccgactttgccggcaacccgtcgacagcgacgaggcgcagcataaggcatacgggcacggcggccatggcgaccagctccaaacccgccgcgcccgtggaccccatggtcgtgctcgcccacgagttccccgaggtgtcattcgactacgacgagagggatgtagcgttgtacgcgctcggggttggtgcctgcggcgatgacgccgtcgacgagaaggagcttcacttcgtgtaccacagggatgggcagccacacattaagacccttcctacttttgtttctttatttcccaacaagaacagcaatgggcttggatttgttgatgtgcctggccttaactttgatgcaagccttctactgcatggtcaacaatacatagagatctataggccaatcccttcgtatgccagtgttgtaaacagggttaaagtagctggtttgcacgacaaggggaaagcaactattcttgagctcgaaactaccacaagcctcaaagagtcaggggaaattttatgcatgaacaggagtactatctacttgcgtggtgctggagggttttcagactcttcacggccatactcatatgctacctatcctgctaatcaagtttctcgcatttctattccaaattcggcaccttctgcagtatgcgacgaccagacaaagcaatcccaggcattgttatacaggctatctggggattacaatcctttgcattcagacccagatattgcacagcttgctgggttcacccgtccaatcctgcacggcctctgcaccctaggattcgctgctcgcgccgtcataaaatctttctgcaacggcgaaccgactgcggtgaagagcatcttcggccgtttccttctgcacgtctaccccggggaaacgttgtccactgagatgtggcttgacggccagaaggtgcactaccaaacgaaggccaaggagcggaaccgagctgtcctctctggatatgtgttgctccagcacatcccctcgtcattgtaattgattttttgttaagtcggtgggtaagaaaaagcttctgaaccaagagactcaagtgaggtctgttcggtgccgtcgttgctctggcctagcaatcgtc

SEQ ID NO: 27696 - DNA, 472 bp, Zea Mays
atttgttgcattgtaagacaaagcggcaatttgcttgggtattgatcaacctcaaacttttctggatgttgacgaacctcgttcaaaagcacagaagtactgctcttttgtttcctgtacaattggaaccaagacttgtttgttttgctttgaaatatcaacagttcggagaataatctgtatctgacatctgtttaattgaacaaagccaaatactttgtcaattgtgtatgcacaattatttccgccaccggggcagatccatgaacacaaaaaaaaacacgtgtcacagttgttttggcttttgtttgatatatgttttgatctgtccatggtgggtccaaacggggtacatctggatgatataaggaattaaggatacccattctaattaaacaaggtgcaggttgctgatcctatttgtcctctaggaaatgccagtgaatcagacgttgtgctgaagagcactata

SEQ ID NO: 27697 - DNA, 183 bp, Zea Mays
cctccttccccacgcacgtcaagtgtgagtacgtgcctacaacattgaggtgcatctacacaaactcaagggcccgttgaggtggaaggacaaaatgagattaccaccatgaacaccatttgcgataagatagctataacattggctagtgtgggagctacataaggtatctatgtaattggc

SEQ ID NO: 27698 - DNA, 508 bp, Zea Mays
attaccaaattatgatcatccacaatattagacaattgagaattaatacttccaaacaaataaacttcatcatagaattcaatgattaacataattaaaacttatgcatactcaatgtcagggaacaggatgcaacccaaacggtagcaaccaccactgtatttacttgcctttaccagaagttcgggcaaatccctaagtacgatccggaagtccaccaccttgggttcctcctttcctccttcttttcttccttcttcctccctccaaactcccatggaagactcgcacccacacgacggacaccaagcggggaggctccaccttggagaggaagaggggggggctagggttgaggggtggcgctgcaatcacttggggaagaaggagagggattggggcggctgcaagagtggaagagagaggggaggggcggccaaaggggtgggggagtgagagggagggggcggctagggtttagggggggaactaatgggctccccaccgc

SEQ ID NO: 27699 - DNA, 2183 bp, Zea Mays
caacagtcatgttccaattgctctcttggctgctgcttcctcttcttccctcttggtcttggcggcggcttctttttcccttcttcggcgaagaaaatggccaggcacccaggcgtcgactggtcgacgacggctctgttccaacaagtccgcgtcgtcggcgtccggccgggcgcgctgcaaagtcatgacagaagaaaaaaaacatgcgcgagcgtgacgggcaagaagactccagcagatcgagctgggcatggcgagcgcgctggagacgctgtgcgggcagtcgtacggggcgaagcagtaccacatgctgggcatctacctgcagcggtcgtggatcatcctgtcggcgtgcgccgtggtgcagctccccgtgtacctgttcacggagccgctgctggtggcgctggggcaggacccggacatctcggcggtggcggggaccgtggcgctctggtacatccccgtgctcttctccttcgtctgggccttcccgctgcagatgtacctgcaggcgcagatcaagaacatgatcatcacgtacctcgccatgctcaacctcggcctccacctcgccctgtcctggctcgccgccgtccacctccgcctcggcctcgccggcgtcatgggctccatggtcgtcgccatgtggatccccgtgttcggccagctcgccttcgtcttcttcggcggatgccctctcacctggaccggattctcgtccgccgccttcgccgacctcggcgccatcgtcaggctctcgctctcttctggtgtcatgctctgcttggaattgtggtacaacaccatactggtgctcctcacaggatacatgaagaatgcggagatcgcacttgacgccctttcgatatgccttaacatcaatggttgggagatgatgatctccataggcttcctggctgcaacaggagtgcgagtggcgaacgagctgggagctgggagcgcgaggagggccaagttcgcgatctacaacgtggtcgtcacctccttcgccatcgggctcgtgctgtgtcgctgttggtgccggttggcaaggcgtagtcgcgtacgtcaacgtcacgtcgtactacctgatcggcattcctcttggcgcagtcctaggctacgtggtggggcttcatgtgaagggcatttggatcggaatgctgctcggaacgctggtccagactatcgtgcttctcttcataacagtaaagaccgactgggacaaacaggtggtggccgctcaagagaggctgaagaaatggtacatggaagagaacagaaggatgcaggcctcgagggggaatccttgagccggtccttcaaccaacttcaagcctggcctttgtgggttgctgattgacacaattttatgctaatatttctactattcatcacctcaacatcaaagtgagcccggcattccagatcgtgtgctcctcgagccaagcaatggaaaggcactgtcactgtcagcagcagtaggataaccaaaaaaaaacattgtgttatttgctaagtgcgagtttggctcaattttcgctaagtgagagagagcctatgttggctaagtgcgactttggctcaattttgggcgtatgctaatatgtttcacaacagggcagtgcttgagatttgggatatctgtagcgctataactgactcaattttgggcatatgctaatttgctaagtgcgaacaaattcatgcagttatggccatgcactactacacttcgacatgtgtgtgtatatactcaggttcatgaaaatagtgtggtagatcgatcgtgggactgaaccacatattgatcacatcaattagtaataagggacctagcgtcgtatcgtatcacattctgcaaccaaacatgaaaggaacacagagaacacaaccatattcacagagcactacgctaataactggaacaaattatttaggtgcaaaactgtattgtcaccttattcgaactggagtgtcgacgacgaacagggctactggatgacaggtagtgtagttaagaagctgcaatcatattttacaggaaaatattagtaagaaattaagaatgcaagatgaggaatgttcgaagtactgaatcgaacagatcacaccgatagcatttgatacatatacatcaaagaaacacgatttgaaggcaaaaaggaatcaatgta

SEQ ID NO: 27700 - DNA, 1376 bp, Zea Mays
atacattcttcttccacggctgggtagccaaacaatcccacaacattaaaatcctaatgccttcctaatcattgttcccgctttgcaactaacatttccatttcccgccacactctcccgcgcaggcgcagcaccccttcttctttccctccacttgccgctccagttgcagttggtcgaaaaaaaaagtggaaaggaaaggggcaaaatatcctagggttctgcctccatggacatcgagacccacgccgccgccctggcccgcgacgagctgcggcggctcctggccgccaccctcagccccgacaaggcgtcggttgacgctgccgcggcggggctcgacgcgctctcttccgacccacgcttccccctcgccatcctcgccgtcgctgcaggggacggtgatcaggggatgagagtcgctgcagcgacatactttgaaaaattttacccgccgcaatttggaaacccgtctgtgttcatctgaggtttacaaggagttccgtgaccaacttgcccaggctttgcttcgagtggagcctgcaattcttcgagtgctgattgaagttttccgccaagttgttgaaaaagattttgtcaaggataacttgtggcctgagcttatccctcagttgaaactagtgatccagagcagcaatctaattagtccaggccagcatcctgagtgcaatactattaatgcactcacagtacttcaatctgttgtaaggcccttccagtatttcttgaatccaaaagttgtgaaagagcctgttccacaacagttggagcaaattgcagcagagattcttgtaccattgcaagtgacattccatcacttctctgacaaggttcttttgtcacctgatgggactaacttggaatatgagcagctcctactcatcacatgcaaatgcatgtatttcactgtgaggtcatacatgccatctagggtgaaacaaattttgccttccttttgcaaagacatgttccgtatactagattctttgaactttaatagtcttattgaagatggatctaccatgaagctcaagattgcaaagagatgtctcattatattttgtgcacttgttacacgtcaccggaaacatacagataaccagatgccacatattgtcaactgtgcaatcaaaatatcaaaacaaagcatccatttaagtaaactcgactctctccccaatcggattgtttcattggcatttgatgtgatttctcgagttttggaaacaggaccgggatggcgactagtttcaccacatttttcttcacttcttgattcagcaatttttccagcattagcattgaatgagaagaagaatgggaggaggatactgatgagtatatgcaaaagaatc

SEQ ID NO: 27701 - DNA, 2530 bp, Zea Mays
aaacaaaacaaaagtcgcgagccgccggcaacagcagctgtccgtccgagtcttcgcttcgcttcgcttccatttcgtcgccgttgcacctcccatagtaatagtcccccattcaatccgctcggtccaaatccacgtcttttgtcgtggggtggtgtctggcattgcattattggaggatcgaaaccatcgccaccgcaccaatgatccccttctccgtcctcgccggcgccctcgtcttgctcgtcggcgtcgccgatgccctgcccgggtaccagataagctgcggcgcgacgtcggacaaggtcgcggggaacgtgacatgggtcgccgacggggcgttcatccacgccggcaaggtggcggagctggactccccgggcgtcatgccgatgctctcctcgctcaggtacttcccgccggacgcgtcgtccgccgccaagtactgctacgcggtcccggcggcgatgcacgccaggtacctggtccgcacgacgtactactacggcgggttcgacggcggcggggcgccgccggtgttcgaccagatcatcgacggcacgcggtggagcgcggtggacacggcggggggctacgcccgcgggctcgccacgtactacgaggccgtggtggaggccgcggggaaggagctcagcgtctgcctcgccaggagcgccgccaccgcgcccggccggagccccttcatctccgcgctcgaggtggtgccgctcgaggagtccgtgtacagcgccgtcaacttcaccgcctacgcgctgagcaccgtcgcgcgccacagcttcggccacaacggctccatcatcggctatccagacgatcggttcaaccgatactgggagccgtacagcgacgggggcatcccggtggtggagagccaggcgagcgtggcgacggaggcgttctggaacaagcctccggaggccgtgttccggcgaggcctgacggcgagcagagacaagagcctggagctccagtggccgccggcgccgctgccggccgcgagctactacctggcgctctacttccaggacaaccgggggccgagcgcgctcagctggagggtgttcgacgtcgcggtcaacggccagcccttcttcgccggcctcaacgtctccacggcggggtgcatggtgtacggcgtcgactggccgctatccgggcagacaaggatcacgctgacgccggcgctggagtcccccgtcgggccgctgatcaacgcggcggagctcatgatggtcgtcccgctcggtgggaggacgcatcccagagacgtaatcggcatgcaggagctggccagaggattcacgaacccgccgtcggactggagaggtgatccatgcttgccccaggggaactcgtggactggtgtcacctgcaaccaagatccactggcaagagtaactgggctcaacctcacaaatttcagagttggaggatcgatatctaacaacattgccaatctgactgcaatttccagcatttggcttgtcgggaacaatttgaccggcccgattccagatctgaaccacctcctgcatgtagtctctttgcacctggaggacaacggactgacaggcccgctccctgaatcgctcggaaaccttacaagacttgaggaactgtccgtgcagaacaacagcctacaaggaacaattccaagcagcatcaggaacagagcggcggtggacccaaggtttaggttccagtacacacctgggaacaaccttagctaacaagtgcattacaggaaggcaaaaatatctgactgctgttccttacccaatttcgggtgcttcggaccattttccttcccttttttgaatcacgattttttgttgtacttcggaatgtatacttatctcttcccctggtggacgatgtggagccgctccccatcccattgaccgtgccagagacggagcccatgtcgcgggaggagctggaccgccggctcagctgcgacgtcgagatcgatgaatgcaagacggtctcatacgagtggacaggcaagtgccggagctgccaggggacgggactggtcagctacttcaggaagaagggcaaggagaccatttgcaagtgtgtgccatgcgccgggattggttatgtgaggaaaattacacttcgtgaggacattcaaaagatagacgagctagacaatgagaaactaccatagtttgaaaggtctcaagtcattcggcctctgcaattttgtaaatgctgccgaagagcttgtgctcgcaacctacacattgactaatggttctttccactgcacatttactgttcaggcacgatactagcttggaggggttattctttaagcactgtaaacttttgtgttcaaaaaaaaacattgcaaacttagcaatggtgtctagtaattgtaccccttttatcttggttatttgctgatagatatgataacgatcgatacagaaaagaaaataataattgtatcccttttgtaaattcttttagcacgttggtatggtccatctgtttctctcct

SEQ ID NO: 27702 - DNA, 1277 bp, Zea Mays
accaatgcagccataactccgccccgatctatccgtcgcccctccaaaagcacgagagcgcaggaagtgagagaataaaaataataataataaggggaaataataagaaaaaaattctcgtgttcttcgaccggtggtggtggtgcgaacgcaaggcgaccaaggggaggcgagatgaggggggcgaagcggccgctcagcgtggtgacgtcgtgggtgcggcggcagccgcccaaggtgaaggctttcttggccgttgtcaccggcatggccgcgctcgtcgtcatccgcttcatcgtccacgaccatgacaacctcttcgtcgctgccgaggctgcgcacgcgctcggcataggcgtcctcatctacaagctcacaaaggagaagacatgtgccggactatccctcaagtctcaggatttaactgcgttatttctagctgttagactgtactgcagctttgtcatggagtatgacatccatacaattctggacagtgctacacttgtagccacactgtttgttatttatatgatacggttcaaactgaggtcaacttatatggtggacaaggataactttgcattgtactatgtgatagttgaaccgtttacagctcactatgtatttgcgttgggggttgcaaggtttcttagctgcgcccactgggttctacaggttttggatacgcgtggccgtctgctgacagctctcggctatggtctgtggccgtctatggtgctgttttcagaaatcgtgcagacattcatccttgcagatttctgctactactatgtgaagagcctggttggtgggcagctggtgctacggcttccctcaggggtggtgtaagagaagtgcaagctgcagcagaatacaaaactttagtgcttcaccggttcatatgtacttttagtagtgcccaacctgggagccttttttagttgatgttacgagttatgactatatgtatggcaaaattgctgcaagggtcctcttaaaagataggttgatattgagactgtttatagctgcgcttttctggatacccaatctttgggtacttggcttctgccgtatgactgtcgtggtcttaggatcaggtggttaatggtctctttggattagacaattctagaatgctttcataaattgatattgatctatgcagaactggccacgtgaaaatcgtgggactaaggtcatcaggtcgtattcactttaacattgatattaccaagataggggttcctttctggcccattactaatctttag

SEQ ID NO: 27703 - DNA, 1872 bp, Zea Mays
ctcggcctttcgggtctttcgctccccggctcttcgtctccctctcttgccgaatccaagccctaaaccatagggcttgcctggtgcccgggtgggctccccatggcggcaatagaggacgaggagatggagaagaaggtgcagcagtacctgcaccgcaaggggttccgcctcaccgagctcgcgctccacgaggagcgcagtcgcctctccacctccgacgtcgcgcttacccggtctgacaataatccagcaagataccatgagggatacagcagattaatagcatgggcgtatagttctcttgatcaatataagtgcactgcttgtagataaattgtacttaatattcagccaaagcatatcacgccttcaaactatttctaactgttaccttcaagtgatgcattttatgaatcctctgtgttctatggcacaaatttacttggcagacctcctctccttttatgaatcccatatctgtcatataagcatgattttgcacttgacaacttatgtaattctagtttttcaaaagggcgtttggttgtggcaggcaaactattttatgttgtgatctgattttttaacttacagtcttacgctccattctgttcttaaacttggcaatataattcatatttcttaattcagatattttttgtagcatgaattacttcgcgtcctttacccagtttttatccattgcttcatggatctagtggcagagggacatatgcacaatgctcggtcatttttccatacatttcgggaagctcataaggtgatgcattcaagggatcttcagaagctggaaggcatcctctctccttcacacttggaggaaacggaactggctcgatcttttaggaaaaaataaatttaaaattaaattatgcgagtattcgtatgaattgcttctccagtatctccagaaaacacaagcttttgtggtgcttggagtaatcaatgagcacataacttttgaagtatctcctgggcagtcctcattaatctctgatgatgctgatgttgttgctctgattgggacaagtaaggacttggcaaaacaaataaatcagaaggaagtacattgggggttgcttgaagattctgttgaagagcaaatggagaaggcactagcagaatctgataaaatagaagctgaaagcaacgatgctgatgcagaagataacaagaaaaggaatacagaaggtggaaagcaaaatacttctcttgtgtggggacacttgctttcagctgcgaaggagcattgcttgcatcggggtcggctgactgtactgttaagctctgggatgtcgctttcagcacaaaagccctgaagacagaggacaccaaaggcagctcatcagctaaccgactgagactgcttaaatctctgcctacaaaatcagctcctgtctatagcctgcggttttctcggaggaaccttctgtttgcctccggtgctctcgcgtaagctgcgtgtttcgtagaatacagctagaactgttccggttttgacatggagtagtgaagttggcatttcgcagactccgctgtggatcctattgtagagctaatattttcgttagcaatctcaacggcccagcatgtatgcacagcggaattgagcaccgcagatgctttgtagcgtgcttgcaacattgtgacattgttattaggtaaatacgtcgtgtaattttttttaggttgtgatcttatgatttataaacgccactaaatgtacatatgcctgataggagatagcttgtaagggatgaccggatgatttggtgacaaaacaatgcattttatctacttctcaaacatgtaaaatatggatcatcctatacctttgacgaagcaacc

SEQ ID NO: 27704 - DNA, 2404 bp, Zea Mays
cttctctctcctccccaccccgacatcccacaccgcctcttttgatctttttctttgtcacctgcgctctcacgtcaaacggtttccccctctctctctcctccctccgctttatcttttcctcggccctgcctgctttttaccacttccgcccgtcgccttccacctctcgcactccctccctccctccctccctttcactccaactcaagcgcagcgctgtaccgtacgtccccgactccccccttcttctactccactcctcgccgcactctccatgcccaccccgtgaaggcgaagcgaaaaccaaaaacccctttgctacatcactttactagctagtcgtccccgttctctccttggtcgcggcgccggacgagggcgacggcattgtgagatatggataaggagaggaagcagggtttcttcgccgcgctcaaggaggaggtcgtacgggggctgtcgccgtcgaggtccagggggaagtccccggcgccgccgcggagcgcgtcgccggcgaggatgctgatcccgcgccggcgcaaggcgcccgcggctccgccgccgccgccgccggagaaggtgctggagcagtacctgggcgagcagctcgtcgcgcgctccggcagcctgcgccccggcggggaggctctggcgccgctcatcgaggggcccgacgccgagcgcctcgccgccggcgaccccgacgcggaggactccggccgccgcgaggggttcgggcactgggtccgcggccacctgacgcgcacgccgtccatggcctcctctgccgcaggtggtggtggtggtcccggcgggtcgagcggctcgttccggcggtccgacctccgcctgctcctcggcgtcatgggcgcgccgctcgcgcccatcccgtccaagacggcggagccgctgcccctcctctccatcaagggaacccccatttacatcctgcatcagtacacggcggcgtccggtggctacaagctgctgcagtcggtgcggaacgcgtacgccatgggcaaggtgcggatggtggcgtccgagttcgagacggcgacgcgcgtcgtcaagaaccgcgggcccagcggccgcggcgccgccgccgtggagcagggcggcttcgtgctgtggcagatggctcccgacatgtggtacgtagagctcgccgtcggcggcagcaaggtccatgccggctccaatggccgcctcgtctggcgccacaccccctggctcggcgcccacgccgccaaggggcccgtccgccccctacgccgcgtcctccagggcctcgatccgctgaccacggccgggctgttcgcggaggcgcgatgcgtgggcgagaagaaggtgaacggcgaggactgcttcatcctgaagctgagcgccgacccgcagacgctgaagctgcgcagcgagggcccggcggagatcatccggcacgtgctgttcggctacttcagccagcgcacggggctgatggtgcagatggaggactcgcacctgacccgcatccagccgcacgccggcggggacgccgtgtactgggagacgaccatcagctcggccctggaggactaccgcgccgtggagggcgtcatggtcgcgcacgcgggccgctccgcggtgaccctgttccggttcggcgaggccgccatgagccacaccaagacgcgcatggaggaggcctggagcatcgaggaggtggcgttcaacgttccgggactgtccgtggactgcttcatcccgccggccgacatccggtcgggctccgtcggcgaggcctgcgagctgccgtcccagccccacggcgagcgcgccaggaccggcgccgccgtgcacccctcgcgcgtggccgccgtggagcgcgccggcactgctgccggcgccggaggccgcggcgagaagaaggtcatgtggagagtgcaagtgtgaggaatggcgcgcatcagttagcagcggcagagagaattgaaaccgattgcccgattctaatctgtgtccatactagtagagttttaattttcgccagcccaagtcatgaatcaaatcaatcgaatgaatcacactaactcgctgcatctagtagtagagagctggtttaggtttctgtaaataggagcataaacgatcccaggccgtccgtcactgatgtcttgtcctcgggctggatgaatcttttatcctctgaaaacgcagaagttttagcaccatcctccgttcccctagtcttgcagaccttgttttgatcttgagagaaagagagagagagagctcgtgcaggccatgagaaagatgtagtactggtccagttctgttcgtgtttactgtcaacggcacttgatgttcctagtactaaaaatgctgaatctgtgtaccgtttggtgctgacctgtgtggaagc

SEQ ID NO: 27705 - DNA, 3655 bp, Zea Mays
ggtgaattggccccgcagatctccagggttttagcagagcccagtaaaatcggcggaggcatccaatccggcttgcgagtttgcgacttctttctattctctctatcgccgctgcctctctctccctccttccttttcctggtcgcgacagcgccgcgctaatcgatcccttttgcccacgccgccgttgcctccaactccaaccagggtttcgctccttccgcagccgtcgggtgtgatccatggagaacggcggtggcgtcggtgaagggcgctcggagaatcgggcgggcgagaacggcggagtcgccgaggcagccactgcggcggatgagggagattgtgatgtggtggtggagggcggagatgaaggggacatgccgcccggtgcggtggcggcgggcgatcaccagccaatggtgacgccgaacaccagagcggtgctggaaacaggacagcttgcggcagacaagtgggacgaggacgatactccccgtttcattgacgtggaggaaagctttgccgatgatgtgaatcaagatcacgtcgctgcacaatctgggagcgagtatgaagatgtaaaagatggtactttggtgtatcaaagcaaagagcagccagggacgagcacggaagatattgcttcctcacatagcaggccagggacagtcacacattctgcagctgagcctgctgttgccattgaggaattggatgactcaagctcctcagctgatgagaataccgccacctctgctcctcctgcacaattctcaagcggtagttctacacctgcgcaatccagcagtgctgcttctgctcgttctactaatggtccctctttgccatctcgtcctgctggccttggatcatcgtcttccctgtcacagcctcctgctcgttctgttcaacaggtccatgccaacaggccagccattgtggaaaggggaacccagggggctactgaggatgatggagacgagaatgatgaaatccatgaaaagcttcaaatgatccgggttaagtttcttcgccttgctaacaggtttgggcaaacatatcataatatggtcgtttcacaggttctgtaccggcttgggctggcagaacaacttagaagaactacttctaatgggtcatttagcattgaccgtgcaagagacatggcagaacgccttgaagctgctggaaatgcgccccttgatttttcatgcaccatcttggttcttggtaaaactggggtcggtaagagtgctaccattaattcagtttttgatgataccaggttggatacaaacgcttttgattctagtactaggaaggttcaagaagtagttggtatggttgagggaatcaaagtgaaagtgattgatacacctggactttcctgctcatctttagaacaacaccgcaaccagaaggttctcaactctgtcaagagacttattagcaaaaaccctccagatattgttctttattttgataggttggatatgcagagcagggacaattgtgacgtccctctgctgcaaaccatcacaaaagtgtttggagcatcggtttggtttaatgccattgtcgtgttaactcatgctgcatctgcgccaccagatgggcagaatggaattcctctgagctatgagatgtttgtcacccagagatctcatgtagtgcaacaagctataaggcaagctgctggtgatgtacgccttatgaatccagtatccctcgtggaaaaccactcagcatgcaggacaaatagggctggccagagggtattgccaaatggacaagtctggaagccacagttactgctgctttgttttgcttcaaaggtgttagcagaagccaatgtgctccttaagttgcaggatagtcccattggtaaactttctcgtacaaggattcctccactgcctttcctcctctcttcccttcttcagtctcgtgccccactgaagttaccagaggagcaatttggtggtgatgatgatgatcttgaagatgatttggcagatgattctgattcagatgatggttcagattatgatgatttacctccatttaagcgtctcacaaaagctcagcttgccaagctgaacagggagcagaggaaggcctatcttgaggagctagattacagagagaagttgttctatcaaaaacagctgaaagaggaaagaaaacgtcgtaaattgatgaagaaaatggcagcagaagccagtgctcgtgcaaatgatttcagcaacagcaacctagaagatgatgctactactccaactaatgtttcagtgcctatgcctgacatggtactgccctcatcttttgattctgactaccctagccatcgctatcgtttcctggatacaccaagtgaatggcttgtcagacctgtattggaaacacagggctgggaccatgatgttggttacgagggacttaatgttgaaagattgtttgccgtaaaaggtaaagttcctctatcagtgtctggccagcttacaaaagacaagaaggattgctccctgcaaatggaggttgcaagttcaattaagcatgctgaaggtaagactacttcacttgggcttgatttgcagtctgtcggcagggatatggcatacacaatccgtggcgaatcgagatttaagaacttcaggcgcaacaatacatctgctgggatatctgctacgcttcttggggattcagtatcagctggtatgaagattgaggacaaactgatagtgaacaagcagcttagggtcctggttagcagcggggccatgagtgggaggggagacatggcctatggaggccgccttgaagcaacgatgagagacaaagattacccgattgggcggatgctttccactgttgcattatctgttgtggattggcacggggatctggcaattggctgcaacatccagtctcagatccccgctggaagagctagcaacttggttggccacgctaatctaagcaacaaggggactggccaagtcgggattcgcctcaacagctcggagcatcttgagatcgcactcgtggccctcgtgccgatattccagaacatcatgaagctgttacagaattactcggaatctggctagtccctcgtgccgatgttccagaacatcatgaagctgttacagaattactgagaatccggctagtactttttttttcatgtaagcctgagaaaacagagcatcataggttaaaatctagcttaagctagaactttacttccaattattattttgttcttttgttgccaactttgtaactatgctctcctctgggcttttttttttttaagttggagtagcattcttagggctagtttgggagctacaaaaccgaataggattggagtgactaaaatccccttattcaaatttaaataagaagtggattttagcccctctaatccattttggttttgtagctcctagactagaccttataatgtaagattccccctgagctctttctgatgaagctggattggagaattcatcgtgtcagatttctgggcatgctactgagtttttctttctttcaaaagttagataattgtgattttacatcgatgcaaggcaagtggatattgtaacaaccgaaccagtcaaattgttggagcgcaacgtttcag

SEQ ID NO: 27706 - DNA, 1008 bp, Zea Mays
gtgctccccgccatgaatagtaagcaactcgagtctcgtagaaacctgcaagtatgtaaaaaaaagagggtaaagctttcgctttccacaacatagcacataactccttgtgatgcaaaagtgtgaacagcagaccagcattgttttaagcgaccaagaaaccaattgatcaaataacaatgatgcataggccttatttttatatgaaattttccagccttatcagtggcaataaaattcactctgaaggcatgagatcatgatttatgatgcaggtgctgggcgtcaggatcgccacaacctcgggatgcatccgccctatatgattaggtgttgcctaggcatgaaatggcgtcaggaagacgcctatagaactgcagcggacgccagacatgaatctgcatggggacaggagtcaatcagtatgcaccgaattgaccgcaagaaatcgaccgcttggagctcacgcaacttcaaggagagaggaggagggaaaacgagaaggtggagggcagaactggagctcttggtggcaggcagcaaaggcagcagccctgattcgccgcttgggcgctcctctattgaagtacacctcctcaagtccatttcactgccggtcatccacacctgtgacccgctaccgtcagccacccgcactgcagttgtcctcgtgcttcaaatcgccgtcgccatccacaagtacatacgatacgcacctgcctccttttgtgatatacacacctgtccattcgcttcaggtgttgtgagggggagggggggggcactgcctcgccacaacgccttaaaaaccatgtatgagatgcaactggagaatagctacacgacttttgaagctaaaagacagtgaaataacaaaataaaaaaacgttcataaaagcagttaaatcaacataccaggaagaaaggaaaggaaacccaggaacaagagaccatatgcctgagaactatcaccctccatgtgacctgtgaatatgaagtaagaaagaa

SEQ ID NO: 27707 - DNA, 1956 bp, Zea Mays
cctcagttcctcaaccagcggccgaccgtcgaccgagaagcccgagcagcggtccgatcaggtgagcagcggcgcggctgctgcctgcccgcgcctgcctccgcggctccgccggccgtcgaccgagcagccgagcagaggcgcggcggctgcctgcccgcgctcgcctccgcggctccgctggccgtcgttcgccgacccgaacgccgagtcgcgcgagcgtgccggcgtgccccgcctctcgtcggctcgcgactgcgccagcgcggtcgcgccgccccaccccccggtgaccggcgtccggatccatccgtctggcaacccaaccggccaagggccaaccccgtccccggaccccgactccccgagggccaaccggccaaggcacaaccgctgaaccgcacaatgcatatttagtcgcctactcgcctaggcctattatttccctctcaaactcaaattcttcctggaatccaccaaagccctgcctcccctctactgattctgaaagtggagttccatctgcgcgtcggttgatttattctatttgctgagttggactacattacctccatgtcgagactgcgagctctgtggcaggcttcctttaacgccacaaagagagctcttgtatggagttcagatgatctaattccgccaagtgaaagatgtatcttcaatttcaactcaaaagatgagctgaaaaggtggcatttgtactcagattcagagtatggaggtttgtcttctgcatccttagaaataactgatggcgcttcagttggagatactccattaactggtaatagttgttctatgttcttagcttttccatcttgtgccaatcatttgaagtatagtttgaattgagtactttctggtacaagagaaaacaatgatgtatctgtagcttcttacatttagcatgatagacctcattaaccatgaaatgtttgtggttttcttggaaaatgtctgaggtgagtccaaattatcagtgggtaccggctgctgtattttctttagtaattgaatcgaaacatgcagttttttacttatgattttcttagactggtttgtaaggtaacttttattaacatgtgtattcttgaaggtgtgttttctggtaacctttctttggatatgtctgaagagtcaacatggaggatcaggcgctatggattctgtgggatgcgatcaaagaagtttgatgggttcattgaccttgatgcatatgatacaatagcaatgaagatcaaaggggatggaagatgctacatatctacaatatacacggagaattgggtgaattcacccgggcaacaagaagacaactcgtggcaggcttttgtgtacatacctcctcaagacagatgggaagtcttgaagatccctcttgatcgctatttacccacatggagaggaaatgtgatccaggcaaagttggaaatgaaccctgctcggatcgtggggatgtctctctctgtaaacgcagaaggcggtgttcctggcgccaagactgggcctggtgattttaggcttgatgttgcttggatcaaagcgttgagagctttgtgaactccacaagtcatagttttatttcacatcggccctttccttctttatcaccctgccccagtggcgccgctgaactcatcacccgaccacaaccacaggagtaaccatagcacagattgccaactcctttatgcacttaataatggattttgttttgcttctgaggtttatgaataagtggtagaaaaatggagcatttagttaaggtgccccctttggacagatgttgctttttctctctctctagtatctgatcggccgataaaacgagtgcattccacccggacgataatgcgagagtaggattcagtttaattctttgactgttaagagtactactgtttgatcgtttgaattatacacgttcatttgagtaat

SEQ ID NO: 27708 - DNA, 1509 bp, Zea Mays
gtttacaccgagggttctctctttgtctgttcactgttctactgggacgaccccaaatccccaaatcgaaaggggccgtccggctcagggtttctcgacggctccttgccctctccgccatggacgcacagcgagccctccttgacgagctcatgggcacagctcgcaacctaacggaggaggagaagaaggggcacaaagagctgaagtgggacgatccggacgtgtgcggcccttacatggttcggttctgtcctcacgaccttttcgtcaacaccaagagcaatatcgggccgtgctcgaggatccacgatccgaagctcaaggaaagctttgagaagtctcctaggcacgatacttatatgcaaaggtttgaggcagagcttgcacaacaatgtgagaaattggtaatggacttagatagaaagataaggcgtggtcgagaaaggctggctcacgattctgctgtgccaatgccaatccctggaaaattagctgagctgctttcagtgcgaaaagaacaggtgaagaagctgctggagcaaattgaggagcttggtgaggctggtaaagtggatgaagctgaggcacttatgagaagggttgacattttaaacgctgagaagacagctttagctaacgaagcagacaacaaagtagctatgcttgagaagaagatggaactttgtgaaacatgtggatcattcttagttgctgatgatgctcttgagagaacgcagtcccatgtgactgggaaacaacacattggttatggcatggttagggatttcctggcagaatacaaggcagcaaaagagaagacaaaagaggaagagcggcttgcaagggagcagaaagcagaggagcatcggaaacagaggggaaaagagtatgatagtgggggcagggatagagataccagaagggagaggtctggggagcgtgactttgaccgtgatcgtcagtatgagcgaagcagaggaagagatagggtttatgattacagggacagaggatcagaacaccgaagcaatcgctacagaaatgggagggattctgaaagaggtggacacagatacaggagtggtggtatgacaaatgaccgagggagaatgaggagcagatcacgttctccaaccaggcatggctatggaagatctagaagtccagatcattagctgcctagctggacatttagatagttttattcacagttgggactcatgagctctgttggaaccctacagtctccctattttgcatggggaaaaattcccagtgtacaagagatcaagctttggtttgtagacaatggtgccctggctagaaccgcgaggattgggcctatttcctgactgtctagttattgtctcagaagtctggtttagataaggttctgtttccgcggcaaactattagatacctttgcagttgcggagttctgtaattgatgtattatttatgcagatagtgtagtctaactatgcaaactaatatatgatctgtttc

SEQ ID NO: 27709 - DNA, 1551 bp, Zea Mays
tcccgttcctattcccgggaggagacggtgtcgtctgtctctcgccgttctcgttcgtgccaatccaggcgaaacaaacggcgtgacgagagcggcagagcgtcagcgtccccccgcggccaccgtaccgcatcgtcgtcgtccccagccaacccaacccagcgcaccccaaacgaatccagccccacctcagccgcggcgcggacctcggaatctcagcgccggtgtgctcacggcaccgcagggcgcggcgtggccatggacatggacagggacagcgtggagtgcctctccctcccagacgctgccatggacgtggacaacgtcgacggccacccgcaccacggccatctcggtctcccgctccaccccgcccacctcccatcctctggtgccgggcgcgcgttccccaaggtgaatgccgggggcggcggagcgggcccggctgtagcgggagcggcgggcgcagcaggagcaggcggagggccgccggcgaccagcgtgcacgagctgctcgagtgccccgtctgcactaactccatgttcccgcccatccatcagtgtcaaaatggacatactttgtgttcgacatgcaaggccagggtgcacaaccggtgccctacatgcagacaagagcttggtgatatcaggtgcttagcattggaaaaagtagcagagtcacttgagcttccattgcagcttcaggccatataactgcccctatgctggctctgaatgtgctgtggctggtgatattccattccttgttgcacatttgagggatgatcacaaagttgatatgcacagtggctgcacgttcaaccatagatacgtcaaatccaacccgcgagaggttgaaaatgccacctggatgctaacagtattccattgttttgggcagtacttctgcctgcacttcgaggcattccagctcggaatggctccagtctatatggctttcctccgattcatgggtgatgagaatgaagcaaggaactatacatatagcctagaggttggtggtaatgggaggaaaatggtatgggaaggtactcctagaagcatccgtgacagccaccgcaaggtccgtgacagccatgatggcctcatcatccagaggaatatggcgctgttcttctctggtggtgacaggaaggagctgaagctgagggtgactgggcggatctggaaagagcagacgaaccccgatggagcctgcattcctaacctttgcagctgagcaagggagacgattgaaaagaagaagaaaaaaaagaaagaaaatattgtgttatttggctggcttttttaaaaaattgtcatgctatgttttcattatagcctgctgttaaaatattgtaccagtatgtagggtgtaaaatgctcttgtaaagtaattgtgtatatcgaattcatttacaagttgtaccaccaatccctgtgttatgttgatgtgttgtttgagttccgttgtggatgtattgggctcaagaagtgcctaatgttcatgtttatttgatagactgaatgttacctttttttttctcgaac

SEQ ID NO: 27710 - DNA, 204 bp, Zea Mays
gctagaatcaattataggtctacgacatgaagtataacgatgatgcgtggaataggtttagtgtttccaatgactagctgatgtgttcttctcgagtaaccgattctattgggttgaggtaaggctcgaactggaacccactatcgatgtcgtagtttcgagtgaatttagtattagtgcggtatttaacgtgtaatcgacgaa

SEQ ID NO: 27711 - DNA, 2148 bp, Zea Mays
gctgcgccgccgctcgcctctcctcccttcccttccccgtaccgtgtcactctcctccccggttcgtcgtgcggagggccaaagcttcgaggaagcagaaccctagcgctagcgctgttggagtagtagcctacgccctacggccgatggctgcggcggcgatcctgccggagctggggacgcaggtgctcatcccggtcgcggcggccgtgggcatcgccttctcggtgctgcagtgggtgctggtgtccaaggtgcggctcgcccccgagcgacgcgcggacggcggcggagccgtcaagagcggccccagcgactacctcatcgaggaggaggaagggctcaacgaccacaacgtcgtcgtcaagtgcgccgagatccagaacgccatctccgaaggagctacatctttccttttcactgagtacaagcaattgttcttgtgtgtggcggttggtctctgggctggcttagtcattggttttattactgagtactacacaagcaatgcctacagccctgtacaagttgttgctgattcctgcagaactggagctgccactaatgtcatttttgggcttgctctgggttacaaatcagtcattatcccaatttttgctattgcgtttagtatcttccttagcttcagccttgctgccatgtatggtgttgctgtggctgctcttggaatgctgagtaccattgccacaggccttgctattgatgcctatggccctatcagtgataatgctggaggcatagctgaaatggctgggatgagccataggattcgtgagagaactgatgctctagatgctgcaggaaacaccactgctgcaattggaaagggttttgctattggctctgcagccttggtatcccttgcactcttcggtgcctttgtaagccgggctgctatctccactgttgatgttctgactcctaaagtgttcattgggcttattgttggtgctatgctcccatactggttctcggcaatgaccatgaaaagtgtaggcagtgctgcactcaagatggtggaggaagtccgccggcagttcaacaccatccctgggctcatggagggcaccacaaagcctgactacgcaacttgtgtcaagatctcaacggatgcatccatcaaggagatgatccccccaggtgctcttgttatgctgacaccactgatcgttgggattttgtttggggttgagaccctcgctggggtccttgctggtgcccttgtctctggtgttcagattgccatttctgcatccaacactggtggtgcctgggacaacgccaagaagtacattgaggctggagcttcagagcatgccaggacccttggcccaaaaggttctgaccctcacaaggcggctgtcattggtgacaccattggagatcctctcaaggacacgtctggcccctccctcaacattctcatcaagcttatggcggttgaatcccttgtcttcgcccccttcttcgccgcccatggtggcattatcttcaaatggctctaaagatagcgacaacgttagttagtcgcaagagaaaggccgcagttctgcggctgcgaggggaatagagcagtatgtcagctatacaacatctatggcatgtgctttgctcctccacttgattatagcccccgttgtgtgtttcggtttctgttttcctggagtttttggttccaggcttccgaccatgttttgatcccataaattctcctccagccttcgagcaactgagtccatcttcgtaagtcatcagccctagccagacattgaagcatcggaaaactttaagggcttgttcgttttggtgataatccacatgtattgggtgggattgagccggtttaaatccataacaagtcaaaatacatctcaatctcacccaatacacttcaatacacatgtaatatcaataaccgaacaagccctaatagtttttagagatatggtgatgattatgatgatgattaatctcagtttttttcctttgaaagtaattagcatggtctttgcttgagattttgttctcttttcaaaacgatatgcatgcgaaatggaggtgatgtttttttttgaacggttgtttcaaagcaatatgaaaacataaaggtagtgatgttcttcaaaa

SEQ ID NO: 27712 - DNA, 160 bp, Zea Mays
cgttgttggacgaatgcgcatctaccttcgcagttatctggaatttggagttacagtccacgttcgcatgaattggaactttcaactgccaaaacatacaattatctggattttggagttatagtccacgttctaaaaaattggaactttcaactgccaa

SEQ ID NO: 27713 - DNA, 2374 bp, Zea Mays
cttccgggtccaaccaaaagttctgattcctaaactggcccgtactcccgtccaatcccaacccggcaacgcgagaatatatcaatccatcctcgcgtcgcgtgatctcatctcgccctcgctcacctacatctccgtccgcaagcgtcagccaggctgccccgggaggccgggaggaagcagatcggagaaggtgatctgttgtaatggctcgattgtacatcggcaacctggatccccgggtgaccgctcgggagctggaggacgagttccgcacgttcggggttcttcgcagtgtctgggttgctcggaaaccacctggctttgcgtttattgattttgatgataagagggacgcagaggatgcaatccgtgacctagatggcaagaatggatggagagttgagttatctcgtaatgccagcggtggtcgtggaggtcgtgaccggcatggtgggtctgagtccaagtgttacgagtgtggtgagactggccactttgctcgtgagtgccgtttgaggattggttctggaggtctaggcagcggaaggcgccgaagccgtagccgtagccgcagtcgcagtcccagatatcgccggagtccaagttacggtagaaggtgaatgtacacgtgtttctttttctaccctattcactgactatatacttattagtgcatatacccctactgtactacagactttatatcaaggccccaagccacttagtttttttctgttccattctgaactcagatcagacatatacatgaatcacttgctctttgttttttttgggaatgactatggatcatgcacttatggggaagtttctaggatttcctctggccttcacattcgttaacagactaggttttgaatgattaaatggtggaaactgtctgtcaaatgagcaaaagcaatatgtgcactcttgatctttttgatcttgtttgttctattcaatctgtacttgggaaatactcttagcaaattgcataattcatgttatgaacaaaggacaatgaatctgatcgaattcatatctttacaaacaggagttacagtcctgcagcacgctctccaaggcgtcgtagcgtctcaccagctcgtggacgcagctatagcaggtcaccacagcacaagggtgcacgtgaagaatctccctatgataatggataccgccgcagcaggagctagagccagatcgttgtatccgacgacgagcgttatgtgacagatattgggaaagctatggtcaataacctgcttgacagatccttcgtcgactgcttgactttggttaaggttctcataactttctatatacctattatcttgtgtctactttataagtagcagtaaaaccttttgatgagtgtatttgttgaactaagacctactgtcttttcttgtgtggtaaaaaggcatcgtcctgcactgcttaaacgactcggccgactacggctttcagttctgtcttcatggttttgttctgcgctctacattcttcgcacaccctcgcatgcttcattcagtctgccgtgtgttaatctgcctgcgtatcttctcgaagatgctgcgcatcgcaaaagcagtaatgaccttccttctcataccatttggtaaggtttgatttgctgacaaatgcagcatctggtaagtttctccccgtaggtttggtctccgtgctgcgtgcgctgctcctggttcaggaactgcagtatgttagatggatgaggatgactgaatgactcacctactcacgttatcatgccttcagaggacccaagttagtgagcgccaggaagtgaattgaccaggccaaatgctacgttgagccgactttggctttgctctgcgatctccacttgccaacatgtgttgccttcgacgaagtcttcttcgccttccgcttccttctctgcagcatcctgattgatattcttcattcttcgagtgacatgcagtcaccctaattgatcgtcatagagcctgcgttgaagtcgaatcccccctaatggacaatgtagttaaattgttattagcttgtttcttgttggatagactaatgtcagatgctgtttggtataaaatggtaaccatctggttgatgattggcggcgaactatttgttcagcacgtggttgctatatgacaagtcacaaggtattattaacctgagtggtaggctgcatttggatcaaccaggctggttgagaggcagcatgtgcttgtttggttgctcgtccgtgcatctagtagcttaagttgaagtgtttggttaatggttgtatgtatttttgtgctcattgcaccgcggaatgcagaatctgggcagctcgcttgaaacagatttcattctcgtttcttcg

SEQ ID NO: 27714 - DNA, 3410 bp, Zea Mays
ctgtatctatgatttgtgggtctgagtttaaaatagagaagttcacaactgagagtgacaaaatagcaaattttcctttaaaatgaccgcgcgttttttttaaaaaatgaccgcgcagtagctttggctgaaaaagaaaagaaaaataatcttccttcttccacgatagtcgatacggagcacccataacgttacttttattttgcagttcagcggttcagccccctcaagtcgaggtcgaggtactccgcctccgcaatgccgcccccttccgcctccgcctccccctccgcctcccgcttcgcgaagcactggatagctgacgtcctcgccggcgaagaatccgtcgacttctccctgctcaaggttctggtgggggcctcgtcgaagcccctcgcgggcgccccggaggccacgcgtgagcgggtcgcgctccggtccattcaggaggtgttgtccgtgatagccgctgggggtgatgccgcggccacggcgggggtgcttagtgttgatggcgcccggtcatgcgaggatgggctgtttcggcttatcagagaggttggaagtttcggagaattggagaaggatttgcttccacctttcagtcaagacatccaggaaaatatatgtaccaagaagtttacattaccaggaatttctttccagttgctagaaagagttgagccatggatagcatctatggccccacaaccccaaatggaacacaatggcactgaacaatgtgtcaatgatcagtcactgcgcagcagccacggatgtgtaaatatagagaagcctgtgttccatacagacaatgctggggttcagcaagagaccatggcagatgtagtcaatgaaagtgaaacaggaaatctccaaaaggatccacctgcaccaacttttatttttcaccaaccgtgtatgcctgaaagcaggtcttacgtccctccgcaagaagatactatagatgctgttggtctaggcgctaggtcctcagaaaggagtcctattgtggaggggaacatgtccgttggatctgtgcttgcttcagatggctgtgatgtacctttgcagggaagcattactgagccctttttccagcaggataaacatgaccatactgttatagttggaccaaaatcttgtaagcgaaaatctccaattccatcttactgtgctcatggagatggggcagatggtggtggctccagcaatcagtcatctaaggtttccattcgtgaaggacctagcactcatgccacagtaacttcaggttttgacagaatcagcgatgtcttaccaacagatgcacctgaatctgagcatttgcctgagtgcataactgcacaggatacaaccatttcacagcctgacagcaggaaagctcatttgagtgctctgcaacaggaaaggggtgagaaagtaacccaagatctggaagatatctctgcaaatattgggtcagtggaaaaggaccatattcatggggatctgactttgccatctgccagtgttttactttctataagctgcaatggtgctaatcaaggaagtaaatatgaaaccaaccttcaaccagggactgctacagaggatatgatggctttcgaagagcagaatgcagacaagtctcacttagaagtcagtggtatcaacaaggctaatcaagctctgcatgatgatggcggcgtcatgaaaaataatacagtacatggtgggttgattgtgcagactgctccagtgtctcaaaattgcaatgtaaccttacatgataaaacttcagagcaggaaaatgaaaagaacattcaaaaagataattgccatacttatgttccaggctcttctcaggataggggtggagaaagtgcaaagaaaacaacaaatgaactaaagtctggggacatttcttcaaaaatatgtgttcatttcaatgttcaagacatcaatgatactctggaggacttgtctcaacaaggtttgtgcataaaatgtggtgaaggtggtcagttgttggaatgcaatggctgttttttagccgcccatagcagctgttttggttcatcggcgacatttgaaggaaccaattttttctactgcccggtatgcttgtataagaaagccactgaagcatataaaaaggcaaagaaaacatattgtgaaactaggaagaaccttgttgctttccttggcacagcacaagccaccaatcaacctgacaaacaactaaatggagctcagccaggagctgccaacagagatgaagagcctcatgatgagcaacattctaaagggtgtggcgcatcaaaaggggcccatgaaaatgaagtatacaatcttgctcatcaggatgaagagcatcatcagcagaggaagaagcagaaaataaatgctatagtgctccagaataacaataaaacaccagttaaggatccagagaaaaagcagcaagcggtcaacgaagaagctcgcaaagaaggtggtaatgacaactcatctcatgaaacaggagcttcatctccgagaagatgtgatcctccttcgaatcaggacgttgaggctgaccaggacgatagccttacaacttctaatcaatctggtggttctgatgaaatagaagctacatcttctaatgactctgccaagcaatcatcacccccttggcgtggtatgggacacaacaaaaaaggattgcacgaaaaggagccagctgtatcaagtaaatctggaaaaggtattgggaaacaggatcaacatatgcatacttcacgaaggaaaaaaaaaatgcacacctgcaaaagcgctattccaatcctgttgcgccacctggaagacgcaaacaactctgttggacagaaaaagaagtagctattttgagggatgggatggcaaaattctctccacataataatggtaaaataccatggacccagatactgcaatatggccgtcgtgtgtttcacaagacgcgcctgccatgtgatttgagggtcaagtggaggaacatggagaggaagaaatctgatgccgtcgacatggaacactgatgtggtactagaacatagcggaacactgatatggtactaatagcgaatggaggagggtttcttctaaaatagtattttgatgcacagggtgggcatccttttgtgactggttgtgtcaacctagacctactatgcccgtgagagagattgctaaagagtcaactttcttttggaactgaaccctgcactctagatgatgataacatccggtagctgtgtttcttaaggcaactgtgtgtgtttcatccggcagctgccagtgcctcgcccaatgttctcgaatgaggtgactagcaaatacatgttgagcataaaatggagaaggtgacatacagatctaatcaatcacatgtgcttaggccacga

SEQ ID NO: 27715 - DNA, 1960 bp, Zea Mays
aacatatttgagtaacaaagagagtttgatagtgaatactgttggtgtaaatagaacaagtgtaaggggtttcttgtataatggtgaaatataatgtgagcttgggggtgttgtgaggaataactcaccccaaatcaacaacatggtatatggagctagggttcgcaggcgccgccactcgagctccgccttgcgcgtgtgaggaagaaggcggtcacccagccgagcccggagccggagcaggaaaccgtggtggagaagcgcgtggaggaggcggatccatggagcgcagctcggcgggcggccccctggcagctggcgtggcgagctcatccgcgcgtcctcgactcgtccgcgccggtgccggccgccgtccccgtcctgtgcgacggcgagctcgtcggcgtgggctcccgcccctatgcgcaccagctgcgcactcccccctgctcgacccctcagttcctggtggtcgccctcgggcccctccgctggtgtggctgctgggattgctgctacggacgctggtgctgtagctgctcccaaggaagaagagaaggccgagtacctcaaggaccgagcaagtttgctgttgctgctcctgcagctgagaaagggggaagaggaggaagcctctactgctgcggtgagcgtggagttggggagagtgaggtggtgctgctcctgcagctgagaaagggggaagaggaggaagtccctactgctgccctcgtagctgttgtggcctgtgtagctgtggaggccggtaggagctggtatggggttctgaagcgagttctgaactgtcctgtctgcttgaagccggagctactgctctgcttgttgtggtgaaggagtagatgtgcgagctcatggaggagctgctggagcatagcctggaggcgtctgctaatcccatgaaggtggtggagtacgtgcagaaggagtcgccgctgatcgccgtggtgctgaaggcacacatgcactgcgaggcctgcgccgaggggatcaggaagaggatcctcaatatgaaaggcgtccagtccgtagaaccagacctcaaggcatcggaggtggctgtcatgtccaaaaaggtccggagagtggaggcggtggtggcggaactggagtgtaggaactctgagctgtttggcgagaagggtgaactggaggagaaattggtggctgccaaggaggtgttggcgaggctgacggcgatgacgagggaacaggaggctagggtgtttgctagaaggagagagtctgatttggtgaaggagaaagaggctgttgctaaggctcttgatgctgagaaggctgaagtagcaaggttgaggttgaaaattgaggagctagagaaatgtagcggtgagaaggatggtgacatcaggaagatgaaaccagcctactttgccaactatgcccacatgggtgaaggaggggtgattgttggaggtatggttccaccagaaatgagggaagtgataaccacagagatagtgagtaatgatgaaagaagtggtggtggagatcaggatgatccaactgtcaatagtcaggaggagataaaggatgatgaagctgtgattgttgggacaatcccgtgttctattggggcagaggtgaataagaagcagggggagcaacgacctatagtgtactatcgaagacgggctaagaagcagggggagcaacctctacctgaacagacataatctgaacaagttgaagctctagtcccatacctctcttcagactgctctccagttccgaatggtaatgttgctcctccctctgaacatgtagaattacctattgcacaaagaagagatcctagagtcaatgctggaaaacccccttctcgttatggttatgaatatgatattgctaagtatgtctcatactctagtgtctcctgtatatagaacatttgttacatctctacaaacattgtctattc

SEQ ID NO: 27716 - DNA, 2753 bp, Zea Mays
ccatcatacctgcctctcttcttttttttttcccggtggggagaaaagcgggggcagcgagttgtgcgccttgtgagcttgcagctgttccaggttgcaatgcctgtgctgctcgtgctttagtctaggctgccccctttttcttcccgttcgctttgggaacataaaagattttttctccctttctttgctaatctctctggcgctggcccacttcgcccccctatttttgtggggaatgccggggtgggggcttgtgatttttgagccctcgttctagtgcttggccttttggggagtgttgatgcggcgttatggggcgatggatctgttgtgaaacgcgagctcgtagcactagcactagcttgtccgggaccgggagcctgcgagatcaggagctggggattgccctgccactctgctgaaagttttggagaagttgtggtgtttccctgcctattagagtctgcgcttctgtgttcctgatcaactgctactacgcgattgttgtcttctcaatctgtctggccaagcatggctggccagacgtcaaaggcaaaggaagcaggaaaagatgacagagaagaacccggagctgaggcggcgaaagagaagttagtgccgtctcaccagcagcaagagtctccagcttctgtggtggacaaggattcttcaggtgtgtcttcagttcctggtgatgagtcaccggtcctagaaggggattctgttgagttgaaagtggaggaaaacttggatggtaatgggaataaggaaaataaaacgtcccagaagagcagtacaagtgatggctttgcttctgctaaagtgagtgatgggacaagtagtttgaggaagaccagtggtagtgtggccatgagtactcgggctgatttcactgagagtgggaagagcagcatgtgccgtgcgagcaccgccagtgacattagcgatgagagctcctgcagcagcatgagcagtgccaccacgaagccacacaaggggaatgattcaaggtgggaggctatccatgtggtgaagtccagggataaagttcttggactgaatcatttcaggctgcttaagaagttgggctctggtgatataggaagtgtgtacctatctgaattgagtggtacacggagttactttgccatgaaggttatggataagacttctttggcaagtcggaagaagctgcttcgagctcagaccgagcgggagatcctgcagtccctggaccatccatttctaccaaccctgtatactcactttgagacagataagttttcatgcttggttatggaattctgccctggaggggaccttcacactcttcgccaaaggcagcctggaaaatatttttcagagcaagcagcaaagttctacgtagctgaggtgctccttgcattggaatacctgcatatgcttgggattatataccgtgatctcaaaccagaaaatgtcctcgttcgggaagatggccacatcatgctgtcggacttcgatctatctcttcgctgttcagtgagcctaacggtgatcaagtccgcaaatcctggcctagatgcattgcagaggaacaatgcagcgtactgtgcccagcctgcttgcatcgaaccatcctgcattcagccctcctgtgtagctccaaccacttgctttggcccccggttcttctccaaatccaagtccaagtctaagtccaagcccaagaaggagaagtcgaagcctgatggtccaaaccaagagaacctcttcccggagctgattgctgagccaactgatgctcgctcgatgtcctttgttggcactcatgagtacttggccccagaaataataaaaggggagggccatggaagtgctgtggattggtggacctttggcatattcttgtacgagctgttgttcggcaagacccctttcaaaggttccggcaaccgggctacactcttcaacgtcgtgggccagcccttgaggttcccggagtccccgatagtgagcttctctgcgagggacatgataaggggattgctcgtcaaggacccgcagcaccggctcgggtacaagcgtggtgctaccgagataaagcagcaccctttcttcgagggcgtgaactgggctctcataaggtgcgcgagccctccggacataccaaagcccctcgagctcgagtgtcgcccaaagcaagtgccatcagcaaacggaaaggtcgcgccggtcgctaaccaaaagggcccagataattatctagagttcgaattcttctagttttttgttttgtttttgtttttgtgatttctgaactgcaagagtgcgtctgggctgatgctgtgaaagaaagtgaaagatgataacctactctaggcatgcgcttcgctggatttttttcttcttctgccattagactgtactacgctcgtttcaggatatccgagttatttttttttctctgttgaactgcttaactctaaggtgtactcaatccatcatgtatgttgcaattttcagaacctgcctatggtacttgaaatgtatttcagggctgtgttattgctattgtaactttgtaattgatgcctcctcttagaacatgtcttcctctacactacaaacgctgatatctgaacatggcattgctacttatctttattttattccattttagtctctaaatagctaaataccgaaacaaaaagtctaaaatagagttttaattttcatatttataaactaaaatagaataaaatagaggg

SEQ ID NO: 27717 - DNA, 196 bp, Zea Mays
tttcgtccctgtgcaagaattagtggagcaaggttgaagatgacatagattttgttctattttctaaactatgtttaattcagtttagatctcctgcggcgatttgttgtttaaatttgtatatatcttgaaatcgaaatcatgagaatactgaacgcttaatatcgagtgtatgtgatgaactactgtttctgtt

SEQ ID NO: 27718 - DNA, 847 bp, Zea Mays
taatcctacatatcatttcatatatggattaaccggatgtgccgctggaccacatacgattgttgatggtaaagaagttgtgaactttgcatcagcaaactacctcggtttaattggcaacgaaaagattattgattcttgcatcagttcattggagaaatatggtgttggttcttgtggtccacgtggcttttatggaacaattgatgtccatcttgactgtgagtcaaagatagctaaatttttggggactccagactccattctttattcatatgggatttctacaatattcagtgtgatacctgccttctgtaagaaagaagatatcatagtcgcgtaagttcaccgtattacaaaattatgaaattcacaagtattattggaaccttgacttgtttggtgtatcgaggtatgcatgcttggccttttagacataatatggatttatccagctcaactttaggctttagcacaacattgtcatctctttcttgtgtctattgatgagttgtttttccttgtcagttaactgtacatgggtagtttgatgtgattgcggtgacgagggtgttgactgtttggtgaaatgcttgggacaaagtggccaacaagaatggagtcatggaacatcgacaggaggggtgcggcagcagcaaccgatgtatcccttggacaatctggttttgacaagatgcaaatcaatccgctgtacactgtattccgcacttgcacagattgtttggttaattacaagattatctcagtgttttgattggtacacttatgtatgaaatattgattggtactcatctatattatatgaattatattattattaaatata

SEQ ID NO: 27719 - DNA, 685 bp, Zea Mays
tttctcccaccaaccaaagaaggaagtctccacttgctgaggggataagctgtgcaacccaaactttctcaaaaggttgtaccagaacactcttgagaacacacaggaaactagcagattgtatagcaccaccagcaaacaaacacatgcttaaagagaagctatcagatttggctgccagtgcacaagatgagtgcccacaaatcacattatcaggaaattcaaccatgagaagaagtaacttcatgaagttggctcagatcactcctgctaatcgttcaacccttactacaaaacacaactttgtgtctacatctacgaagcacaacctcccagaagaccagctgtcacaggataccaatgttgatattactgttgacttggcaatacaagggcatttgaaggaacataccttcaagtctttagggcttaagaaagctaaaacaatggacagatccaaagatgctgttgttttagatgacgtctcttcaaaattgcctcaaaatatagggtcaagagctttggccagataccaatgtggtggacctacacctgaatcaaagaaaagcactatagcaacagcatgcggaaagaatgatggggcctgtgaaaaaactgaaggccaggaatctaactcagggccagccttcttgaagctggttcaagaaaagcttagtcctgcaga

SEQ ID NO: 27720 - DNA, 2169 bp, Zea Mays
tcgatcgcctaccgttactacgaaatacgaatacagcgcgcacagcactctctgttcttccagactcgagcttcgtgccgccgctggtgtacgcgctgatggggagctccaaggacctggcggtggggacggtggcggtggcgtcgctgctcatcagctccatgctcggcagcgaggtgtcgccgacggagaaccccgtgctctacctgcacctcgccttcaccgccaccttcttcgccggcgtcttccaggcctcgctcggcctcctcaggttgggcttcatcgtggacctgctgtcgcacgcgacgatcgtggggttcatggccggcgcggcgacggtggtgtgcctgcagcagctgaagggcatgctgggcctcgtccacttcaccacctccaccgacgtcgtctccgtcatggaatccgtcttcagccagacacaccagtggcggtgggagagcgtcctgctcggctgcggcttcctcttcttcctcctcgtcacccgcttcatcagcaagaggcgtcccaagctgttctggatctccgcggcggcgccgttgacgtccgtcgtgctcgggagcgttctggtgtacctcacgcacgctgaaaaccacggcatcgaagtgatcggttacctgaagaaaggcctgaatccaccgtcggtgacaagcctgcaattctcaccgccctacatgatgctcgcgctcaagactgggatcatcaccggcgtcattgccctcgccgaaggcatcgccgtggggaggagcttcgccatgttcaagaactaccacatcgacggcaacaaggagatgatcgcgatcgggacgatgaacgtcctgggctcgctcacgtcgtgctacctgaccacggggcccttctcgcgctccgccgtgaactacaacgccgggtgcaggacggccatgtcgaacgtggtcatgtcgctggcggtgatggtcacgctgctgttcctgacgccgctgttccactacacgccgctggtggtgctgtcggcgatcatcgtctccgcgatgctgggcctggtcgacttcggggccgcgctgcacctgtggcgcgtcgacaaggtcgacttctgcgtctgcgccggcgcgtacctgggcgtcgtcttcggcagcgtcgaggtcggcctggtcgtcgccgtcgccgtctccctgctccgcgtcctgctgttcgtcgcccggcccaggaccacggtgctcggcaacatccccggcaccatggtgtaccggaggatggaccagtacgccgccgcgcagacggtgcccggcgtgctcgtgctgcgcgtcgacgcgcccgtctacttcgccaacgccagctacctgcgagagaggatctcgcggtggatcgacgacgaggaggagcgcaccaagagccagggcgagatgggcgtgcggtacgttgtcctcgacatgggtgccatcggtagcatcgacacgagcgggacgagcatgctggacgagctcaacaagtccttggacaggaggggaatgcagatcgtgctggcgaacccgggcagcgagatcatgaagaagctggacagctccaaggtgctggagcagatcggccacgagtgggtgttcccgacggtgggcgaggcggtggcgtcgtgcgactacgtgctgcactcgcacaagccgggaatggccaaggacagcgccgccgcccacgagagcatggtgtgacgagcaccgccacgccaaccgtatgtgtagtgtgctccggttccggtctgacgtaaccagtcgtcacgcggaccgagatgaattatgtatacacgtgtctcgagtattgtacacctgcaccgtcgcgggaaaaacgaattcagagaagaaaggatcccacccggttttttttggtgaagaaaaaccccatctcgacatggtctcttgaacgcgcgcagacatgcggtgcgctcgcaacttcgttaaggccagatgtgagagggacagagggttccatgggagatgagagttttatagggattaaattctatatatattgttttctagataaatattggcatgataaaatcctctatccagaatcgcctaacctgaacactgatggcctgtatgaaaacactgaactatgctgtgttttctttttttttctccctaaaacgcatgaaagttaatttttcctcttttgtgtgta

SEQ ID NO: 27721 - DNA, 1515 bp, Zea Mays
caagccagaaccccagtaaacccaaacccaactcctccctccccacttccccagtccccagtcctcgcggccgaaacccttgctcccttccgcgatggccggccggggcgcctccccggccgcggcggccgccgtccaggtgcgctgcgccggctgccgcggcgtgctcgccgtggctcccggcatgaccgagttcatctgccccaagtgtcgcatggcgcagcgcctcccgccggagctcatgccgccctccccgcccaaggcctccccgactccgcctccctcagggcgtggaccccaccaagatccagctcccctgcgcgcgctgcaaggccgtcctcaacgtgccccacggcctcgatcgcttccgctgcccgcagtgcggcgtcgacctcgctgttgacttgtccaagctccgccatttccttgcatctgctggcccaggcttttttccgcccccactcccacctcccccacccccgcaacccccagtgccaatgcctcatctgccctttctgccgatgatgccacgccttccattgcccatgctgccgatgctctctcctgctgagctaccggaggagatcaatgaggttgcagttgatgttgagcgcgacgaagatgaaagtggcacttttggggaaactttcattgattatagacctcccaagctatcttttggttttcctcatcctgaccctgtagtagaaacatcctccttgtcagcagtgcaacctccagaacctacttacaagttgactatcatgaaagaattggatgaaaccaatgcattatcttccttacagattgaaacaatagtgtatgcttgtcagaggcatcatcatcatcttccaactggagctagagcaggtttcttcatcggtgatggggctggtgttggtaaaggacgtaccgttgctggattgatctgggaaaattggcagcagggaaggcataaagctttgtggatatcaattggttcagacctgaaatatgacgctcgcagagatctggatgatgttggtgcaaaatgtgtggaagtgcacgctttaaataagcttccatattctaagctagactctaaaacctttgggatcacagatggagttgtttttgtaacttatagcagcttgatagcatcctctgagaaccgttcccgtttgcaacagttggtacagtggtgcgggtctgagtttgatggtcttctggtgttcgacgagtgccacaaggccaaaaatctgattcctgaggcagggagccagcccacccgcactggtgctcttgagaaaggaggtgtgggtgctcttgaacttgttgctatggacatgaaagccaggggaatgtatgtttgccgtactctaagttacaagggtgctaactttgatatcctagaatcacttctggaggaaagaatgatggatatttttgttagtatgattgctcattgacatgaagtagtattcttttaaatttaattaacttggcgagaacaaagtggtagaaactgaaaggaga

SEQ ID NO: 27722 - DNA, 1723 bp, Zea Mays
tcttcaaaatggtgaaagggatggcattttctgctcaatttgtccgttgctgatttcagtcggagattagattagattagatatgtcgctgatggaagtccaactaatagcgaactgaagaccgccgaccttgtgtctacacccgcacattctgttgcatctatacctccttctacaccagcacttcatgttgctcctgcacttttgtctacccctgtcagatgctcatctccatttatcacgccaccatattgttcctcaggtatgcaagcaatttttatttttgatctttctccttgttagcttgattgatctttctccagtatttatttgtgggcttggttaatctaggttccatttagttgttgaattagttctaaaatcatagtggaaccaaaataatgtgtggatatttgcaaacgagtttctcttgaagtcatggtgtgaggaaaaaaggtaatgtccttcacattattctggtttagtataccttgttgattattgacatatgttggtcatgttggtgctccactaccttgttcgtatattaaggcatgctacatttcttaactacgtaccaatgatgtggatacgatttttgcagcaaagctatttttatcctggtgttatcttatctattctcatgacagtgaatttagttttattgttgacctcccacggttcttgacttcctaacatcggccactttatttttagttgattgactggcatgagggtggatacttgactgttgatttaccaatgtctcggggagaagttgtcattgggggtccaaatgtttcgtcattcttgcctaccgctgtccctttgcttcagaatacggtgaaacagaagtccttcattggctcttctcatcttggctcacatgcagtacttgaataccagtttcttcctgagcagccaagtgatgcatatgagaggggaagccagttgcgcttctatgatgctctagcagaagtgttaaactcaagggtagattcgttttctataggatcacactttacccatgtagttgagcaggcacctagctatacatttcacagtcaatcatctggttctagctgtttgtcaaatattattgctagcatggctcaaatccaaatattattgctagcatggctcaaatccacggtcaaaaattggcatccctcaagttgtcagatttgaaagctccctcgcatcccctaaaagattgggttatcatgatgaagaacatgtcacgtggacagaaaaacacaagaactatatttatggatatactatttttttcttcttttgtattattatattcatatccttttttacctttatattattattttttatatatgttgtatttgtctaatattacttcatcataatgaggaagctaagattgctagggaggttgaggctcatgaaaagagaattaaaaaggagcttgagagttgagaagcaaggtctactaaatagaaagaaagaagaacaaatgtagagggaaatggagagacatgatcacgagagatgtaatgaagagaggttcatgcgtgaaaggcaaaggaaagaagaaaattccattagcaacagagacgtatacttataactattatggtagataaaaaatgttacaatgtctctcttctatagaacgaaactgggatatcattcattgatatatgttcgattttattcaataattattatataattgtgcaccgtcgca

SEQ ID NO: 27723 - DNA, 2356 bp, Zea Mays
ccctcctctcctctcctctcctctcctcctcttcctctgcttctctccccgatctctatttcccatttccgggcggctcccgttctccacctcaattattgcccacccatccccgctccctcctctcctctcctcccgtcccacccatcacctcgcaccagcgccgggggaatggcggccgcgctgtggacgctgctagtggcggtggccctgtcggcggcgctggcctcgaaccgccccgtggcggcgacggcgacggcggcggcggaggcggcgaacgaggtgctccgcgcgcaccagctgccggggggcctgctgccggcggggatcacggcgttccggcacgacgccgccacgggggcgttcgaggcccggctggacgcgccctgcacggcgcgcttcgaggtcggcctccgctacaacgccaccgtctccggggtcatcagccccggccagatcgccgacatctccggcgtcgccgcgcaggacctcttcatgtggttccccgtccacgacatcaaggtcgacatcccctcctccggcgtcatctacttcaacgtcggcgtcgtcaagaagcacctcccgctcgccgtcttcgacgcgccgccggcctgcacgcccgacccgctcctgcagtttcacagataggcagcacggagttggctgggtgggttggagcttacgtcgacaggaagaagatcgaaaggaatgagaaggttcttacagcactagtagatatgcacgcaaagtgtggcaacattgagcaggcactgagtgctttcagggagatcccacgacctgatgcctatccatacacagcactgattagcggcctggcaacacatggacacgaaaatctggcactttcagtgttcgaaaggatgcgggctgaagacatcaagcctcaccctatcactttcgttggtgtgcttacagcatgcagccacgcagggaatgttgaaaagggactggagtattgggaggcaatggtgcaggattatggtattgagcgccatgcggaccactatgcctgtgtcattgacatgctcgggcgtgcagggaggattgaggaggctttcgagatggttcaaacgatgccgatggggccacatccgggggctcttggtgcactcctgagtgcctgcaagacatatgataacgttgagattgcagaagttgtcgcaaacaagctatttgagttggaaccttggaacactgggaactatatactcttgtcaaacatatatgctgggaaagaactctgggaggaggcagaaagggtcagatcactgatgagaacaaaactgccatttaaaagtcctggatccacttggtttgaggatcgacagagagagcatgctaagatgtctatcatggactgaggatgagcagaaacaccactttctggagatggtggaagctaggaaggctgaaaacatagctatttgacagtcagcaaagcagaggagcttcgtatcagtttgccactaaggtcctatgtataggcactggtcaaggtgatttcctatagtcatttctcatcctagcctcactctctcgatggcacgagctctaattcatcgatcttgggaccagtgacctccttgacatcattcaatcctcaatgatcttgaatgttggcacaacctttatacccagtttctttactgaaagctgcaagtagcatgcgcgggagcttttcagcatgtcatattccacggggcagagagtcgtgaatacacaagaaacagggaaatattcccaactgagggcttgattagagggggatttaagagattgaattcttttctatttaattttgaatagcaagagatttaatccgctccaatctccttcaatctactcctaatcgaacaaggattaagggcttgttcgctttcctctcaatccatgtgaattggttggaattgagtgggtttaaatttcaaacaagtcaaaatcttttggacttgttcgttttgtacttaaaccatgtggatcttttggacttgttcgttttgtacttaaaccatgtggattgaggggtattggggtgtattaaggccttgttcggttatttccaatacatatggattggatgagattgaaaaaaattgagaagaagtttgacttgtttaggattcaaactcatctaatctcactcaatccacatggattgagagctaaccgatcaaggcgtaaggtaaattttgactagttgtggatttatttcctctcaatccacatggatttggaaaaaaatgaacatcataatatttttcaatcctatccaattgacttgggacagaaataaccgaactagagtctacagtgaggtgagacgtgttcgcctctt

SEQ ID NO: 27724 - DNA, 507 bp, Zea Mays
ctttctgtgtcaaaccagcaagctccgccactgtcactcaactgctcgccccgcgtgtgctcgtaaattttcttggtcgtgtctgctgagctgaccaacgctccagctcgccgttatcgccaagtcccacgcagttgtgctgttctctcgtcgtcattcattcctatttttccccgccatatgctgcctcgtcatgacgcgtgtcgtcgtctttaatctcaatagctcctccgatacgtgcctcgccgtgcttcgcctcctcgtgatcagccccatctgggtcatgtgggcgaaagatctcaaaacctgtcagatgttcgacgacaagcccgaaccagaatttatcaacattttcacaagtattgagtcacgtttgatgctggtaagctagatttatttgcttagtaattttagtgctttgcccggtaggtgctatcggcatttcatgcgaggaattttagttgtgaagtgaagtcagtgctatgcattcatgtgcataatgcattt

SEQ ID NO: 27725 - DNA, 168 bp, Zea Mays
ctcgtacaaggtttaaggtttcttgatgtatgagctatctccgaataggctagaaaagtgtaattattataattagtcttatattgctagctggtacttgcttgtgactgattttaatgttttgttataagtgtttcatcctcttcggtgtatgttggggacttgttc

SEQ ID NO: 27726 - DNA, 2015 bp, Zea Mays
atggataagatcaagtacgaaattcgtgagggtgaacaagaatgggtgaatgaagggcggagtaggcttggactaaaggacaaagacactaagaatggaccgtgggtggctcatattaggctcatgaagagcaatcatacatggcattcagcaccagtgaacaaccaagaactcctgtctgaaatgggtgttttcgatggtgagcttcaaggatctgtatctggaagaagtgttgatgcccatgatatgctctgcattgctgaactaagaaagaaaacggcttcagttcgcagaaatagtgctgtccgacacacagaggaacaacttgttaaatcactcggagtgaagaaatgtatatcgaacagtaaagaggggaaaacaagccctattcaagaacttcagggaaaattgaagggaaacaacaatttctctaggaatattgttttagctttgagtgtctctagggatggccagactaatttatctccagatagactggtgtcaataggaacaaaaaggggttcaagtacaaaggttcttgcctgtaagaaattggctaagaggagaagatccaaggaactgtgcaatctaaatagttcattggatgtgactaggactgaccagcagagaggaagaaaggaagcggcagagccaatgaaagatcaccccttagcattggagtgttcgaaatctgatgctcaagggcagcttgacagaactttggaggatgcacagaacataactgaattatcaaatcaggagaacctgttacccacggtgtctcctggctttatatcaacgtctaatgggaaaggtactaacatacatgatactcaatttgaggaagagccgacagctaccctacctattgatgggagttcacagtgcatcattgacatttctccattgaggagctgctctgctttggagagatctttgccttcaccaccgcaggcttcgttcgtcaagaggtcacctgtgtggcgtgtagttgacgcaaaacatgtgtttaaggagttacctcaacaaccacatttccttccactccaaaaataccccccaacactgcgtgaaggaatagcattaggtatgatggtgtcattctcggaattggtgaagtttacaatggaagcaagcatagacgacagcatggaatggttcgaggacaaggtcaggacagtctcccttctggaggcaaatggattcagtgtgcaatctatacagagcgtcttgaccgaactgatcgagatcaaatctgagcgcgcccgtatccatggagagatcggcaagctgagttcaaagctagcggagaacacggcttcctcctcccgagtcggtgcactgctcgatgaaaaagatggagccgcagctcagctcgagcaagaactcgggcgcatccgccaggaaagccagaagatggcacaggagaaggagaaaatagatgcagagggcgtgagtatcaagacagcatgcagcgggtacgaggatttgtgcagcgacgcggaacgcaagttcaaagaagtcttggctcagctgcggcggaagggcgccaggtgatgcacaagctttgggtatcgtttcgctgcttctaactctgacacctgtttatgctgtagggctgtagttttatctatgtatcgcagtgggctcagatcgatgtgctgtggttacttttgtgcaagccgttcggtatcgtttatgtatctgtaggtatccatctatggcttaggaagcctgatgaagtctcgactctttataattgctactcctatattaattgccagctagttggaccgtacttagttgcttgtagcatatttagggtgcgtttggacacttgaatcagttctgtttatcatctaaatcagctcagctgaatcggtgccaaacggacggatgtgggaatcggagccgaaactgctacaccatggcaagacagtgaaagaagacgccaatgaatgtatcatcttgtgctcgctgatgcatcatctacaatattgtatcctgaattgcta

SEQ ID NO: 27727 - DNA, 3077 bp, Zea Mays
atggcctccgcctccctgcaccccgcttctccctcccacccaaaccctaaccatagccccgacgcagatctccgatctgatcgccccatgcccgacgccgacgccgtaagcggaggcgcctcgcccacttccccggagaagcgggaggaggaggaagaggaggcgccggggaaggaggcgaagccggcggcggcggcggaggagcagccgaccccacggaagacgcgccttccgcgcgcttgcaacaataagcccaaacccccgccgccgccgccgtccgagcgtccgcgccgccgtgccgcggcggcgtcgggcgccggcggcgcggacgagacgccacaatgccgcgtggtcacgcctctcgtgtcggagcccgaggcgcctgctgagcttccccgctggcggctccgctgcatgtgggagctcggctccgtgctcaacttcctccacgtgttccgacctctgctgaacatcactggggagttcacggctgaggacgtcgaggcggcgcttatcactcccaacgagattctagatgatgtgcatatgccactgctaaagtcaattcctcctgtaactcgcatggctatgggacgtggaacctgggtgaccgtcctatgcagaaagctgaaggattggtggcattgggttgcagaaggtgatctgccaattgttgcatctcatggaactgaaattgagacatacaaaacactagaaccagctattcgtttattaattttgaaagcgatatgtgatatccgtgttgacaagaggatattcggaacttcattgacagttcccttaagcatggtcatgacctttctacttttcgtaaagaacggattggaggggattcccttggaatctcatactggtatgaagatgatgagattctcgggcatagattgtatcgtgaaattagacgagtagaacaggttaagaaggagcctggaaagaggtccaggggaaaaggaggatcttcagctatttcagttgtgtcctaccaatgggaaactgttgcgtccacctttgatgagtttgatgatgtggcagaaaaactcttttcaagtcggaacaggacagaggtttctcttggaaagaagttgaagattgaatatcttccagagatagaaaagctccataaaaagaaagagaggttgctcaaaaagcaacagagagaagctcttcttcttgatagctacttggcatcagatggacttaccaccggccgctctctccgtgatagaaagcccgtgacttatacatttgatgactatgatcgctcaataaatgaagccatcaaaattacgaagaaaagagagaactcagctgagcctgttgctactactgccaatagaagggtgcttcctccaagatcggaggcaccaagcaatgggaagttaaataatggtccctcaccaacaaccaatgactcatctgatggaaattcttcaaagtcagatgactaccgagacagcgatggtgaacaagaaaatgaggcacttgatcgcagcaaccggcggaggaaaagatctcagagatacacacaagactttgttgaggctgtctcagatgttgatcctaactttgacagtgacgacgatatcatgggagaggcagtgtatgatgacgaatacctgagaagtcgcaaacagaataagccatcaagtgcttctgaagaggatgaagagttccggttggaagaagatgccgaagatgatgatgaagaggaatattcattgagtaccagtgaagatctagaggagccacaacggcataaaaagctggaaactcgtggccggcgaggtacgaagctgagatcagttggtgaaatccaagcaggtcttagacgcagcaagcgttcttctcgtcctcgtattaactatcgccaatatgatttttcggactcggatacggagcctcgaaaggcaaggaaatctgacgcatcagatcctgatgctggctccgatgccgagaatgatatggagctctcgacatcgagtcaagagcaagaggaggaagaggatgatagtcatgatgaagaaaatggtaataatgcgaatgataaaatggaggaggaccacactgcagaagaaaataaaatagaaccagaggaggagaaggagcagccacagcagcagcctgtagagaagatggatgctcccagcagggaaagtaaaagtgtaggaagaacattcctagatctaaacgagcttgcacctggaggtggctttgatgatggcccaagcttgacagtgagagatgacatggacaacatctagggaataaagttttgttttgatacatttcgggtgctgttggccagttttctgacttccaggcaagggcagatccatggtcctgatggcctgtgatgaatggtgcaactatggtttggcggtgtgagcttatggttatggctgcttcactgatttgcagcagcaggacaggcgatgttccacttgaagcgactttgagcttctccggtgcttatgttatacgtggagaccatgaggaggtagttttatgtatactacatgaaggtcgcaatcgatcatagctgtattgcggccaggctgctgctgcgttgcggccggtctctaggatataaatttattgcctccatttatttagtcttaggcattgtgatgtcaatgagaacatggagggaaacctgtacaccgagtgcggtccgtcggcattcgcccgaccttttccacttgtagattgtaggttttttaaagtccgggcgggattagttctgtatctatacctgacagtctgtttttttctgtcacacctgtgtagctgacattgagcttgtccctgaatgcacaccggcaatgcctctcgttcgctctatatggagaagatgctgcatgtattcagctgatgttgtagcctatggacatgtccattactcagagtggctggcctggtgattgctaatttgatgtatggtttataaaaccaaattcctgtgtgcgtattggttagttgcaaaactttgcaaagataaataatttgggggtgttctgttccattaaacattgcaaaattatgtgaaatgtttggtg

SEQ ID NO: 27728 - DNA, 1917 bp, Zea Mays
atctccagcggaaccgcatgccccaaaagcgaagccaaccagcacaaaaaggagcacaaagctctctctccctcccccctctctctctctctctcctgttccccgcgagagtcgctcagggccgcgacgaggagaagcggcagcgcgtcacctctccaatggcatccccgtccctcctccgtgcaacctgtgcgcttctcgagtgctgaggctccctgtccctaagacaagcttgcgcgcgcgatggagggtttttcgagggacttgctgtgcgggattggcaagggggacgcgccgccaccggagaagaggccggggcagctgcgggaggagatggaggaggtggagcttagcctcgggctgtctcttggcggccgattcgggctcgacaggaaggggagcaagctcccccggtcgtcgtccgtggcggccatgctgacaacgccggtggaggtgccggcgccgccctccctctcgcgggcgagctcgctgccggtccaggcggaggcgtcggaagttgagaggaagcaggggctggatggatggggttcttgccgtgagggcggcggtctcggcgtgcaacacgcggcgaggctgccggcgagcgggaacccttcctctgcctcttcggtaggtgaaggacagattttgcaaggcaccctcatgaggactagttcactccctgctgtcattgaggcttctggcaatgatgactggaagaaacgaaaggaagcacagagcctgaagaggctcgaggttaagaagaagaggattgagaggaggaactctctcgcctgcaacacttcaaaagaagctgctgggcagagtccaaaagagatgaatgcaaacactgacaaattagtaagttctgatgaaactattgtcagcgctaacgaaagtcatagcagtggcaagcatctggtgaaggggcttccaccaaagtaccaggccacaattacatcagaagacagttcgtcagcaatgcgaaagaagccaaactcggccttcaaaggaacagccatcactgaggagcagaactcatcatcgtctgttccttcctccggtgaagctataagtagcgtgacggcaccaagtctgcctctgttgtctttggtccccataacagcaacccttggttccagggaagaccaaagcattttaggcagggctggtgcaagggcaaacggcatgggggacgtggaaaggaggatgatgcaggagatgccgggcgtgttcaccaagggcctgtccaacggcagcagggtcgaaggcttcctgtacaaatacagcaaaggagaagtgaggatcgtatgcatctgccatggaagcttccttactccttcggagtttgtggagcacgccggcgccggcaaggtagataacccgctgcgacacattgtcgtcagcgctaccccgaacctgtgactgtgaggccaggcagacccgtgcacaagctatagtgttctgtagactcaggacctgagcctagcgtcagagcaatgtcaccgttagactgtgtggtgcggtgcttatgcccgattaaattggtgggcattgtggtaacataacctgttgataatgttttgacaatgttttgatccttcctatgcgtgatttagttctgcagcttcttcttctttttttcttttgtgttcctatcgtggtttcatacctgggcaagtagatttgtaggttagtgaggggcttgcggtgccactgtcccaatggccttgctctgggtgagctcgaagagaagttttttagactcatttgggcaagttttctacgtccaatatggtactgaagtttttgttgctggtttcgggtgttacaaagcagagtctgaactcttcgtgcttatgtgagatgaatacagactaagcatgcttgtgtttttataggaggccacctgtattc

SEQ ID NO: 27729 - DNA, 1729 bp, Zea Mays
ccacgcttaaataaaatattaagtttccgcaagcaagaccaaaatatacatggtgcttgagtacgtcaatggaggagagctgtttgacaagatcgcgttgaagggtaagctgacggagaaggaagggaggaaactgttccagcagctcatagatgccgtgggatactgccacgagaagggggtttatcacagggacctcaagccagagaatgtccttgttgatgcaaaaggaaacataaaagtttctgatttcggattaagtgcccttccacagaaccaacaaaaagatggtttgttgcataccacatgtggcagccctaactacatagcccctgaggtccttctgaacaaaggttatgacggctcgatatctgacgtatggtcctgtggtgttattctatatgtaatgcttacagggaatcttccattcgacgaccaaaatgtggttgtcctttaccagaagattctcaaggggaatgctcacattccaaagtggctctcccaaggtgcccaagatatactgagaaaaatcctggatcctaacccggttacacgcatagatgtggatggaataagggcacatgattggttcaagcaaggctatgctccagctatgccatttagcgatgatgaagaagatatcagcatggatgaagacagcctaaacatcaccgagcataatgacatccaagacaagatagcaatcaaccaaatcaatgctttccagctcattggaatgtcctcctgccttgatctatccggattttttgagaaagaggatgtttctgaaaggaaaatcagatttgcatcaaattattccccagcttatttatttgagaagattgagagcattgtcagaaaaatggggttccaggtacataagagcaacggcaagctaaaagtgatccaagactgcaagggactagcaaattcaagagggcaagagtcattattaatttctgctgaggtgtttgagatcaatgaatatctttatgttgtcgaactaaagaagtcatctggagactgctccctgtacagaaagttgtgtgagacgctctcagaggacttgggcacatgcaaaagccagcaatttttaaagcaggactctatcagacaagatataggtagatataatagtagcttttaacaaagagacacttactaaatagcctatagacacaaactaacacaaacaatatactgaatttaaaacagtatattgtccatgcacctattttaaatgtgctctcttatgccttttgtcatgaaacctcaagaatcttagtttatgacaaattggcatctgacgatgtattgagctcctaagggataatatgatgtaaacaagtaaactacacatataagagattcagagttacctggtctctatgtttctctagcctaccccaacttgcttgggataaaaggctttgttgttgttgttggaatgtaagattgtttgtttttgaagcccctggttgacttccatgactcaagaaaaattgtgatatgttgttcgttgaaagaagtcctttcagatgcatgttcagctaaaagaaaacctgtgaagaccatggaaataagataacaactcctacacggtgcatttggtacaagtttgaaactttgccaatcaccagtagtccttgcatgagcaccgtccttcactgaaatggtggaaacggttacggtctctaataatcaacttgcgctcgtataacagggcaat

SEQ ID NO: 27730 - DNA, 1994 bp, Zea Mays
ctggcatttctagacataagtgaacaaatatttttgcaaccttttgccctagctgaaactctttgtggttcgccactttacatggctccagaagtcatgcaagctcagaagtatgatgcaaaggcagatctgtggagtgtcggtgtcattctatatcaacttgttactggaagaccaccttttaatgggggcaatcagatccagttgcttaaaaatatactcaggacatgtgaaatacgcttcccatctgattgtgacttgagccatggctgcattgacttgtgcagaaagttgctgcggctcaattcagttgaagaatttgtgcaccacccatttctttctgaacatgctccagagaagactttgagccttacacaatctgacataagagatggctttccaagaaataatagcagtccaacaaggcattcaaaccatagttcacaagaagattgtatgccttttcctttagatgatgagtcaagtggacaggacgagggtccagttcctgacagtaagagtctgatgaaatcttatggatttcccatgggtaaaagattggataaaacttcaggccagaagagtccaccgaaacataacagtttgttctccaggtatgtcttgggcaataatcatgcacctagtagccaacaccatggccattctggtaaagtgaccaaggaaagcaagattcatgaagtacaaggtcaaaaggttgtttatccagaagattcccctatcattgattcattagagtttgtagatcaggaatacgtcttcgtgtctggaccacacctggagggatcatcatcttcaacaaatgcctctcagcagcttaatgtaccagcaaaatatgataattcgtctgtttcaccaccaaagttaactttcatgagtgcaccaatgccgataaatggtttgccgattaatagacaacaacttgctgggactggtagctttgacagccactgttctcctgcatctggcacttcacagggatctgcagatataagtgatgccatggatcagcccccatctgattatctgacgaggattagattgttggagcaatatgcatcagccatagcagggttggtcagagatgagatcaaaggtggcagacacttggaagcgttctctattcagctaattgttcttgcaacctggaagcaagcaattcatataggaaatacctttgtagcttcacctgcaagggagagtccctcacaggatatccctatgaaggggcatattgctggtgcttcccatttgcctgcgaactcaaagctagctgatgatgcctgcatgcagatagagaaacagtttctctctgaagttgaatatgctgaagaactagccagcattgtgggacagatagctgatggtacagagatgccagatgcaattgaaatgatatttcagtcggctttactcataggaaggcgaggcggtgttgatgaaatgtttgggaaagccgcggatgccatgactgggtatatgagggcggtatccatgctgcggtttctcctggtcgaggcaccatcactcgccctcaacccccctttgactctaacgagatccgatcggaatcgactgcgcacatacattgacgctctcaacaccaggctctgtcagatgcagagccagaggcattgactgctgccatgcgccctcaaatcttgtccaggtgttgtacaatattctttcatttgtaaatatatttgttggcccaaactagggcatatgtaacatgtcagaactgtggaactaggcagagcagcgaaaatctattgtaaatatatttgtagtgtggaattaggcagagtgtacgtggtaggttcattctgtgtcgattcaggcagaagcttgaaaaccgaataaccaataatagtcacgtgtggaaatgtaaacagctcggcctctacttcgtagattctttattatatattagtaaattagctcgataaaaaaaattatgcacctaatatcatctc

SEQ ID NO: 27731 - DNA, 2093 bp, Zea Mays
  misc_feature (1)..(2): n is a, c, g, or t
nntcttatgacccagatgcaccaagcgccaagaataatagcactattaaggttctttcggaaatctttaggaacactgtctcctactcttctccaacactcagcaaaggagtcctcatcgtcattaatggtcagatgaccaagactgaaagggccatgatgctgtacccaaattgtcgtgctagactacaagaagtcaggagatgctgaatagtttcatcagcttggtcatggagaggacagtgctcagggtgtgaaagacatccgttttctaattttcaactgtccagtatttgtctctaatagtcaaccaaataaaaaccttgcattttggaggcgcccaagatttccataaccttttccaaggttcaaatttaatggagcctagaaagaaggttttattgcaggacttagggctagtttggaaacttaaatcccctccaggatttccagggctaattttcccctcaatcctcaggagtcccggaggggatgtaagtttccaaactagcccttagaagaaaattttcctgaagcctcatgtttccaaatatgaatgtcatcatcttgagatagggctgtgccttcgattaaattccacaactgaaagaattgttggatacctgtcaaggacaggggtgccttgatatctctaacccaaggtctgctgtccaaagcttgctccaccgtttggaatttcagagctttttcgtccactttggccaccatatgagggaccagatcagagatagaggcacccataagctacctatcagccagaaaagggcaatcttgccattacccacatgagtttcaactgcagttgcgaagaaatctctgaccagagcctgaacagggaagtccagaccaggccaaggccaagaggaatcagtttttggaaccgaagccatctagcatgtaaagcccatcccatcagttgcaggtttgggattccaagccctccaaggttcaatggcctggttattttctcccaagacataagacaacttccaccattcacttctttcctccctttccacaaaaggcccttctcaatttatcaatagccttaaccacccatttccatttaggcacattcaaggcaatgaagtccttattttgaatcaattgatctccttggtcaaacaaatatgacccccctttggaagatgggacagttccttctcaagggatgaggaatcttgaggttgaggcaaacgaagttttctcagtgtatcgtgaccagtactatgaaggtggcatctcatctgtttacatttgggaggatgaagataatgggtttatcgcatgcttcttaattaagaaagatggacaaggaaaaagagggtacatgcagattggttcatgggatgctattcatgttgttcaggttggtcctgaagaagaaggagcggcacattactgcttgaacagcactgtgatgctctcattgacaacaaacaacaagcagtctggaactttcaacctgtctggatccattagacggcagatgagtatgactcttgctgtagctgatggacaccttgttaatatggggaaaatgatagaagaaatggaggggaagctgagaaattcactggaccaagtttattttgggaagaccagagaaatggtttgcactcttcggccaccaccagaagttcttaatatgagactacctgacagctgagccagtgcatagaagtgtcaacttaacaaagaaaaacgtattcttctccactctaggcgtggtctgttcttgcttcgtagttaatagtctgtgcatctgtatcgacatctgttgagtggaattcagttaccaacagatgaatctccacaaaacgttgtgttggcgttctgtatcttctgaagaatctgatggtgttgtggctggccttgctatctgtcaaagtactaatgcggtgtttgttttgaggagtcacctcatatcggataagattgtgcatcctgagtccattttaaaacctggtgtttcttatgcttttacaaattagcttctgagaaatgaagtagtgctggataatttttttctgcttcacaaatcaaataaaaaaaagaggtgcaggaagatcg

SEQ ID NO: 27732 - DNA, 1057 bp, Zea Mays
gaaaacccaaagaccctgataacttatccccaaattaaccggtagcgtaaagccggtcgatttccggaccccatattttcttctatcttcccagctgccgttgccggcggaagaagccaattgacgtgatccccgccgccaagcccaaccccgccgaccggagctgcatcctctccttctctctcccataccacgacgagacgatcccatcggcgcccgcgcggtcccttcgatccaagcaagcattggaggagaactgacagacttcatcattgtgcttcatgaccgtaaagctgtcaaggctttcagcagtcgcattcatctttcacttggggcaggattgagtgctgcagcaggacccattggcagagcatttgaggcagacgttcgggccagtgaaaagggttctgggatatgctacacttacagctgcaccaaaggtgccttcgttggggtttcactggaagggaatgtggtgacaaccagaatggagaccaatctacgcttctacggtgatgcatacctgacggcaaccgatatcctgtttgggagggtggagcggccccgagctgcccagcccttgtactcagctctagatgatctgttctccaaaatggtttgctagcccatttagattggcgtgatactctgcattggtggcatgcagtcatgtatgtatataaacataaggtagcagcaaaaatcctaaacaggagatatggaagcggaaagaatgtacagcttttgatggatggtttcactactgatagcagtccatacatgtaaatattggcagaagaagatttaagggctgtttggttcgcacactactgatatcagtacgctgcagtgtgccactggtggactcatccatgcaatggaaaattttaatacatttgttagttcgtttgtggcttagattattcgatggggaagggggtatttcgctgcagtcccatgctgttgtagtagattctgttagtggaaggaacgctgcgatttttccccatactgtacctgttgtgcttactgttcacaaggatttctctatcaatag

SEQ ID NO: 27733 - DNA, 2300 bp, Zea Mays
ccgtcctttcccccacctcgatttcattgcctgcattgcatcgctctgccgcgtttgactgctcatctagcagcctttatttcgccccctccctgcttaccgtttctctggtgtgcacttcccttgagagcgctcccgttcgtgggagtcgccggcggattcccaccggatttgatgcgcgcatcttcaaattcgcggccttttttttttgctgcctcgcaaaagctgctgcgtcttagcttttccggcttcttaatttggacgatgtgtacggatcactgtcggccctaattatttccacagttttttaacccgcgggctgttttatatgtgtttctttttgaattgctcgatcccttctggcgctcttcatcttcttccgtggaatggatttttcctttgctcggccttgccctttgctgcctcaggtcccgtctgttttgctctaacgcagcatctggttgcagcagcacaccacaccccttctgttgttttggaataactggaagcctttcgggtttggaatttggcacctagcctgaatgccaccgaaaccattttggagatgagtgggattcattaagtgatccctggcaaatgattgagcaagcagtgacaacttgtacttagcaaaatagtaaattgccaaggctgttgtaatgggggtcaacggtcatcacgaacctcgcagaggatgtaatggcaccgtctgcaatggtagtgtaagatcactagatcattttggtgatgtagatccatggacggcatgggcatacaagcctcgaacgatctcgctcttgctgatgggaacatgctttttaatttgggcaagtggtgctctcgatccagaacggagctcatctgctgatcgtgtttcgtcagtcaagaggggtgtatttgcgatgattgctgtttttttggcttactcttttcttcaggcgccttcaactgtactcattagaccacatcctgccatttggaggctagttcatgggatggcagttgtttaccttgtcgccctcactttcttgcttttccagactcgtgatgatgctaggcaattcatgaagtatcttcatcctgatcttggtgtcgaattacctgaaagatcatatggaactgattgccgcatatatgtacctgaccatccgaaaagcaggtttaacaatgtttatgagataatttttgatgagtttgttatcgctcatatcctcggatggtggggtaaggctataatgatacgaaaccaaccacttttgtgggtgttatcaattgggtttgaattaatggagctcacttttcgccatatgttgccaaatttcaacgagtgctggtgggacagcattgtcctagacatattgatctgcaattggtttggtatttggactggaatgagaactgtgcggtacttcgatgggaggacatacgaatgggttggtttgagccgccaacccaacattatcagtaaggtaaaaaggatgctgggacagttcacaccagcgcagtgggacaaggatgagtggcaccctacgcggggtccttggagattcatccaggtgctgagcctctgcgttgttttcatggctgtcgagctgaacacattcttcctcaagttctgcctgtggatccctccgcggaaccccttgattgtctatcggctggtcctttggtggttaatcgcgataccaaccatccgcgagtacaatacctacttgcaagacagcaaaccatttaaaaaggtgggatccttctgctggctttccctggctatatgcattgtggagctcctaatctgcatcaagtttggacacggtctgtttccaaagtcaatgccttcgtggctgatcacattctggtcagcagtcgccttgcttctcgtgctctttgtgtggacgtggaaataccgaacaatgaaaaggaaaatgatataattgtgaccaaaaaaatgatttgtttgcctccattctttacccgatttagtgttatcgtgtacataaaaatttattcaaattgtgtacatgtgctagcagtcaagtcttggtgatctgaagaggattatccatgagaaatttctatgccttctttgtctttgtattttccgtcagcgaagtaggatactggttcccctttggccctttaattcgtctgtattgccgcgtactacttcgttggccgtctcttaaatgtggagaacccttgatgcaacaacctatgaaataatgggattcgaatcccaaactgttgaataatgtttctcgatggcccaggaaaccatatctgcaggttgcacgacactaaca

SEQ ID NO: 27734 - DNA, 717 bp, Zea Mays
tttgaagaaaagtcgccgcgttcctcttgcctgatgaaatccacttctcgtctagatctaagcctccgcgtggcttccggatcagatgcttggtccgatcaaacaacgctcgaagcgagacgaggctgcatggtttttgtgcctggaggtttctaatccgcgtggttaaggaaactgggtactacaatttgttgctacaagtgcccgatccgtcgaattgatgtctgccgaccttcagagctgcgacgttccgggaatctggggggatctggatcttggcggactggacaattgggaggcgtctaaagcatggctggacaattgtgagatgtgacatcttgaaggcctttgccatgttgggtgcgctcgcatggcaggcatcataataaagatgttggttttgtgtgctgggtgggagatcgcacggggaattgttttttcatccctgggttctcccgccctttgtgtccccgtgccctgcttcgtgttgtttggcttctcgttctacgcttcatcaccggtgctgctgcaaattgaacggatcttctcgtctcgctgcgtgctgcaaattgaacggggctacatcgcaacgcaacacaacacgcaagttcattcaccctacgtttatcccgtaaggctataaagcacatgcgaaaggcgttcattcactctgtaaggcgttcttcacccaacgcttctcgcacgggggtcttctat

SEQ ID NO: 27735 - DNA, 1798 bp, Zea Mays
ttgtggtgccgcatcgtttttgggctatttaaggggggagtcgtcttctccatctctccttagcctaggagaaggagagatccagaggcaaaagcttcagggtttgtacaaattctagatctaaccggactaaccagaaaacaaaacaaaaaaagacgaaagcatgagccacttcgccgccgccatgaagagcccccttgcggtcgccgtcgccgcgcccgccggcgccgccgacgctaagagcccgctcttctgccccaagccgcggcgccccgcggcgccgctgcggtgccatcagagcggcggcttctccgacgccggcacggatctgctcgacctcctcctctcgaagggcgacgagagcggcctgtcgtcggcgtccccgcagccgccgctgttctgcggctcgccgccgcggcgagcgtcgaacccggtggtccacgacagcaggttcggcgcggactgcccgcccatgcccgtgccagggctgcccgtgcaccggccaagcccgcgcccgtcgacggcggcgccgtccatgtcgccgcgcgggtgtgcccgcgcgcggttcgcgttccagcccgccgcggtccgcgtcgagggttttgactgcctcgaccgcggccgcggcggccgtggccatggcatcaccgccatggcctagactgtgcacatacaacagccagcaccctgagaccctcctcccccgcccttccatccatggcacgcaagagccacgagcaccttgttggaggtagaagaagaggagggggtaggggaggaattgagagggatcggtttgtcctaaatcttacccccctaaaaagtaaaaaaaaactagtacttttatataaacccgtcccatccttccacccccaacaattacagcgagtttaggtaattttatcacagatcctttttgtatgtaaataaagttcgaggttcagaaattatgtagaaaaaatgtagaggggaggaggagcagggacaaaagggcttaaaaaagcagagaagggatgattaatcagagtttcctctctcatgtgtcactgcccctcctctcttgaaggattaattagccattgggtttagtgggtgggagggagggagttcgggaatagttaggtagtatgtcctagttcgccaattaatgatgctttcttttttggtttttgatggggaattgttttttctttgttgtccgtccgtccatgcaaccaagaaatttcatggagaatctgtacaaaagagtggctagctactacacgagagtccgttctgagagaagcaacacgaggtcagtcagtggatgagtttagagtgagacattcacacgctgagagggttgataatttgtgatattttcctcttttttttttcttcctgattttgtatattgtaatatcctgctggattttccaatgaatgagtgaatgaaccaatcaatctttataatagtagtagtattgttaggcatgctatacgaatgatttgatatcttcagctgctaccagcagcagcgccctgggattcaggctgtgctgatgtgattatggtggttgaatggtcccatgcccggccctcacctcacatggtttccatgtgccgaagcaacacggaggcgataacgacggtgacgtgtcagtggctcactgactcctgctatagaaaattaatttttattgttgcgttgaggactccgtcaggaaccgagccggatctcttgtggtctcagtgtgccgtctctcgtcgtgaaggtgcgtgccaactgccatccgtaaagagggacataatatactta

SEQ ID NO: 27736 - DNA, 1761 bp, Zea Mays
accatcagcacgcactttattatccctcgccgtccacacatccagcaccaaatccaaaaaccccatctcccacctctccttccttaccggaagagaaaaaaagatgaaaaccaaacgaacatacacagatacaagcacagcagcaacgatatccaaagctagcagctcatcagataggcaaacaccaagaagctaagctagcgcgccatgcagacgccgaccatgtcgacgtccatggccaccacggcgccagcgaagccccccgcgccgccgcggcaatgctgcaggtacctcctcctcccctccaccggccaccgccggagcgtggcggcatggtctgccaaaaagaagaacccgtggctggacccgttcgacgatgggcccgacgaggagttcgattaccagggcatgttctccggcgggaagcaggaggaagacccgcggccgcccgaggaccctgagaacccgtacgggttcctgaggttcccgcagggctacaacccggagctggacagcctcgcctccaaggtccgcggcgacgtgcggcgcgcgtgctgcgtcgtgtcgggcggcgtgtacgaaaacgtgcttttcttccccgtcgtgcagatgctcaaggaccggtaccccggcgtgctggtggacgtggtggcgtcggccaggggcaagcaggtgtacgagatgtgcaagaacgtcaggtacgctaacgtctatgaccccgacgacgactggccggagcccgccgaatacacgcacatgctcggcgtcctaaagaataggtactatgatctgatcatctccacgaggctggcggggatcgggcacgcgctcttccttttcatgtcgtcggcgcgcgacaaggtcggctacgtttaccccaacgtcaacagcgccgactaacaacctcgccgacggcgggtataaagacatgctggagtggatcggccggccggcgaagaacgttccccagcagccgacacagccgctgcgggtgtccatctccaagaagctacgggcgtacgtggaggacaagtatagccgcgccggcgtggagaagggcaagtacgtcgtcatccacggcatcgcctctgactccgtcgccaacatgaagtccagaggcgacgacgactgccttcttcccctcgggcactgggctcagatagccaaggaaatcagctccggcgacagggggctcaagcctctgttcgtgatccctcatgagaagcacagagatgaaatcgaggaggaggtgggggacgacacaagcatcctgttcatcaccaccccaggccagctcacctgcctcatcaacgactctgccggcgtcgtcgcgaccaataccgctgccgtgcagctcgccaacgcccgcgacaagccatgtgtggcgttgttctcgtcggcagagaaggcaaggctgttcctgccatacgtggagggcaagagcagctgcaccgtcatatcttcggcgacggggaacctgatcgacatcgacctcaacgcggtgaagaatgtggtgaaggacttggagcccgctcccagcttcgcattggcacagaagtagcagctgcgttccaacatcacccccattgctttgtacatagttcaaacagcagcaacgctagagagaatggtgcagtattacaaactacaaacagcacacatgccgtgtattccgatgttataaataacatctcatatcagctatgcaacgaataaaacttagaacaagaaaccaaaaacaagataacataaatgaattaa

SEQ ID NO: 27737 - DNA, 3022 bp, Zea Mays
gcgcgcgctgtttcgtctagatccgatccagaggaggaaactctcagactttgatcccaaatggagcaaggatgaacttacaaatttttatgaagcctaccgtcaatatgggatggactggagaaagatcagcatagcgataggcactaagtcatcggacatggtgcagtctcttttcactttacatcggactttcttatctcttccagaacatcaagccactgccatgggatttattgcgctggtgactggtcatcacaatgcttcggagaaaaccacgactcatagaggatatgatcacgtagtcagagcatctggaaaggcaaggaaacatggtgaaaaaccgaaatcaattgatggacctgacctgcccaactgtcaagaagcgaaaatttctggattttcagatttattccagagtcgatactatggcgtttcttcagaattggtcaggtacatccgaaatcatgctgttcggaggcgtactcctcgtataccagctatagtttctgcagacaggagtaccattgatgaggccacaccaggaattgaaaatgtcatcagttctaccaagagaaaatatgaagcagccaataacgactctgctattgtcccaacaaataagtactctcctgacagagtttctggcttcgctgaagcacacaaggctggtcaagatcattgtttgttggagaccataggaactgggcatgtagcgacatgtcaacaacattcaaagaaaacaagaattcagcaaactatggaggaaggtcagactggtgtagttgatcatgagacaacgatggcatctaaagaagggaataagccagttgatttattaaacaacaatcagttatttatcgacaatatttctgaagatgatatgttggtcttggatgtattgtgtagcctgatgaatgcaccctctaaaatgccaaaactagagattaatattccttcaggttcggttggaaaaactgactctacgctatctcagagaagggaggaaggccaccctaccattgatttatctaaacaagggaagccagttggtaaatccagtgcttccaagactaggaagaaaaaatataagatattagacgcagaggtgcctgctgtagcacaaaacgtttgtggtaatagtttagccctgccggaaacactgagggttgttatcactgatgattcttccttgtgtactgactctggaagagtggggataccggaagcatctgaagatattcctgctgaagttcccagtgcacaaacagaaaccaagcctgaagtgagaatgtctggaaggaccagacggaaatctcaaatgcattgcaaaacaaagcatatgtcatgcaatgaaggttcagataatttacaggcaaaaaaattgctgcactgtttgtcatccgaaccacttcgtagatggtgcacatatgagtggttctacagcgcagttgattatccatggttttcaagtaatgagtttgtgcactacttagatcatgcaaaattgagtcatctttcaaggttgactataccagaatggggtacaattcgaagctcccttggtattccacgtcgattttcaaattattttctggccgtggaaaaagaaaatcttgaggattatcgggagaaagttagaaaaatctatgctcaactcagtgatggttcaagggattttctacctgcagacctagctagaccattttcaattggtcagcaagttattgttcgtcatccaaattctagggaactttgtgatggcaaagtggtgatgatgggtccggattgttacaaggttcattttgatgatcctgacattggtgttgatattgtaaaggacactgattgtatgccagtcaactggctgtataaccgtcctgacaacatgaggagctgcctttcaaatgatgcgtacagcatactggagatggatcacattcctgaccttacagcaagtgagaatgaggatcatgctgtaaacggatctactgtacttgaggggctcaaaagtctgcgcttaacatcagatagacaacctaaggcagaatctattgtaaacagtgaaagaccaccatataggagtacatctgacagccctgcaaaatctagagattgcccagacaataatagtgctggccactacgatgagctagagtcatatatagccgcatttgcagaaagatcactatcacaagccaggcagatggttgacaaagccatgcaggcgaaccctggaggtaatgaggatgaaaaggtatgcacgtcaaatcaagtggcaggttgtgcaggcccaggttttgaacctgcccgtggcgcccaacttccttctgacctgatatcgaacggcatcgccacggttctttcaatcaagagccttagcgactcgcgacatccgtttgctaacgtagcaggcgtcttggatcacgcttgctccatgctgcgtccaagctgtccgcagaacctcgctttgtacgatcaaataaagagagacatcggtatcataaagacccagatatttgcacttatgccaacagcattgggcaattgcagccctcctgtcccgcccatgtaactgggccctgagcaagatacttccgctgccttcatgcaggccctgcagtagtacacgcttcttcctttgctgtgagtacaaaacgcagcgaacttgatgttatggaggaagtcctatgtatatacctcgatggcttaatagtttataggtatacacatattcaggatagttgacatatgattttggagtgaataaagttatgtctgtagtcatttaggatgtagtgaataaagatgtatgcctgcagtaagtggcggacccagaaattggccaaggcctgggtcgaagcgaccaaaaactctaatagtagtatataaaaaaaattgtacggcgaaacaacgttgtcatggatattaaagatgacatacaagttatgatgtagctacttctaaatgtatcatatcaacatcagtgctttttgcttcagaaccttgaaggaaatcatat

SEQ ID NO: 27738 - DNA, 1281 bp, Zea Mays
tggctctactccaaaatctttccgttcctttccactagctaggcaaagataaaggtcgaggaaagtgcaccaggagctgcgacaggagtgattctgtctcttcgtgaaagtttacaggactgtaaacaaagccttgcatcctgccaggtggaacttgaagctgcaaaatcagaaattgagaagtggcattcagcatttcagagcattccagctgtaccttctggtaccagtccagatcctgtttcagtggtatcttacctcagtaacctgaagtcatcagaggaatcattgaaggagcagctggagaaagcaaagaaaagggaggcagcttttatagtaacatttgcaaaacgagagcaggagattgcagaactgaagtctgcagttagagatttaaaaacacaattaaggccaccgtcaatgcagacaaggagattgttgcttgatccagcaattcatgaggaatttacacgcttaaaaaatcttgtggaggagaaagagaaaaaaataaaggagctacaggacaacgttgctgctgtcaatttcactccatccagcaaactgggaaaaatgctgatggctaaatgcagaacattgcaagaggaaaacgaagagattggggcgatggcatcggaaggaaaaatccatgagcttgggatgaaaatcgccgttctgaagtcgcagaacaacgagctccggaatcaatttgatgttttgtataagcacatggacggcgtgacgaatgacgtggagagatcaaacgaactggtggccatcctgcaagaggagctagaagccaaggagttagaggtgactagactgaaggaggagacgctttcccagaaggaaggcactcaagaagcaccggcaccggcaccagctccggtggaagagggagacggagctggaaacgatctgaagccggcttcagatccgctgcaagtgaagctggaaagttaaggggagacggaggggtggaaacgaccagacggtagtgtgtttgttgagactcccgatgtgcgggaagtcgtagcatattaggccaatcttaactagtagaaccgttcgatttttataatatctatgttcattttagttctatctatatagttacaatataaaacatgctctctatctctcatctagatgtgtacgtatctgtgccgcagttgaagttctccgactggtctcgttgccttcgtcatactctccctgcaccaatctctctacccctacatgccaacatcacacagtcaatcttagcccaccggacgacgatct

SEQ ID NO: 27739 - DNA, 214 bp, Zea Mays
ctcaattgtgcaaggatacgctccattttataaccaaccgacggtccatctggggaggagacaccggtttccgagtcgtcgcataggtccgattccctcgattcgccggcggcgccacagcaagggttgctgtgttgggtccccgatcccggcgaccgacttctcagaaagcagcggcggcgaacggcgcgttgtgctcctgaaaaacccttag

SEQ ID NO: 27740 - DNA, 1622 bp, Zea Mays
caggatcatactgtcttttggcgtttcttctccggctctttttcgtttgcctgtcggttacaaggtggaacgtcttcagaagcttctccactagattagtgtaaatagtagacttgttcaggtttagtttggttggaagaattagtttctggttcgtgttcatttctgctagcaataatggctgcgatgaacggaaaggtattgggtaaatgtggaaggaacatgaatagtctcaagagaaagcgggagaaccccgctgcatatgatgctgacatattccacaactctgaattgcatcagcaccctgtcaatgattctgctgttaggtttcatgttgataaagaccgcaaggcaaagatcgtgtgccacttcaacaagcaggttttgcagagctataagaacttcatgagtagcgcaccacctaaacgtattttgcttcgcataggtgctgtctggaaagacttcccagaaaagattgtcaaattggcacaagctgacttcagggcgaaaaaaacaatcacagaaacaggatatcagaaccagctatttttgctggattttgcccatatgacattcatagacacgaagacaggtcttcagaggccgattgcttggatcgatgaaaatggaaaccgctacttcccagaatcatttgtgcaagatcagaaaatatttatgaagaaagattttggcaacggatatcatgattacattagtgttgagtcaaatgggacacgagaaatgaatgaccagcttggaacatcagaaagttccgcagaaagttcaaacttcggttcaagtactgaagatgtttccagtcctaagagagctagagctgaaaataattccatcataaaaaaatactgtgatatgggagaagctattggagaaaatgagccatgcactttgttgcctacagcctgtaacctactaccacgccaagctaatctgggtgaggtatcacgtgcccagcgcactattgaagccgtggagaagctgttgttgcaggggatgggttcagttattgaatccaaggacattattggaatctacaggactccattattggatgaccatggacaagtccgttaccataatcacgaaaagcatgtacaggttaccagatgtcatcgtggaaacgcaaatgtccgttatgcatggcttccttgctccaaaagcactgtgcatgaaatgatgctgaatagttctttacaagttcataagccgcccattaagtgtgcagcctatggagagggcacattccttacaccagcaaatcgttctgatgcctgaaatagttcaccctggatctaagcagcaccaacctagtagtgactattttgatagtggagtagatgaccttaaaaacccacaacattacattgtgtgggatatgaatctgaataggcacatctatcctgagtttgtagtcaccgtcaaattgccttctaaaacaaaagattacttcgtatcgcaagaagactgccagaattcatctgatctgtcactggtgttgaattctagttcacccgactgtatttcagagacgagttccactgttggagcagcaagagtgcagtaattcagattgtgtgatttgacacaatacttgacttgtgttt

SEQ ID NO: 27741 - DNA, 628 bp, Zea Mays
aaaattctgggccttatggggcttctccctcatcgggtcatccctctccgccccgcatctccctcatcgccccgcgcggccgcgcctccctcggtccctccccgctacctcgaacctctcctcctcctcctccgccgccgccttccctccggccagcgcatcctcctcctccgcctccgccgtcctccggctggaggcacatcctctgcctcctctgcctcccctcatgtgacacagcgcacatcgcttccgaagtcccaagagccacgtcgctcgtgccaccggccgccgctgtacgtccatcctctgtctccagactccaacagtgtgcatccgtcccagttcctgattacttttccgcgaccgtgagctgggagtatggccgaggcagcgaacgaggaggacgccaagaggacaggactggaaggcactggcctgccgctgcaaggcggctcccacggcaaccttcgtagcgctggcagcgaccagcagttgaggcagatgctcgattcgctcaaatcctcaaagtccccggctgtgatcaactatggtgcctcatggtcgtacgacaactcaggaagcacggtgaccgtgctggtgctcaagattagagaagccagtacctgga

SEQ ID NO: 27742 - DNA, 2406 bp, Zea Mays
ataaacactgtacgagatcactgaccataatcattagcaatttagcattagcctcagctggcgtaccgtcgagtccattcccacctttctaccccttccagaaacctccaggatccgactccaatcgaatcgccaaagcagacaggggcgctcgcgggggcgccgagctcgacggggcgagatggccgggaacgactggatcaacagctacctggaggctattctggacgctggcggggccgcgggagatctctcggcagccgcaggcagcggggacggccgcgacgggacggccgtggagaagcgggataagtcgtcgctgatgctccgagagcgcggccggttcagccccgcgcgatacttcgtcgaggaggtcatctccggcttcgacgagaccgacctctacaagacctgggtccgcacctcggctatgaggagtccccaggagcggaacacgcggctggagaacatgtcgtggaggatctggaacctcgccaggaagaagaagcagatagaaggagaggaagcctcacgattgtctaaacaacgcatggaatttgagaaagctcgtcaatatgctgctgatttgtctgaagacctatctgaaggagaaaagggagaaacaaataatgaaccatttggactcaccttgattgaggctgctgcatatggtctacccatggttgccacccgaaatggtgggcctgtggacatacatcgggttcttgataatggaattcttgttgacccccacaatcaaaatgaaatagctgaggcactttataagcttgtgtcagataagcacttgtggtcacaatgtcgccagaatggtctgaaaaacatccataaattttcatggcctgaacattgccagaactatttggcacgtgtagtcactctcaagcctagacatccccgctggcaaaagaatgatgttgcagctgaaatatctgaagcagattcacccgaggactctctgagggatattcatgacatatcacttaacttaaagctttccttggacagtgaaaaatcaggcagcaaagaagggaattcaaatgctttgagaaggcattttgaggatgcagcgcaaaagttgtcaggtgttaatgacatcaaaaaggatgtgccaggtgagaatggtaagtggtcgtcattgcgtaggaggaagcacatcattgtaattgctgtagactctgtgcaagatgcagactttgttcaggttattaaaaatatttttgaagcttcaagaaatgagagatcaagtggtgctgttggttttgtgttgtcaacggctagagcaatatcagagttacatactttgcttatatctggagggatagaagctagtgactttgatgccttcatatgcaacagtggcagtgatctttgttatccatcttcaagctctgaggacatgcttaaccctgctgagctcccattcatgattgatcttgattatcactcccaaattgaatatcgctggggaggagaaggtttaaggaagacattaattcgttgggcagctgagaaaaacaaagaaagtggacaaaaaatatttattgaggatgaagaatgctcatccacctactgcatttcatttaaagtgtccaatactgcagctgcacctcctgtgaaggagattaggaggacaatgagaatacaagcactgcgttgccatgttttgtacagccatgatggtagcaagttgaatgtaattcctgttttggcttctcgctcacaggctttaaggtatttgtatatccgatggggggtagagctgtcaaacatcaccgtgattgtcggtgagtgtggtgacacagattatgaaggactacttggaggcgtgcacaaaactatcatactcaaaggctcgttcaatactgctccaaaccaagttcatgctaacagaagctattcatcccaagatgttgtatcctttgacaaacaaggaattgcttcaattgagggatatggtccagacaatctaaagtcagctctacggcaatttggtatattgaaagactaaatctttgatctttgctggtcagcagaggaatcaaagcagtaggaatgtaggatcgaggagagtgacaggacttcccctctgtgcacttcgccgaaaagtaataatgggattgctatgcatggcccttgttgtacactagaaaattgggcacgcaaacttgtgtcagtttttccgctgttgcgaaattcagtgatggtgtttttgtaactataccaacctgtgtcagttttgccgttgttgcaaaactcagtgatggtgttttttgtaattattatacatccgaataataagactggtgtttccagacagactatgcaagctaaggggaaatcacgattttcctagatcaaatatgtaatatgttcttttccgatgca

SEQ ID NO: 27743 - DNA, 1715 bp, Zea Mays
ccccatcctatccagagcagagaaagagcaacaattaccgactgcagagatcgactgatcgagaaagcgtttacagtcacaattaccaactgccaggacaaatgcagtacgactacaggaggagatgtaaaaaaaagatgttcttgtaatctccaaccaaggatgcagacatgtcatggaagtaaacggagggcctagccataaaacggctttgcttttattccaaagtccaatacaagtctttgggtaattgggcacagaagaggagacagagagacggagaggggagacccggtcactgccaatgccaagaacaagaaaccagagaggacagtcgtcaatccaatccgagtctcctccaaaaacccatcaatctgcaggaacgagagcagcaggagagcatcctaggaaaaaagttaggaccaactgaccgagcaaaaaagtggtgtgagtgttgaagagctcctcaacatgatggatccggccttgcttgacgacgtcatacgccggctgctggaggtgaagaatctcaagcctgggaagaacgcgcagttgtcggagtcggagatcaagcagctctgcgctgccgccaaggagatcttcctgcaccagcccaacctgctggagctcgaggcgcccatcaaaatctgcggtgatgtccatggccagtactctgatctcctgaggctattcgattatggtggctatccgcctcaggccaactaccttttcttgggtgattatgtggatcgtggaaagcaaagcttggaaacaatatgtcttcttttggcctacaagtgtcagcattgatagacgaaaagatcctctgtatgcatggtggtctatctccagagttgaacaagctcgaacaaatacttaatctgagtcgccccacagacgtgcctgatactggattgctctgtgaccttctttggtctgatccttctaatgaagcaacaggatgggccataaatgatcgaggtgtttcatatacatttggtcctgataaagtttctgaattccttgagaagcatgatttggacctcatctgccgagcccatcaggttgtcgaagatggatatgagtttttcgctagccgccaactcgtaacaatgttttcagcccctaactactgtggagaatttgataacgctggtgccatgatgagtgtagatgagacattgatgtgctccttccaaatactgaaacctgcgaggaaggtgttgggtggttcaactaataacaaatcaggcttcaagtcatcgagaggatggtgacaatggcaagcctgatatcaggttggttggtgagcagcacgccagtggtcgacggggggttgttccatcataatcatattacagcggctgcaactgacaggcccaatgcatcttctcttccatgttggatcaacactcttgtaatgtattatttactgtgcggatctgagaggatgtgaatgatttcatttgcgtcctcaagttcaaaagattcaggaaggcatgcttgaaataaaaatagccagaaacatgcaaggtgctccacgacgcagcacggcatttccagtgttttctttttgctgtctagttctgaatatattttaccgccagaccagcacgtaagcttgcctggcaatggtttttatttgttgctatgccatctcaaaagtcaaaaccatggatttatatcaaaagtcaaaagactttgagaagtattta

SEQ ID NO: 27744 - DNA, 4113 bp, Zea Mays
tcgcgctcgagctcgagccgcatctcccaaaccctacccatataaaatattaagcccaacgcccgagtctctctctctctcaacttcccttcccaccaccctcaccctccccttcccgccgccaccaccagttcaaccctctctccctcaaaccctagccgccgccgcgctcgttccggattcggttccgatccgatggcgtccgccgaggaccaggccgcggccgccgcgctgctggggggtgacccggcggcgttcgacgcgctgctctcgacgctcatgtcgtcctccaacgccgaccgttccgccgccgaggccgccttccaccgcctccgggcctcgcacccggagcccctcgcgctgcggctcgccacctcgctggcggcgcccaccacccccgccgacctgcgcgccatggcgggggtcctcctccgcaaggtcctctccccggccccgtcttccgacgcgtcctccaacaacgccacgcccccggcgccgctctggccgcagctctcccccgcggggcaggccgcgctcaaggcgcacctcctctccgcgctccagtccgatcctcccaagcccatcgccaagaaggtctgcgacgctatctctgagctcgcggcctcgctgctgcctgagaacgcctggcccgagctgctgccgttcctcttccgcgccgcgtcggggcctgatgcgcacaaccttcaggagtcagcgctgctcatcttcgcgaggctggcggattacatcgcagaatctctcctcgaccatctcatgactatccacaacctcctcgcctcagccctggcgcatcccacgtctcctgatgttcggattgcggccctgggtgccgcagtcaaccttgttcagtgcctgccaaccaactccgacagggataagatgcaggatttgctcccagcaatgatgagggcgctcactgattgcctaaactctggccaggaagtctctgcgcaggaggcactggagctgctggtggagctcgctggcgccgagccaaggttcctgaggaggcagattgctgatgtggtaggggcaatgttgcaagttgctgaggctacacagctggaagatgggaccagacacttggcggtggagtttgtgattactctagctgaggctagagagcgtgcaccaggaatgatgcggcgactcccgcagtttgttggtaggctgtttgcagtgctgatgcagatgctgcttgatgtcgaggatgaccctgcttggcactctgctgaaactgaagatgaggacgcaggggaagggaacaactatggagtggcgcaggagtgccttgaccgcctttccatcgccattggtgggaacgcaattgtaccaattgcttctgagctgctaccacagtacctgtcttctgctgagtggcagaagcaccatgctgcgctcattacacttgcacagattgcggaaggatgtgcaaaggttatgcttaaaaatttggaacaagtcgtttcgatgatattgaatggatttcaacatccccacccacgtgtgagatgggctgctatcaatgccatcggtcagctttctacggatttgggcccagatcttcaagttcattaccaccagcaggtgctgcctgcattggccaatgctatggatgatttccagaatccacgagttcaggcacatgctgcttcagcgattttgaattttagtgagaattgtacaccggaaattttgacgccttacctggatggaattgtgaacaaattacttgttcttcttcagaatggaaagcaaatggtgcaggagggagcattgacagctttagcgtcagtagcagattcatcacaggatcacttcaagaaatactatgatgctgtcatgccatacctaaaatctatcttgatgcatgcaactgataagtccaataggatgctccgtgccaagtccatggagtgtataagtttggtaggaatggctgtgggtaaggacaagttcagagacgacgcaaggcaggttatggaagtacttatggctttgcaaggagctccaatggaaactgatgatccaattaccagctacatgttgcaggcttgggctaggctatgcaaatgtcttggacaggatttccttccttacatgagtgttgttatgcctccactgcttcagtctgctcaactcaagcctgatgttacagttacttcagctgaatcagatgacgatattgcatcagatgacgatagcattgaaacaattacacttggtgacaaaagaataggaattcgaactagtgtgctggaagagaaagcaacagcttgcaacatgctgtgctgttatgctgatgagcttaaggagggtttcttcccatggattgatcaggttgccccaacgttggttcctctgctgaagttttacttccatgaggaagtcaggagagctgctgttgcggccatgccggaacttctacgctcagcaaaattggctgttgagaaagggcaggctcaaggacgtgatgagtcttatgtcaaacagttgtctgactacataattgcagcacttgttgaagcactgcacaaggagccagaaacagaaatgtgctcatccatgctggattctttaaacgagtgtatgcagctttcgggtcttttgcttgatgaagcccaagtacgagctatcatagatgagattaaaaacgtcattatagccagtgccacccggaaaagagaacgctcggagagaacaaaagcggaagattttgatgctgatgaaggagagctactcaaagaagagaatgaacaggaggaggaagtatttgatcaggtcagtgagtgcctagggactttgattaaaaccttcaaaggttctttcttgccgttttttgaagagctctctatgtacattacaccaatgttgggaaaagataaaacacctgaagagagaaggatagctatctgtatttttgatgatgttgcagagcaatgccgtgaatcagctctgaagtattatgacacataccttcctttccttttggaggcatcaaacgatgaaaattcagatgttcggcaggctgctgtctatggtgtgggtgtatgtgccgagtttggtggtcatgtttttcgccctctagtaggagaggccttatcaaaattaaacaatgttataaggcatcctgatgcacgacttcctgataatatcatggcatatgacaatgctgtttcggcgcttggaaaaatatgccaatttcatcgggatggtattgatgcagctcaggttgttccagcctggcttagctgcttgcctataaaagacgacaaggttgaagctaaagttgtacatggacagctttgctccatggtggagaggtcggatgctgaaattcttgggcctcacagtcagtatcttcctaaaattgtttcaatttttgcaggttttgtgcaatggaacagaacttgccactgatgaaactagaaacaggatggtgaatgtcttgaggcgtttccagcagactttgcctcctgattttcttgcatcgacgttttccaacttgcaaccgcagcaacagctactgctacagtccatcttgtcgacatagttgttttttctgtcgctgcaaggtgggggtttgttatttttcttgatgttttatcagccaattctttatgtcgtatctttttctggtggggtactttgtgaatgcattgtttgcttcaacgaactggaggctgtcaccacacatggttttgatagagtgtatattgtctgtcttgtattcgaaatatggtttgagatgtgctgcaacagaggtgcaagggaaacggtgggatttattgtcggatgggttggacatttgcagttttttggtaatgagatcactataagtggagttactttctgcttctctttgaagccattttaattctgttgaaaattattaaaatgtgctctgttggaagatgcagaagctcctccgggttcatactggtaattggtgaaataaaaagcagtcttatctttctgaatgaaccttgggttcgtgtgtatttaagctggatcgttaatttattctgagataaaaccgtagcaattcgctaatgtgttcggagatcaaaccgttgcaaatttccatctggc

SEQ ID NO: 27745 - DNA, 818 bp, Zea Mays
ctgatccaacggctagcaagcgttgacgtgtgagctccgccggtacgcgcaccagatcgagtgtacccgtgcacgaggcgccggcctggagtcgcggtcgctgccgcatggccctggcctccctcgcggcctcgctcccagtcgccgccaccgccgccgcggtgagattcccattccgtttccgcatcggtcgcgccatggcctccgccgccgcaggggcctcgccggcgagggtggccgtggtacagatgacctccgtgggggacgtcgacgccaactacgccacctgctcccgcctcaccaagagaatcaagcatgtggctatctcttgggggttttcaagaaaagggacctgatgattctcaccagtacaatactcatgtattaattgatgacactggaaaagttaggagctcatatcgaaaaatacatttgtttgatgttgatgtacctggcaatatggtgtacaaggaaagtcgtttcacagccgcaggtgatactattgttgctgtggatagcccttttggacggttggggcttactgtttgctatgatttgagattcccagagctttatcaaattttgcgttttaagcatcaagcacaggtattactagtgccatctgcattcacaaagataacgggagaggcacactgggaaattctcctccgagctcgtgcaattgagacacaatgttatgttattgctgctgctcaagctggaaagcacaatgaaaaaagagaaagttacggtgattctataattattgacccatgggggacagtgatagctcgacttccagaaaaatgtggttgcag

SEQ ID NO: 27746 - DNA, 766 bp, Zea Mays
caaccacttcgccttagcgtgaagtcgtgaactctgttcatagtccagggccgccgcctcagcgtggtcttgtacaatggcggaggattctggcgccatcctccgccacatctcctccgtcaaggatatggtcgacaaggttaatgaagagattgaacaaaacatacagaagaccagggaaatagaatcagagatagtgcaacattctgaaaccgaaaagcactatctcaacaaggagtctgagttgacaaaagaagtatcagttactgagtttgaactcaatggtcttatccaagtggctgcttctgaatcagatttacttaaagtggcagagggaaatttggagttccagaaagttgctcacgatgtgattcggaaaagagtttctgataagatggaaaaattcatcaatgaatctatggggtttcaagccaatatgctcaaaagttcaaatgaggatttagttctcttactgaatgaaaaaagttcactggaggatgaaagtgcgaaattgaaagtgaagataaacagtatacatagttcatccaaggaatacattgcagagattcttgaggaagtgaatacagaaaattcagctgcttgtcactcatcgcaagaagtatgaggactcatacatgtcctcagaagagggaagatactggtatgcttcgatggtgaaattggctctggcaagaagctttagtcatggtttcatggagctttcccaatatagtgaaaaatggtaaagctgaagcggaagaaaaat

SEQ ID NO: 27747 - DNA, 3124 bp, Zea Mays
gacggacggatagcccacagaacgcacgcgctaccttttctctctctacgaccttccccttacctattcgccgtccctctctcctgctgccctccccccgccgccgccctacggcccaccccgccgacgcgccacctccgtatctctcttccccgcctacgcgggcggcggatctccggatccgcgcgggggagggagatctggattggatggtcctctccggccgcggctagtccggcctgatctgatccgacccgtcccggcggcgcagtccgggcaggttgtctgggaaatttcggactcgggcggtgttgatcccggggagaggtcgtgcctcgctcgatctccgcataaaagctgtgattttgtggcggcgcggctgcgagttaccgggattttcccagggtttccggcggccgatccgcgctagttacgctattctgttccgtcagggcggcctcgtgttgggggctcgtttatttgccgcgtcccggaggagggttttgtgttcttctgtcgttggctccatggccagcggctctgatgccccgaagcagtatggaataaccaagccgttgtcgttgctcggaccggtggaggccgacctccagaggacggaggagctagagaagttcttgctcgagtcgggtctctatgagagccctgacgaatctgctaggcgggaggaggtgctggggaagcttgaccagattgtaaaagactgggtaaaacaattgactagtcagagaggatacactgatcaaatggttgaagaggcaaatgctgtactcttcacctttggctcataccgtcttggggttcatggacctggagctgatattgataccctctgtgttggaccttcatatgtgaaccgtgaggaagatttttttattgtactgcatgggatattagcacaaacagaggatgtgaccgagctgcagcctgtacctgatgcacatgtccctgttatgaaattcaagttccatggaatatctattgaccttctttatgccagtgtctccctcttagtagtaccagctgacttggatatctcccaaggatcagtgctttatgatgttgatgaagctactgtccgtagtcttaatgggtgcagagtagcagaccaaatcattagacttgttccaaattttgagaattttcgcacggcattaagatgtttgaagtactgggcaaaaaggagaggtgtttactctaatgttactggctttcttggtggtgtcaactgggctttactggttgcgcgtgtctgccagctctatcccaatgctgtgccaagtatgctggtctcacggttttttagagtttttacacaatggcagtggccaaacccggttatgctttgttctatagaagaggaagaacttggtttccctgtttgggatccacgcaaaaatcctcgagatagatgtcatcatatgcctattataacccctgcgtacccatgcatgaattcaagctataatgtttccacaagcacactgagggttatgttggaacaattccagtttggtaatagaatttgccaggaaattgaaatgaataagaccagctggcctgctctgtttgagccttttcaattttttgaagcatacaagaattatctacaggttgacatcattgctgaggatgatgaagaccttaggctttggaaaggatgggttgaatctcgattgcggcaactaactttgaagattgaacgtgatacatatggaatgctacagtgtcatccttacccacatgaatatgcagacccttctaggcagtgtgctcattgtgctttcttcatgggcttgtcaaggaaagaaggtgtgaaaatacaggaaggacaacagttcgatattcgaggaacggtggatgagttcaggcatgaaatcaacatgtatatgttctggaagcctgggatggagttagctgtttctcatgttcgtaggaagcaggtcccagcttatgtgtttccagagggttataaaagacctcgcccttcaagacatgtgaaccatcagtctgataaaaatgacactgaagatggcacagcgaccaggtctccagacagtcaactgaagagaaagcatgattctgttggaactgatgatatcaggtatgcaaagaggtcatcgaccagcccagttcatccgaaaaattcacctcaatctggaagcactggcgatgagactagatgtaacaaccaaataaaaagggctcctagcgatgcaagtggtggcagtccggcttcacctcaggcatcagagagaagcccagatactattctgtctgcccctaggtgcacgacaacaggagcagtgtgttctggtgatgcaattagtaagcatagtagtgttcctcttgttgagaactgcaccactccgactgtagcagtgtgcacaactttgaagcgcgtagctgagaaagttgtttcagagctagttggaagtgaaaggctggggagcaacaacagtgcggaattgttggagagtatggaaaaggaggatgtccttgctgaaaatgttcgttttggcgggaatggagttgcgcaaggtggccttccagaagagttagagccaaacaataggattgaagcggtttcttgagctgatgcagggttagtggcatcaaccacacaagattggggaaaaaatggtgtagagatggataagttctacccccttgctggagggaatggtaagtagctcaactcacaagtttccttctggacacagattcgcaattacgggggtttctatgatgatggatgatgggagattatcggatatcatgtcttgcacaacggcatggcaaaaaaaaaacgacgaagaagattttgtggaaggccatggtcgaatgtcatgtcttgctgcgggcttccctgagttgacttgtttgggtctgagatgcttctgccatgttctaggtctagaatagaactagatgcggtgattttgcattgtctcctgttgcggtgcggatcgttctttactacccccgtccggtggtgctctacttcgagcatgatcggcagatgaactcctagagttgatatcactttgtgaatagaagggtctcaataaccagaaacacagctcaagctgtaggtagagatgtc

SEQ ID NO: 27748 - DNA, 2177 bp, Zea Mays
atttcgggactgttcctcattcacgtgtctcctcccctcccctcccctccccttcccccatgacctgtccgtctcaatctccctcttccccgcaccaaatcgaagctacccctgttcctctgcgatttgggctcgtcctgtgtccttcctgttgctcaaaagctcgctcattcgatgtccctgtctgaaaggcgacaaatcccactggaattcggagcacagagctttgaatccaggggccaaaactttttgctcatctcccttgcggaaaagcgcctcctctgcgtctgaaagtcggatcttttttcacagattcgatttgaagttcccgagcagctcgaggaccgcggtgtcgcatagtccgtgatgttagggaaagctttggtagcttatcaagacggagccttgagacctgtagtagttgatcaaagcaggtgggttggtcttcctcctgaattgcttcgagatgtaatgagaaggcttgaggaaggtgagagcaattggccatcccggaaaaatgttgttgcctgtgcagccgtctgtggaacatggagagagatatgcaaggatatagtgctgagcccggagttctgcgggaagctcacttttccagtatcacttaaacagccgggaccaagaaatggaataatccagtgtttcataaaaagggacaaatcgacatcaacttattatctttacctatgtcttagccctggtaagcatacaacatgtgcactgtttttctcattaatatccttctgaatgatcctacaaggtgacctcgaaatagagcagtaccggatttaacttctgcgtgtgccacgatgcatgcggatatacagtttcttgttccattaatgcttcttctcagttatctaacattgatgacaatggtaaatttaagaaggattagacttactctttgacacccttagtgagatcagataaactgttatcatgaataactttgcttaacgctttgatggtttggatcatctagttgtcctcagcgaggatgggaagtttctgctagcagctaagaggaatcgccgtacaacatatactgagtacatcatttctgtggatcctaaaagtatatcacgatcaagtgatggctgtgttggaaaaatgaggtcaaattttcttggcactaaattcatcgtgcatgacactcgagcaccacacaatgctgggagccttgtctcctgtgagcgcggcagccgcagaatctcctctaggagggtttcccccaaggtacccactgccagctaccccattgcccgggtgaactatgagctaaacctgcttggcacaagggggcccaggcgtatgaattgcacgatgcattccatcccagcctcaacgctggaccctcaaggcatggtgcctgagcctggccaacccaagcagatcttcgtccctggctcgtcgtccttcgaagattcctttcgcagtgcaaacaacaccccttccagctcaaggttctcggtcgcagaccgctccttggattggagctcctctcgattctcagagacgagcggattggctcagcaggacgacgatgacagtgaccaggctaaggagaggcctttggttctctgcaacaaggagccaaggtggcacgagcagctgcagtgttggtgcctcaacttccatggtcgggtgaccgtggcttctgtgaagaacttccagttgatagctgcaccacaactagattctgaaccgtcacagcaagctcagcagcaaacccagccttcgaattcgtcttcagcatcggatcatgacaaagtgatcctgcagtttggtaaggtcgccaatgacatgttcactatggactaccgatacccactctcggcattccaggccttcgccatctgtttgaccagcttcgacagcaagctggcttgtgaataaattgtacataaagaacaggaatacatgtagattgtatctctgcagtaagtatttacagtgtgtgtgctggtgtagtttattgccgcgttgattcagtcctttgttggctttagtctaagctcaaagctaagaatcggcactaattatgacttatgagctgcagttgtgtatcacttttatgtctgtaacttggtaacacgaattatcggcactaattatcacttttcagccttacacctgtgtaaagctatatattattggct

SEQ ID NO: 27749 - DNA, 2058 bp, Zea Mays
ttcaccgctgggtcagccatggccgccacatccatcaaggtcgcgcacctcacaaccctcgcgctcttctctccgactccaaaccccttcggtccgaagtccagcaaacacagagctagagccccaccacccatctccatctccatggatccggccctcgtggaccctgcccacctgcaggcccttatgctcgcctgcggccactcttgcacgctccgcctctcgccggcgctatcagtttccgccgttgagccggtcgacctcagcaagctccggactgcccttgcgcacagcttcgtcgtcgtatctgtcttctgcggtgctaggttcttcacacatgacagggaaagggagggggagggacagagattcttgggcttggagatcggtctcgatcttcagggtgagcggcgccttgtcggattcgggcgcgccgtctccgacctcgggctcaccgcatccgtccatgacattgtggtaatgttctctttcgcagtgaatttgcccgtggtagcgaaccctgattgtgtgggtagaaactattaactgtgtgaaaccttatttttctattctgttcttgttaacctcattggcattaacacattttccatctgtcatttcttgcaaaagaattgatcttttttttttggaatctgtgaagagacattgctactgggctagaggaagtgtttatttgattgaataccatggaacattaacaaaaacaagggcaaggttgtttcggttagcagattgtggattgtggcttttaggttgttacaatctgcaagatgaaacaaagcagccataagattctattggtccacaggccagattataaaggtccaacaatcttcttccacatttgcaagacaaacaaatagggcctaagaacacatagccttgtagaaataacagtggttttgtcctaaacttacaatgtaatgcctattgattggtaagcaagtttggaagaataagcttctgcattactgtacttctttctgtgcttttgcattaatagtgtgttatcttgtacaaattaaccaacagtaagtaaacttcttgtgtatttctattgaaagtttctatgtagcattaagtgcaacttggcaagtttgttttgaattaattgtattggaattttgggcattagagcaatcacaacccagaaactactaagtgatttccatagctgccacctcactaagaaatcactcatagaagctataagtttcaacgctaatttttttttgttgtggtgtcgtaataaatctggatgtgacgacgcggcaagtgagctgtgtgtgggcttcacagatggaaactggatgctcatctccaacgctaaaacagtggttttttgtgtcttcgttgcgcgtgtagatctgatttctcaaggaggaaaccatttttccctctttctcattaattttcttgctatgtcaccaaattgcttgtggcagctaaataatgctatagaaactagatgatgtggattgtggagggtgccaaatgcagtagtctagctttgatattttatacttctgttccaaaacaggaaaaaaaaaacttatagatatgtcacatgtgttcatataactagtttcagtgacttacaggtacatccattactacagaggagaggaattggccaaaagatagtgaacaaaattacaagggtacttcatagcagaggtatatatgacatctctgcgttatgtacagcaaaggagaggcccttttttgaagcttgtggatttggtgatgatatgatgggttcaacaacaatgttgtatactagaaaaacacagaaatagagttcattaaaaagttctcaattggtataatgttatttgttgatatgataactcatctgttggtcttcactgctgatgtttcaaagcattactctcagaaaaggttgatcttcacagctgatgtttgaaatcattttactcagaaaaaggggggtgggttatgagatgtagcagttatctcaatgtgcgcacctattgggaaaaataatcacaatggagtcgtgacgattaagacaag

SEQ ID NO: 27750 - DNA, 2897 bp, Zea Mays
ccatatcctccaagcgcgtgcttgcctgcagcaacagatcgcttgtcaactccattggctttaatgggtgcaccttcacaaatatttgttgggaagtcaaaagccttctgcattgccaaaagctcttttcctgaacacaaatatgccctttcaattttaatcccacgactctcccattgccatattcccctcctcctctcccagtcaattgtttcaggtcttctcctcaaagctcccccttgtccactctgtcctccgatctctctctttggggcatttcccatctctatccctcgatttactcgccctgctacgccattctggatgtatgaccctcgatagctactccctcaacattgctttctatgccactgcccgcctcccatctgtttctgttggtgcccagcttcattccctttctgtcaaacttggcttggtttcagatacatttgtccttaattctcttatcaacatgtactcgtcttgtagctatccaacaactgcaagacaagttctcgattctgctccccaaggagcttgtgacacagtttcttggaacacaataatttctggatacctacgatgtgggatgcctaataaggctctgcaggcttttggccagatggtcaaggagccagttagactggatgatgtcacattgctgaacgcactcgttgcttctgccaaggcaggcaaagcgaaggtcgggaggctgtgtcacagtttagttgtggtgaacggggctggaattaattgttatatgggatcctctctgattagtatgtatgccaagtgtggattggttgaggatgcccgcaaggtatttcacggaatgcatgagagaaacgtcgtttgctggacatcaatgatttctgggtacacacagttgggtaagtttaaaaaggctgtcgatcttttcagggatatgcaaattactggaatgaaggctgatgatgggacgattgctactgttgtgtcttcatgtgcccaaatgggagcacttgacttgggacgatatgttcatgcttactgtgatgttcatggtttagggaaggagctttctgttaagaattcactgattgatatgtactcgaaatgtggggatataactaaggctcatgagatattctgtggattgaccaagagagatgtgttttcttggacggcaatgataatgggctttactgttaatggcttatgtaatgaagcacttgatttgtttgctcagatggaaggagagggtaaggttatgccaaatgaggtcacttttttgggtgtccttacttcttgtagccatggagggttagtggaacaagggttccatcacttccagcgtatgtccatggtctacaatcttgcaccgaggattgaacactatggatgcatggttgatctcttgggacgtgcaaagctattgacagaggcagaacaatttattaacgggatgcctattgccccagatgttgtagtatggcggtctttattgtttgcctgcagagcttgtggagaggtgggacttgcagaatttgtagcagaaaggatcctagaactggagccaaaaaagtgtgcaggacatgttttactttctaatgtctatgctgccacatcaaggtgggttgatgtgaataaattgcggacatctatggacagttgtaggatgagtaagcaacctggatgctctttcattgaagtggacggatgtgtgcacgagttctttgcaggagatgaatcacaccttgagatagatgctatatataacattcttttggggatcaatgaactgttagtagcagagtccttgtatgaaagttgtgatatttttttgtcaattaagtagctttatgatcaagcaggagctctgattaacagaattttttgaattctccccaaattgaagggtgcacctgaagggagttatggatcggaagaatcaaactcctcaaggtcaaatagcacaggtggttgtggaatttcttgaggtagcaatcagctgcatcgtcttcctcaaaggcttctatcctcctcgtgcctttgagaggagaaggtacatgaatgtggtggtccagaaagcactgcatcctgagcttactagctatattcactctgtgactttcggtcttctacctttcattcagaagggattggtagagagggtcgtggtcatcttctatgacaaagggcatgtaccgaccgagaagttcgtcttcaagcttgcagtcaaccagtcataccgttccaagttagaggaggcgaacctggagttcgctctgcgagcattcttgatcaagctgactgttgctgagcctgttaccagaccccttccaccagatggtagctgggaggtgaccgcctacttccggtccctccccggcgacggtgaccgagaagctcagctgtggattcctacggacgccgagctgtggatgcagcctccgcagatcacccccatcaagtcagtcagctgtgaccctctgacgatgcagctctacttggagcaccctagcgtcacggaaccgaaggagccaccggcataatgacaggagcctgcacctgtgggctgtgatacactgcaatgtatagaatttttttttgcaaggcaactttggcacgaaccctcgagtcagtgaaaccttttttgttcagacagaggcaaggaaactacttctatccagtggcttcaacttctggctagagaaggcgacactgtaacaatcttgggccttgggattttggctgaggctgaggctgaggggggtggcagagacggacgacacatgggtgagaagcacatggctagaagaagagtggggaggaaactgcctgactgaaagatagaatagagaccaaacagaaccctgccaaacatggcattttgccgtgactcgtactctcactct

SEQ ID NO: 27751 - DNA, 1782 bp, Zea Mays
gactactccaagtcaaaggtggtcaaatattcttgactgaagatagtagtttgcagaatctgttagaaacatacaatcctcattctgcaatcaacttgtggctgctctattgttgggcctttataaggctagttactacccttgttcacagagaagaatagataaattccttttgggtcagtatattctttatgtattgatctcttggttcatccaatagtctgcagaaacaggttgcacacaagttgttgtaattgaatccttcatgattggtgtggtgtgaagaggattaccatattgtgctggggttctgacagctccattgctctttagtacatacaagctcatctttgatgttaagttggagaagttttgaggtgtttggttggctgctttaaacagttgtattgtgtgctgtctgtgtatggaaatcagtagctctgtggactgtggtcaggaaaaagaacagccaacaaataaacgtccaaggtcagaaagtactacagaatcaagcacaaaagcatccagggagaaaattagaagggacaagctgaacgagaggtatgttccctgattcttggaattgggtgccattttggagccagggaaaactcctaaaatggacaaaacagctatattgagtgatgctattcgtgtagtaggtgaattgcgtagtgaagcaaaaaagctcaaggattcaaatgagaatctccaagagaagattaaagagctgaaggtctatactatttcatgtggccaagttataaatggtgctgttcagatgggaggtggcacgtgatgtgttgtttaggcacttcatactgttccattttcttgatttatgatcccctttttccatttggtcatttttttttcttatctagatttaattcatccagtcaaataacatgggaataattattagtacacctgtcattctccctccagtttgtggtttagtttattttgggttgcttgcattagcaactttatatccacataatgcgtttttttttcttaaatggttaaaccctgcagctgtataacagtatggacatttgtcaattcttttctctactgtatacacttctttgctacgtgttccataaaatatatagaggtttatgattcagcatctcatgtgctgcaaaaggctttggccttcgattttgctggttgttcatcagaaaaacaatctcaccctgaaatactttccttttgcaggccgagaagaatgagctgcgagacgagaagcaaaggctgaaggccgagaaggagagcctggagcagcagatcaagttcctgaatgcccggccaagcctcgtaccacaccacccagtgatcccagcctctgcgttccctgctccccaggggccagcagccgccgccaggcacaagctgatgatgcctgtgattggctaccctggattcccgatgtggcagttcatgccgccttcagatgttgacacctctgatgaccctaggtcttgtcctcctgtggcgtagaagccgtgcgaaatcctgttggaaagaggcgatgctgccttccattgattcaaatcttgatcggtccgcagtgttgttggtgtagttgattccagaactgaaggggatgttacatgtgtcggacggtgacatggggtgatctgatgacccctttgtatattatatatggtatggtataaataaattccgcgaccagaagctaatgtggatcggtggattagcttatgtctattcttgcctgtttggttatgttcctcctcgcatgtgaaaactgac

SEQ ID NO: 27752 - DNA, 1275 bp, Zea Mays
ttcctttccatctgatctggagtttttggattctcttcttcttatgcgtttgtgccatgtggagtatttgtttactttttttttctagcatctgtgaagtatatcatgatttccctagtatgtttactgtttaactttcaacacttgctcatctaacgctgtagtcaaactgcttagacaaagaactcagttgtagttgtaggtcaggaaaatgcaccactcaaacaacaagaattcaatcgggcgagcaacttgctatgttgttacctcatctgactaggttgcctaaggagacgacgcatcctttattaaagtggaggtgtgacatctgccgggtggaagcaccgaccgagggccacttgcaacagcattgtgcagggcacaaacaccagtctaaagtagcaaccttggtggtaccaagaaccaatgccaacagtcacaaagcgagggcggctgctgctgcgaatcccggagacgtgcgtcaatacgacgaaaagctacgtctaacctgggtctgcaggttctgccaatccaactgcacctgcagatcagacctggagagccacctgagaggcaaaaggcacaaagcatagatccagtgcctgctggaagaatgcaagaacatggcagtgatctatagctataggtcgccgaattcacagccaaatcatgcgacacaggaagaggagtagaggacaacggccctgcttcagcatggaattgcagcctgtgccaagccaacagcaggggacaccagcagaaggtacaagctttgcggggaggaggccaaaccgtaagttctgtggacgaggggatacataggacgacgtatgtttgcaagctctgcaatttgcactgcaacagcaagactacgctagctgaacaccgaagggggaagaaccacacgctgaaggcgaagaaacggttgtcgctgagtttttgcgaggtctgcgatctgcaatgcaatagcgaaaagatgctcgctcaccatcgtaatgggaaggctcatttggcaaagcttagcaactgctgattggagaggctgtgatctgtggagcgaaatgccagccacgtcatttcattttgaagagacttcagttgactttttaaaatgctagcatgcggtttcatcatactgtagaatatgatgttgtttggttcatgaaatataacacaaatgtcaacagtaatgattaatgcttgattatagcggtaacaagtttgaataggttgatattagtttctagtgtggtatctgattacgttggatttcaa

SEQ ID NO: 27753 - DNA, 1507 bp, Zea Mays
ccaccgcgctcgccctcttcgtcgttgccgtccgtctccacagtccccacccatattccattttggttatcctcttgcgtcacacctcctccctcctggcctcctcctgcggcccacttatatataccaccacgtcgatgcgctgctccgccggcatctccatcgccgtcgcgccgccgtagatggcctgacatttttcacttcatttgtcatcccaattccacaaacctcgcgcgcggcggcggagggaaacaaaaaaaaaaaggaaggatggcgttggagccggtggcgcgggcggtggcggaggaggtggcgcgctggggcgcgatgcgccagaccggggtcagcttgcgctacatgatggagttcggggtgcgccccacggagcggaccctcctgctcgccgcacagttcctgcacaaggagctccccatccgcatcgcgcgacgggcgctcgacctcgactcgctccccttcggcctctccaccaagcccgccatcctcaaggtgagagattggtatgtggagtcattccgtgacatccggtccttcccagaggtgaagaaccaggaagatgaactcgccttcacccagatgatcaaaatgatcaaggtgcggcacaccaatgtggtgcctgcggttgcattgggtgtgcagcagctgaagaaggacttgggtggtccaaaggcgttcccacctggaatccatgagatccatcagttccttgatcgcttctacatgtcaaggattgggatccggatgctgatagggcagcacgtcgctttgcatgaccctgatccagagcctggtgtgatagggcttataaacacaaaaatgtcacccatgacagtagctcgaattgctagtgaagatgcacgtgctatttgcatgcgggagtatggatcatctcctaatgtcgacatatatggtgatccggggtttacattcccatatgttacaccacatctacatctcatgatttttgagctggtgaagaactcccttcgcgcagtacaggaacggtatatggattctgataagcttgcacctccggttcgaatcatagttgctgatggagcagaggacgtgactattaagattactgatgaaggtggtggaataccaaggagtggtctctcaagaatttttacgtatctctatagtacagcagaaaaccctcctgatcttgatgtacataatgaaggagtaactatggctggatatggttatgggattcctattagtcgtctttatgctcgatatttcggcggggacttgcagatcatctctatggaaggatatggaactgatgcatacctccacttatcacggctgggagattcggaggaacccttgacttaatcgattcataagaagccattcctcattcctgtagttaggactctattgctttctcaattaccgtgctggtgtcacaccaataagcgaaggcagtggagacgccttcggcgtggcgggtctggagccgacgacggcatgacttggg

SEQ ID NO: 27754 - DNA, 1925 bp, Zea Mays
gtcggttgcttgtctcaccaaagcagcgacatggaagcctgacagctcgtcgcgtcgcgccatttccacccaacaaagcggcggcgccagcacgcactgcttctgcttgtgcgtgctcctccgttccgggcacgcctctaaagtctatacagcctcgaatccatcccggccgccgctcctgggggatactacagcgagccgaagcggggatggcggagatccctgtgatcgacctgcgcgtcgccggctcggcggccgaggagtccgcgcggctgcgggccgcgtgcgagcgcctgggctgcttccgggtgaccggccacggcgtgccctcggtgctcctggcagagatgaaggccgccgtgcgcgcgctcttcgacctccccgacgacgccaagcgccgcaacgccgacgtcatcaccggcagcggctacgtcgcccccagcccgaccaacccgctctacgaggccttcgggctcctcgacgccgccgtgcccaccgacgtcgacgccttttgcgcgctcctcgacgcgccgcccaacatcagggagaccgtcaaggcctacgcggagaagatgcacgatgtgatcgttggcgtcgcccgcgagctggcgtctagcctggggctagtcgaggagcactcgttccaggactggccgtgccagttccgcatcaacaggtacaactacacgcgggagacggtgggctcctccggcgtgcagacccacacggactcgggcttcctcaccgtgctccatgaggacgagtgtgtcggcggcctcgaggtcctggacccgggcaccggcgagttcgtgcccgtggaccccgtcgcgggctcctttctcgtaaacatcggcgacgtcggcacggcgtggagcaacgggaggctgcacaacgtgaagcaccgggtgcggtgcgtcgcacccgtgccgcgcatctccatcgccatgttcctgctcgcacccaaggacgacagcgtgagcgcaccggcggcgttcgtggacgcggaccacccgcgcaggtacaaggtgttcaactacaacgactatcggaggctcagactgtccaccggcgagcacgcaggcgaggcgctcgcacggatggcggcgtgacgtggctggagctgcaaattggattggaagccgagacaagccgttagttatttaccatgcccgtgcgttcaccgcacacaatcatattcaaaagccataaaataaaaaataattttaatatcagtcaacatatggtttaaatatcatatggagtacaatattccgaatttttttttgtaatttagtctgtcttttgaaaaaaatgcacatctagacctccggatgacttaatgtcgtttttggactcttttctcggcgccatagtatacggcgccgaggtacctagtacactggactctttttgctgagctggcatctacgtggctgagttggcatctacgtggccgagctcaaacaattgctacacacgctgtctcgctctgactttgactctgcgcgcggcgcgtccttgtgaagagttgaagacaaaagcttggcacatgcactgcacgtataaaacaaaaagatacaggatgggggttgagtgaaagacgtaacttttttcctccttcgaaggccacacagggtatacactagagattttcaaagtgtccgtgagaccgtgacgtgctctcttgtagagagtgtactgccacagtggacgaggtgacatgaggcgatgtactgcacagtggacgaggtgacatgaggcgctgttgttgtactatatagctagccgcgcaatcccaattccaattccatagctgcgctccgcgtctggctcagatgcacggaccctcgaccaaaactcaaagctgagctccggccacgtagatgccagctcagcaaaatgagtccagcgtactaagttctcgg

SEQ ID NO: 27755 - DNA, 3402 bp, Zea Mays
cgaaaaaaccccaaccccgaaggcaaggggtgggaaaaaacacgaggcgggggtgggggatagaaatacgagagcgagcgagcgagcgagcgagcctgcagcagcgagagggacgagaggcgagagagataagcaagcggcgcgcgttaaccctagcccccgtctccgctccgctccgctccgctagcgctcccgcccgccgcctcgctcgccggaggattcgtacgcgcgccgggcccgacgacctgccgcgccaccttcgcgccgccgccgccgcgcgcgggcgcgcctcggtcgttgtccttcaccacagcggagtgatggctgttgtcaacccaaccaaccttgctattgacgacgatgacgacgatactcccatttcattcaagaggacgagtaactctacgaagactgccaggcccaccccttccaagcatgaggggtcgtcaggaggtaatggtgcacctgttaggatccccaaacctgtgtctcccaatccgcagaagaacggagccaccggggcttcaaggccgttgcatatgaagccaccgtcatccagtccaaaccatcgtccttctggatctggccagccaaacagtttggcacaacatagttcaaaggctaatagcattgacatgagtaaactgaaaagacctctcgtcaaagatgagagatctgatgactcagatgacgaggtgccgattgggttaaggagaaaggttgaggagaagaagttgaagggagttgatactcgggttcagaagacagatgactcagatgacgatgataagccattgggtctcaagatcaactcatccagaatgtcttccaacagagtgaataagcctgttctgcagagaactgtaccaaaggttgagcagcctgatgaagattcagatgatgataaaccattggcaagcaggttgcccagtaatgccggtccaaaaagtggaggtgatgtctctgaggattcagaggatgagaagccactggctgccagattttcaaaagttgctggtagtggaaacccaaaaatagcttcttccagcaaagggttaaccagtgatacaaatggccaacaaagtttgggtaaaaggcctctagacaatagtaatcaaacaagttcagctcttaagaaggctaaaccttcaaacgtttcagcttctgcaatcgttagaagagaaatcaagacagatgacaacacacctcttgcacaaaggctgaaaatgggagagtcttcgaaaggcaagtcatctgcaaagagtgtctttaagaagagtcctgcttctgtgaagaaggacatcaagaaaatgaaagggaaagggaaattaaagaagaacatgaaaaattctcagttctcaaagataatgaaggtcccccctggatctggtggaggaaagaaatggactaccttggagcacaatggtgttattttccctcccccatacaagcctcatggtgtcaaaatgctttacaatgggaaacctatcgatctgacaccagaacaagaggaggttgcaacaatgtttgctgttatgaaagacacagactatgcggccaagccaacattcattgataactttttcactgattggagaaaagttcttggtaaaaatcatattattaagaacttcgagctttgtgatttcacaccaatatatgaatggcacctcagagagaaggagaggaagaagcagatgacaacagaggagaaaaaaacattgcgggaagacaaattgaaacaagaggagaagtacatgtgggctgttgtagatggtgttaaagaaaaggtcggaaatttcagagtagaaccgcctggcttgttcaggggacgtggagaacatccaaagatggggaaacttaagcgccgcattctaccaagtgatattacaataaatattggaaaaggagctccagtccctgagtgcccgatacctggagaaagttggaaagaagtcaaacatgacaatactgttacatggttggccttttggaacgatccaattaacccaaaggatttcaagtatgttttcctggcagcaagcagctcactgaaggggcaaagtgacaaagagaagtatgagaagtccagaaaattgaagggtcatatacaaagaattcgtgagaattatacaaaagatttcaaaaacaaagatgtgacgaggaggcaaatagctgtggcaacataccttatcgataaactagcccttagggctggcaatgaaaaggacgacgatgaagctgatactgttggttgctgtacgctgaaggttgataatgttacatgtatgcctccaaatcagattcagtttgactttctgggtaaagattcaataagatactttaacaccgtagaggttgaagagcttgtgtacaaggcaattgagggtttccgtgctggaaagaagccaggacaagatctatttgacaagattgatacatctaggctaaatgctcacttgaaggatctaatgcctgggctcactgcaaaagtgttccgtacatataatgcttccataacattggacggaatcttgcatgaagaaacagaagatggaactgttttagaaaaaatcgctgtctatcagcgggcaaacaaagaggttgccatcatctgtaaccatcagcgtagtgtctcgaaatcacatgagtcccagatgactagaatgaacgaaaagattgatgagttgaagtcccagatggaggagctgaaagcagacttgaacaaagcaaagaaagggaagcctctaggctatgattcagaggggaagccaaagaggaacttggctcctgaagcgattcaaaagaaggttgcaacacttgaaggcaagatagagaagatggagatggataagaggataaaagaggatctgaagacagttgcgcttggaacgtcaaagatcaactatcttgatcctagaataaccgtggcatggtgcaaacgccatgaagtccctattgagaagattttcaacaaatctctcctcgcgaaatttgtatgggcaatggacgttgacccggaattcagattctaggagaccattggctaccatgtgccagccagtttggtccagtttccagcccttctccctggacactaattgcagctaggaaaggaaagagctcggtgtttgttttttcaaagtccccaccccccctgctcgtggaacgaaggaaagcacccgtcattctctttgtaggcccttcttttttttttcttttggttcaattgcgctaagttcaatatgtattctgctgagaaatctgagctcgtttgagaacggttggacattgaattcatagtgagttttaatcttgaatatagatgacttgttgagggatgatcccgtggtcgtttgtgtgttttgtcgactagtgagcttgccttgtccaccaaagtca

SEQ ID NO: 27756 - DNA, 205 bp, Zea Mays
tatggatgtgtgcgtgcagggcttcggaagtcggggctgaagcgtgtggtgatcgtcgcgatcctgtgtgtccgcttcgggctcctcccgctgatcggcatcgccatcgtccgcgccgcgtacgggctcggcttcctgtcccgcgacccgctgtactgctatgtgttgatggtgcagttcgtcgtgcctcccgcgatgaacatcg

SEQ ID NO: 27757 - DNA, 2134 bp, Zea Mays
tgatatttgagtttatgccaagtgatattttggttgtggagtttggcaaggttcagtgtccttgggcagggcatgcaaacctgcgtggagctgaagacaggccacgtatgattggtccatgcgttgctggcacccttggagtctctcttcctcatgctgtggttgagctcggtgacacctgctccttattcaatgatataaaacttgattcagtgaggatgctccctgtccttaagtctggtccgtgtttatcaccagagtgacacagctcttgagttcaagtcgatatacatcctctccccagccaatagctcggtctgcccttgtgcttagcgctccaacactcagtctggtgaccacgctcacccaactgctcacctcaccgtggccgagacgcttggagcaattgcatccccgggtggtcagaacagtgccacgctgccgcagaacagagtcgtggacagctccaccgctggctttccaatccatgttgatctcgaatgatcttgtgcgagcactgaaggtgtggtcgtcgacgtcgtggccagcgagggcgggtgcttggctcgagcatgaaaacattggagcttgttaacatggacgtgttttgacggtgattatgatgcgcctgaggtcagcgccgctgtggctggttgggccggctgagtgagtttgggcctgatattgttctaagttttgtcttttctattagctgagagatttgaaatggtgccaaaatttgtagaaaattccaaaaatcatgggacaaaatttgttggatgtataaaatcaaaagctctctaggaaagttggtttctggatttttaggttggttaccaaatattaagggatttaaatgtgctcttggaaggattgtttggattttaaaaataaaattacagtgccaaaacttatgaaattttttgggtaacattttttggtcatttgagtttgtggtaaaggtttgaggctgttcagaatccatttgctctgaaaactttgtaagccccaaaataaaatggttaatccctaatcaagtgtgagttagtgctttggaaaggggataagtttatctaaggaagagatgcagtttcttaagaagttttaagcttttggatgagatataagttggattagttccctggtttacctaagcgaattcaaattggtcacttttattaagtgctaggttgtctagatgtgtatgcctatcatatacttatttaggagtgtttatattccccacctctccttgtgagagtttgcatttcatatcataacataagcatacatgtatttgtaattgacttgtagaacacctagaagaagtggtgtttgaaggagtctactccagtgcctgctcatcaagtggatggagctatctaactaaaggttgggtagaaggatctagaacctcttctctgcaacaaaggcaagccccggtgcatttgccccttccttgtatttttaaaaagacttttatacacttaagtctagtgaaatgggcattaagtttataggaattgcttagaaactatttgatgcattggctaccttgatatccatacctttatagatacttctgatgaagtatcaaaatatgatttacaaaaatgcttagccctgcttagatcttgtggatagaggttgtcttttgcattaatgcctagctcaggggttatcttgaggaaggatgacttctacctgcaagaatattttcattgggagcatggtgggatcttactgcaaagttccctataatgctcttttcatccttaggaacacaaaacaatcctaagggtggaagtacttaacttgagacttgggctaggaacaggtgatgctccacctaggttaattaaggattggatgtgtatgtaggcctgtatgatcaaggactatcttaactggccacatgccctggatatgggacagagtaagcttgaacctggctattccatacgtgaaaagacaaccgcgcactaggcgtgggagatggtgggagtagcgtgtaccctctggctagaggctggacggaggagtattgtgctctcgggtagcgcagaccagttcatgttgtggaggatctgtgggaatgttgacatatgcagggttaagtgctacatatgtcgtg

SEQ ID NO: 27758 - DNA, 3651 bp, Zea Mays
gttttgccccccttgccaccccccctgctcgcagcgcagttgcgtggcgcttttgtggacgacgccgtcgtcgccaggcagcttgcatgtggctctgcgctgcgcccttgtcttcctcttcctccccactccgcatctccagaaaattccgttattttactcccagtatttagcctcgacgattgctcgggactctctttacaggtcctatttcgcggtttcctcatcctcctaatcctaacctccttccctgttttattcttcctcgtcgagcctgattcccctgccgccaccgcggccagcgccgccctcgccgccggtcgccaccgccgccgccaccgtccactcctcgccctcacctaatctcactcggagggagaaaaaaaaaacctcgccctcgccgccgggttgagttgaatctgtggtcgctgggttgaattgaatcgatttagatccgtttatccctagttcgggtgcccgtgttctggaaggtggaagctttggttgggttttctcttccagagcattaatgtttctgagggcctaagatgctctatttgaagcagcccacgaggagctgagtctttgtgttttttttatcgttctctctcgtcgtctgttgatctgatcggatggaggctatgacgggtggcaaattccttcaaaagtttcgactctacgaaaccagatcgaaattttatcttattggaagagacaagagcaggattcactggagggtgctaaaaattgatcggttggagtccactgagctgggtgtcgatgaggatccaactatttacacggaaagtgaatgtcaagaactgctttggcggatccatgaggggaacatgttgactggtggactgaaatttgtcacaaaatgttacggaatagttggttttgtaaagtttcttggtccttattacatggttataataaccagtagaaggaaaatcggcacaatatgcggccatgaaatttattccgtcggcaagagtgaaatgattgcaatttcaagtgttacagtctggcccaacgtggcttattctagggacgagaacagatataagcgccttctttgctcagttgacctttcgaaggatttcttcttcagctactcttacaacatcatgcgcagccttcagaagaacataacccagaagaatactgggcaggctgtttatgaaccaatgtgtgtatggaatgaatttctgacacgagcaattcggaatcatctcaagaatacatgttggactgttgccttagtccatggattttttaaacagtcgaagctctccgtatctgggaaggatttttggttgacccttatagctaggcgctcacgacactttgcgggaaccagattcttgaaacgtggcgttaatgaaaagggcagggtagcgaatgatgttgagactgagcagattgtttttgaagacacatctgatggaatcccaactcagatggcttctgctgtacagcatagaggatcgatacctcttgtctggtttcaggaaacttcaagacttaatattagaccagatattatattgaaacctgatgtggactacaaggcgactcgccttcattttgagaaccttgcacttagatatgggaatccagtaatcatcttgaacttaataaagacccgtgagaagaagccccgtgaatctctgctccgtgcagaatttgcaaaggctatccattacattaacaagagcctgcctgatgacaagcgtctaaaatttttacacatggatctgagtaagctttctcgaaggaaaggcaccaatgtgcttgcactgttgaccaaggtggcatcagatgtgttggatctaactgaattcctccactgtgaaataagtacatcaacaaaacctgatgacacctcaagtggagaaagaactgctgccaaaccacatgatgacagaagtagcagtgatcaaactgaatgtgcagctaagttggcacctcttttattacagaagggtgtcctcaggacaaattgcatagactgcttagatcgcacaaatgttgcacaatttgcatatggtttagctgctttagggcgtcaacttcatgcattggggcttactgaagcacagaaaattgaattgcacgatcctctggctgatgatctgatggacttctatgaatggatgggtgatacattagctattcagtatggtggttctgctgctcacaacaagatcttctgcgagcaaaggggtcaatggaaggcagcaacccaatctcaggagttccttcggaccattcaacgctactataataacgcctacactgatcacgacaagcaggatgctataaacatgttcttaggtcatttccaacctcagcaagggaaacctgcactgtggaagctggactcagatcagcattacaacattgggaggcaagggactttaaaagaagagattggaagatcgttcataaagaggtcactatcagatggtaacatactgttggagaacaacttgcctgtaactagctgtaacaatgaaacaaacaacacagaattgcttccaatgcaacagctggatgatattagagaacctaccgactctgcgccagagatctccatatgtgaacctaacccgtgctccagtgtgaactacggcagagtgcctggaagacactctatttcagaagagcggcagagttatttgaaaagattaggttaccctgaattgcattcttcaaatttcctcgaccttgatttgttgtcgtcttctgggaattcctgtgacgaggaagtttttgagaggtcatcactgatcaattcacctatggatgtggtcagcgttgaatcatctacgtcgtacagtgaacaaggacacactgatgagggaagggatgacatggatctttcccgttcaagcagccaggtctcagacgttcgggactattctgaccggtttgcgcactgggtcgcggatggaggcatgctttggtaaaaggccatggacttttgtcttgcttgacaactcggtagaatctgtgaccgcaggaaatggatgcgagcagatgacatggctagatgcagagatggtgggcgtggaaaaagtctcgcatcggtatggttgtgaccactggaaggcttgaacgctgatattcatcggatggggatggagatttcggtggttgggttgagtacaagattcaatttgctgtggtgaaaaattttaccatagtttgtttagacaataaataggcaaaatatatatgattcttttattttagcttacagtgcgtcccccttctccatagaaaattctgaaaagcaaaaaaaaaaaggaaaatctagaaaaaggaggaaaaaaaacttagataaagaacacttttgctgtaaatagttagtatgttacggaagtataaatattgtgaaattttgctgacgacacgacttcgctcaaacgtgtaatatactgttggacagtgttaacaaaatatatcccgtatcagtacgaaaactgtgtaaatttactgtaacgcacagtatgcattatttatttatttgtttctcagattatggaagagataaaattgcaaaaatatcttaacctctgacttctcacggtgcggccagcctcggtcaagctccccggcggcgggacgaggccggtgtccgct

SEQ ID NO: 27759 - DNA, 3455 bp, Zea Mays
aaaccgacccgcctggccacgagtccacgactgttgtatatgcatctcatcagcttggcctccaagtcgggaggaaggccgaaggggcgacccgcggccgccaccgcgaccgctgcgcgaaccctacccgccactccgatcgccaccgctggggttctcgatatatgcttacgacgaaacgaagagagcggagggagccaaggacggcggtgacgctgtcgtgaagaaggctcggggtgggggaatcggcggtggcggaagagatggtgccgaggtcggatgtgggcggcggtgggagcagcaatgcgagtggggtggtggagatcgacgaggacctgcacagcaggcagctcgctgtgtacggaagggagacaatgcggcagctctttgcctcgaacgtgctcatctccggccttaacgggctaggggccgagatcggtggttgttttcactgacattagtttggacaaggcatttgagttcgatgattattgtcgtaatcagcagcctccaatttcctttatcaagacagaagtccgtggactttttggtagtgtgttttgtgactttgggcctgaattcagtgttcttgatgtcgacggtgaagatgcacgtactggcataattgcatccatctccatcaccactgacaatcgtacaatggtgtcctgtgttgatgatgagcgccttgattttcaggatggtgatcttgttgttttctcagaggtccagggtatgacagaactgaatgatggcaagccaaggacagtaatgtgcgcaggaccattttccttttgcatcgaggatacaagtaactttggcacttatacaaaaggtggaattgttacacaggtgaaagaacggaagatcttgaagtttaagagtttgagagattcgattagagaacctgggaatttccctctaagtgattgttcaaagtttactcgccctcctctgcttcattttgcatttatagctttggataaatttaggaaagagtttggacgcttccctggtgttgcttgtggtctggatgcccaaaggtttgtggagttcactgcttctatcaatgaagccacaattgattacaagatagaagatgagcttgatgagaatttgttgcggctttttgctagtggttctaaagctgtcctgaacccaatggctactatgtttggtggaattgtcagtcaagaagctgtgaaggcatgttctgggaaatttcatccactgtaccggttcttctactttgattcatccgaatctctgccaactcaccaattggaccctaaagacctgaagccattgaatagtcgctatgatgctcagatttctgtttttggctctaagcttcagaaaaaactgcgggatgccaatgtctttgttgtgggatctggtgctcttggatgtgaatttttaaagaacctagctttaatgggagtgtcttgcagccgtaaagggaaaattactataacagatgatgatgtcatcgagaaaagtaacttgagtcgccaatttctgttccgtgattggaatattggacatcctaaatctacagtagctgccacagctgctagtgctatcaattcctgcctgcacattgatgctctccagaaccgtgcctgtctagagaccgagcatgtgttccatgatgcattctgggagatccttgatgttgtcattaatgcacttgataatgttaatgctaggatgtacatggacatgagatgtttgtacttccagaaaccactcctggaatctggaacactgggtacaaaatgtaacacgcaagtggtaattcctcaccttactgaaaattatgggacttcacgagaccctcctgagaagcaggcacccatgtgcacagtccattcatttccacacaatattgaccattgtctaacatgggcccgctcagagtttgagggtttgctcgagaagactccaaaggaagtcaactcttttctgtctaatcccgctcaatatgctgcctccatgaaaaaggcaggtgatgctcaggccagggagttgcttgagcacgtatgtgaatgccttgagaaggagtgttgtggaacatttgacgattgcataacgtgggcaagactgaaatttgaagattacttctccaatcgtgtgaagcagctaacattcacgtttcctgaagatgctgccactagcatgggagcccatttctggtgtgctccaaagcgtttccctcaccctctggaattttcagctgctgattcatcacacattcagtttataatgtctgcttccatattgagggcattgtcttttggaatctctatacctgattgggcaaaggacactgataatctggctgatgcagtcagtaaagttgcagtacctgaatttaagccaaagagcggggtgaagattgagacagacgtgaaggccgaaaacatctccagtgcctcagttgatgacgctgctgttatcgaagatcttttaagcaggctgaaagcatgtaccaagaaactacctccgagattccaaatgaaacctattcagtttgagaaggatgatgatacaaatttccacatggacttaattgctggtcttgcaaatatgcgtgccaggaactatggcatccaagaggttgacaagctgaaggcaaaaattattgcaggaaggatcatcccagctattgcaacttcaactgccatggcgacaggactagtgtgccttgagctttacaaagttctggccagagggcacccaatcgaagactaccgcaatacatttgctaacctggccctaccgatgctcaccacatctgaacctcttccccccactgtgatcaagcatggagatatgacgtggaccgtatgggatcggtggtctatcgagggagacatcacagttgcagagctcctgaagtggttaagcgacaagggcctgagtgcgtacagtgtctcctgcggcacatcgttgctctacaacataatgttcacaaggcacaaggatcgactgagcaagaagatcagagacgtagccaaggaggtggcaaaggtagacattccagaatacaggaagcatctggatgtcgtcgttgcttgtgaggatgacaacgggaaagatgtcgacatccctcttatctccatttatttccggtaggttgcactgtggaaagagttgaatgggaaaaaagagggtcccgtgaaaaagagatttgggtagattcataagttctgtcaataatattctctctcttgtaactagaaatcggtagcgaagtgatcacagctggagttgcttgtggtgcgtctccttacggttgtgtacgagtgcttggggtcctgctgttgcatgccaactatttgcaggtgtgcaatgtgatgtggatatttttgatgaatgaatcttcggagcttcagaatatatttacgcagcacttcactgcaatcgtcaatgtcagatagcaatttcagtct

SEQ ID NO: 27760 - DNA, 1179 bp, Zea Mays
gtggcgcctctgccgttactgaattttaaggcttaccttgagcactttactaaagcaggacatatgatattctggtccattgaatatgtgagaaaaatgcagtcatatgcccggcttccatacttgcagaacttgaatgctaagtctctcacccgttcttttgtagccagattgcgggtagacgacgtatcggcaaagatcatgtcgttctcgcagcacgggacacgcgcggtctgcatcctttcagcaaacggcgccatatcaaatgtgacgcttcggcaatctgccacttcgggtggaacggtgacatacgagggtcgtttcgagatactgtctctgtccgggtcgtttcttctgtcagagaacggtggccagcgcagtcgaactggtgggctcagcgtttcgctagcaggccccgacggccgtgtcctgggtggctgtgttgccggactcctgacggctgcttcaccggtacagatcgtagtggggagcttcgacgccggtggaaagaagcagccgaagcagcagcagcagcagcagcttgctccgtcaccggcgccactaaatctcgcgccgacgggcgtggcggcagggccgagcagcccgccgtccagaggcacattgagcctaagcgagtcgtccagtggcgccccgccgagcccgccgcacgcaggggccagcggtggccatgggcagcagcagcagcagccacagccaggtggcttctccggtctgttctggaaatgacgagacccccggacaccgtctgaccgtggtagaactggcagaaaggactaaaggcgcgtgaggcactcgtcgaggccgaagctcactcggtgagaagcagcggtagcttgtaggtggtgtcaagactgtgtagctcttgctgttgctgtaggtgtaaatcgtgcgttgtgattgtgaggtggttgcttattgtctgtcgtctggaatggatgccgtgtactgaacctgtgcccccaatgcagcatgtcggaagttcttggtttcttctgcttgggtgcatcggcttgccgcacgatatgcatccatgcccataataatacgtgtatagatccaccttgttgtgaaggtcacacacaactcacaatgcaaacttgtctgaaaagattgatacaaaatggcaaattttcgcgctgctgctggagctgcgcggcg

SEQ ID NO: 27761 - DNA, 3139 bp, Zea Mays
atggccctcatccaaagcctcctgaaccataccacattagaaactgataccgtcctattcaaacttgttaccgctgttccagagcaacaaaagcagcctgtgcaatcttatgatacagatatattttctaggcatgatcaaaagctcttaaaggcttcagcatttttacctactatagaatccccatttgttccaaattcgtttaccgggaagagaaaatcaactgttggtaattctcccgtagtccaacctcatgttggatcacgggctgtccatgagtaccagttccttcctgagcaaccaagtgatacatatgagagggcaagtcctcactactatgacactccagtggaagcttcaaattccaggataccttctctcacatcaggatcacaacttctccatggatctgaggaggctgcgcctagttatgcttttcaaggtcacacatctggttctagcctgttgcctccttccagcaggccccaggtgtttccagtagcaccaacagattatgagatgacccagtttaatagcaaccttagttctgttcctgttgaaggccagtttgatacgtctcaggttgctgcatttgaagacccacctgtatcgtctgaaagaagagcttatcatgatgaagatacttctcgagtggaaagaaaacgaaaacataatgaagaagcaaagattgcaaaagaagttgaagctcacgaaagacgaattaggaaggagcttgagaaacaagattttttgaatagaaagagagaggagcaaaggcacaaggaaatggagagacttgagcgtgagagaagaaaagaagaggagagattactgcgtgagaggcagagagaagaagagaggttccaaagagagcaaagacgtgaaaatgagcgcatggagaagtttttgcagaagcaatctagacgagaagagaaacaaagacaaaaggagcaactccgaaaagagaaagaggcagcaaggcaaaaggctgccaatgaaagggctgctgcacgtagaattgcacgggactatatggaactggtggaagatgagcgtttggaattaatggaattagctgcacaaaacaaagggttgccctcaatgctgtatcttgacagcgacacattacagcagcttgattcttttcgaggcatggtaagtcaatttcctcctgcaacagtgaaaatgaagttgccattttctataaagccttggactggatctgaggataacattggaaagcttttgatggtgtggaaattcttaattactttcactgatgttctgggtctttgtccagttacacttgatgagtttgttcagtctcttcatgattatgattcaaggcttttgggagaactgcatgttgctctgttgaaatccattatcaaggatattgaggatgttgctagaactccatcaattgcactaggggtgaatccaggaggtggtcatccacaaattgttgaaggggcatattcctggggattcgatatacgtagctggcaacgtcatcttaatcttcttacatggcctgagatattaagacagtttgctttatctgctggttctggaccccaattaaagaaaaggactgtggaagattctcactatcattatgataatgagggtcatgatggtgagaatgttatattggcacttcgaaatggtacagcagcagtgaatgctgttgctaagatgaaggaaagaggttacaccaatcgccgtagatcccgccaccgtctgactcctggaactgtgaaatttgccgctttccatgtgctctcgcttgaaggaagtaatggtctcacaatattggatgtagcagaaaaaattcagaaatctggattgagagacctcacaacaagcaagacacctgaggcatccatagctgctgctttgtctagggatgcaaaactttttgagagaactgctccttcaacatattgtttgaagtcgccttatagaaaagatccagctgattctgaggccgtgttgtcagcagcgcgtgaaaaaattagggcctttcagaatgtgctttctgactctgaagctgaaaaggaggcagatgaagctgagagggatgatgattctgactgtgatgatgctgatgatgaccctgatggtgatgatgtgaatattgaggtggaagaagacaaggatcctcttcttgccgtcaaggcacaagacgaagtaccgagtacaactacagttattggcataaagaccaagttagatagtgtaggtaatgcattgaactcatcaagtagttttactaaatcagcaaaaggtgctcctctcccttatttaggcaggtccagtgcagcagatacttctaatgattcacctcttggaggcccatcagctaatcatgaagtaacccctggcgattctgaaaatactcaaattgatgaaagcaatcaaattgagccttgggtatgtgcactagcagaaggagactactgcgatcttagtgttgaagaacgccttaacgcactggttgctcttgttggtgttgccactgaagggaactctattcgtggtgtacttgaggaacgtttggaattagcaaatgccttaaagaagcaaatgtgggcagaagtgcaacttgacaagaggcgtttcaaggaagaatttgctagcagagtacaatataactctggcatgagttttaagcctgatatatatcaagaaaacaacatgacagagattacttcaactcgagcctgtgatgcttacaaagaaaacgatggacatgttgggacaatcaacaattgtgagatgcttgatcagcatagtcagggtaatgctggtggtataacttatgatagaaatgtcgtaggccaggaaatccatgcaaccccagatacttcgtatgttcagcagtatgcttatgctgataaaacacgatctcagttgaaatcgtacattggtcaccgggcagagcagctctatgtttacagatccctgcccctaggtcaggatcggaggcgaaacaggtattggcagtttacaacttcagcatcaccaaatgaccctggctcaggaagaatcttttttgaatcggaagatggatgttggagagttatcgactcagaggatggcacatgcgcgagggagaggaggcagcagactgcgc

SEQ ID NO: 27762 - DNA, 1228 bp, Zea Mays
ccggctggggctgggcgaactggagcttgaatcggctggagcttgaactggagcaagaacctgtcgtgtttcctctgtgtcagcatgaaaatcaatcaacttccatctcctttctatcaagaggtttgacatggtagatctgccattatcagaacaagatgaattaatggacatgctttggaatatctcttgattgaaacaccccagtatgcagaaaatggctctcttgatgatattttgtttacaccagctagaagatctagggctttcaagatcgcagcgatgagatgccctcttccccgaccaccagatcacagcgatggagctggatccggtcgccgctggggcatcctcctcgccagccagtcgcagatgtccctgatggcaagcttcagcaatcgtcaagtacaaagacatcctcccgtgcaaaattcaatttgcccaatcctaatctcttctatatagcctcacagatcgcagcgatggagccggatctggtcgccgctggggcatcctcctcgccgccgccttcaccggtgtcggccacgtccccgccgtggcaaatgcgagttgaacaagtggagcttatcaagagtttcagaattcgggtatgccagggtgcatgccacaagaggtgatatgctggttcagtttgtaagctcaagtacgatggaggttttggaccaatttagaattgtgaagcctgatccggcaaggaggctatggaacaagccagtttaaccatagctgtagtgcatgcaaaagatggagctggagctacttccttatattattgttatgctatataaaagatggcgttgaattacacatcagcgtgttgtctaagttctatacttatctgtgtggtgtatggttctttatgacatttccacatgatagttctttctccctctgtaaaatatattgatcgacaagtgtcattttatagttgtagctaacatcctaacaagggctcctgaacttgagttataatttacagttttgtcagttctaaatttctgaaactacaggaagtaaaaccagcgttgcaaacagggttcctggactagatatctctatctctactactctttaaggccttagtgtaggcgtccacagtataccgtggtgcacggttctgcctgaatacttcaagcatgaatagaaagtaacatatgagcaattctatatccccgcctcataaaaatgactgtgtcattgcaataca

SEQ ID NO: 27763 - DNA, 2301 bp, Zea Mays
cgtttcagaccagacaacggcgaagaaggcagaagaaagaagacgactcgaccgtcggcggaaacagaaaaggagccacgccggcgcggcgcgcatccagaaagcgctcgggattcgcacacacacatgcccacgcgcggcgcggcgcggtatattccaccagaaccagatcaccaccttcccggggcaatccggtaactgtatacagttgcaagatgcacgatgggaaagaaggaaaaaaatccgacgcttgtcacaggataggagtgagtaaaaatcaatgaccatagcagcagaagcggcgaaacttccaccccaccttcacctccttgcttatatatactcgccccgccgccccggggccggctcccacctcgctccagtctagacggcggtttgactttccgaccggggaatcggcgctgcgtttgatttgaggaggcgacacgagacgggacgggagggatctcttcgctggagcgttgcccgattcgtcgcggttctcggacaagggagggagggcacacctcgggctccgatcgaagagctttgttaacattagagattaaaaggtagcgccgtagcaaaatgaaggcaccatcactactggttcagtgtttccctggcttgcttcccagcaaggccactagttgcgtgccaattgtatctgagaaggatctgcagctaccatcaccagctgttgaaataatcccctcaaagagtgttcatccatacaaatatgctggagagaaggttgatgtgcaaggtcttaatattttcaagggtaaagtcagtgtagcagatatgatagttatctcgccttctgaagtagcatcatcaaaatatgatggaactctgaaatactgggagagttccattacccttgtcgacattcttaaaaatgagatccgtgatgggcagttgagcttcaggggcaagcgggttctagagcttggatgtggatatggcctctctgggatttttgcctgcttgaagggtgcatccacagttcactttcaggacataaatgcagaaacgatacggtgcagaacaatacccaatgttcttgcaaatcttgagcaggctcaggaccgacagaacagaccatcagagagccctgttacaccatctaggcagctcttggctcctaatgtacatttctatgctggagagtgggatgaactcccaacaattctctcagttgtgcagccacctgcagcaccaacaaacctcagcttctctgaggatgattttatggatggctgcagtagccatgatggaagcagtgtagttggtcatgactactgccccaggagatctaggaagctttctggtagccgtgcatgggagagagctagtgagaccgaccaggcagatagtggctatgatgtgatcttgatttctgatgtcccctacgcagctaactctctgaagaagctctatgcgcttatttcaaagtgcctacgtcctccttatggagtcctgtacgtggcttccaagaagaacttggttggttccaatggtggcgccaggcagcttcgagctctcatggaagaggaaggtgtccttggtggccacttcttgactgaggttgcaatccctgttgtgccaacagtgagggtggttatcactttcaccaagtttgtccccctcatcgagcctgaggagttcttcaccccaatgtcgagccccagcctcttagcgagctcagggtcgggaagcatcatggcgaagcctaacacccaaaagagctcctacctgaagtgggtctcgaagaactcaagaccagaggccgtgaacctgtcacaagtcgcggacaacggcgaccctttcttgtccatccaatatattctaagcattacatgatctgtaatggatgcgcttgttgtggtgcgctgagtgccagtgtagctcgggtgctgcacaagatggtcagtgacatcatgtgtggcttcatccttatgatgtacacgaagaaacaatggtcaagggaccccactctggctctgcagtatataacggaagctcaccacacaagatcgataacccttttagatcatactgtaccaagctgtcgctccacttcaatagaacacttgatcacatacaggaagtttagatcagaaaatgcaggctgccgctactcccgtcaggttctcagatgtgttcccatcaagggccggtcgtggagaagagcacggtggtggttagtgtccctgttgttgtcatggttgagactgctgagatcgactacaactcgagcttctcttcgaatcggtaacacacacgtgtgtgttgctg

SEQ ID NO: 27764 - DNA, 210 bp, Zea Mays
cgggttcgtcgttgcaccaggggcattgggctacgccgccacgatatctcaccttcatcagcgctttgtgcctaaatccagacctaaggcctgcgcgggacctgtgtgcagccagccgaggcaattccggatgagattggcggctcatcagccaccaattgctcaccgcaattccgcaccatcgtagatacgcgcattaccgtgggccgg

SEQ ID NO: 27765 - DNA, 1792 bp, Zea Mays
cccctacaccacaccacaagtccacaggccacaccgaatcgatctgcaccaacaccaaccgaacacatacatgcacaccaaaagcagtcgcagcatccgatattccgatcccggcaaaaacaattctcccagaaagagattatttcgccccctcaccaatcctgctcccgaaattcctaatcttttaatccgcgtttttcctccgtccgtcccccggcttgcagcagtaatgaagcggaggaggaaaaggagaaaacgaaaaagcgcagggaaaacaacacaccagcacccgcagagagcaggcacacatcaactcatcaagctgagcgatgcgtgtgattgcgagcatgtgagcaggcaggcgggcagggcgaaaatccgaggaggaaaagtccgcgagaatctccggactggcctccccacacatcgtcaaaaatccaatcttgacgcctccctggtcgagccgagactgttccaaagtttctgcctctgtgatgcgtgcgggattgttgccagttggttggttgccgctgctaatgaggcccgcccgcccgatccccgtggtcgccgtctccggttaatcccgcttcagttcttgtaccggttcttggagagagatttttttccgcctctccccccctgtggattgcgccgtgtgtgtttgtctggatcgtgatgggggcgtgggccgattcgccaccaccacaagcacgactcctcttttttattgcctccgcactgggatttgctttcgcgttgttgcagtagctatttccgcgaatcgtcttctagggctccgtgtgttctcgcgcactttaccctctgttttccccattcacccgcaccgaatccacccccttcccggtcgcgtccggccgtcgattgaggccgtgccgccgccgattacgccgcaaaatcgcgtcttgggtttggtgcatgaagaagtggggttgatttcgaggggaggtttttctcctgcttggctgccgtcgggaaggctccggccggccagtcatgtctcaaatccaaagcttctcgaggaacaactgtgcgctcctcgcggtgctgtgtgggaagtatgctgagaaccgcacaccagcagcgaggtctgggctggaggcgaagcggccgcggccggcttacccgttcccggagctcagctcggctgggcgattggaggtccacaccctgttcaatcctacaccagagcagttcctcgaggcgcagcgggtggtgcaacctaacttcttgtacatccagggccagcagctcgaggatgagaaggagattggctcacttgtatggggggacgccgatgtctctgatccgcaggtatatctggaagttcctattggtgaaaaacttgctcaagcagttcactcaaaggggatcccatatgtaatatactggagaaattcattctcgtcttatgcagcatctcattttcgccatgcgttgatgtcagcaattcaaagttcagtgagccatacttgggatgcttttcagcttgctcatgcatccttccgtctatattgtgtaagaaacaatcatgtgcaaagtgttaagcttggtccgcgtctccttggggatgctccaaaaataaatataagcccacctgagacagaaatggttgatgaagaaggttcatctgaagtgaccccggctataaaaatatatgatgaagaaatcaacatgaaattactcttatgtggagtgccatgcaccttggatccttgtttattgggctctttagaggacggtctgaatgcacttctgaatattgaagtatgaa

SEQ ID NO: 27766 - DNA, 4273 bp, Zea Mays
cacaccctcaccatggctccgccctcctcccccgctaatcaccacgccgcgcacgcgccgcgcgaggcccgtcttcgttcccccaccgctaatctcgccgcggcatccatggcgccgccctcgccctccccccacatgtccacgccggcgccccctccctcgcgccccacctcaatctcctccattgcgcgcccgagaacgcgcaaatcccccattcccgcgcctctccctcgcgcctcgatggaatcgccacggcatccatggtagggtcctcaggatccacctccaccgcgtcgccacagtccgcaggggccgagggtgccccgacggtggggacctagactgtggtcaggtgcacgcgtattcaagcaggcgctcttgcttttcgtccacaacaagttctccatgtgccctgggcacgcgacacatgttcggggtggtgggcattaccgtcacctccctcacgtcccgtgccgccgcggccgaggtctgcttcctcgccttccgcaacgagcagtccgcggggtacgccgccgcctacgacttcctgacgggctccccgggcgccctcctcatcgtctccggcccaagatacatccacgggctcgccggcctctcccacgccaccgccaacgcctggtcgctcctcatgagctccggatcctgcgaccaggctgacgccggcaggggcgacttccaggagctcgaccagatcgctgccaccaagcccttcgccaagctcgccgtcaaggcaacaaccatcctcaacgtatctaggtcttccctgccaacaagaacaaatggcacgcccgccgtgccgatttgaggtggttttggaggtgaggaggggtacgatttcggtgaccctaggccttgcgggtccggtggatggaagcggtggagctgccattaccagctaaggtggagttcaggaagccaaggtaacgacagcaaaaatatctcttctggcgtgtaaccgtgtattgtgaagttgccataggttcagcgagaaacactgaagaacttactgttctggctatggttgctgaaaagtttggtcatcagcagttggatttgttaccagttggtgtatctcttgtgcttcgccatatgagtctactctctattctatgttttgatatggtgcagttgaatttttcttgagatatggtgcagttggtgtatctcttgtgcttcgcaattgcatgataaatagcatgttcaacggatatcattttaatttccaagaaatactttgtaagttcctcaacatatatactgcacagagaactaagccccagcaactgaataatcatctattacatgttaaaaaatatgattctcgtgatctctccgtttatatattatagaattaagatgtatacaattatactgaccgttctatctattctattgaaaaatacaattatatttacgaagattcatctgtgatacttatgtatagttgtcttgcataacattgcatctgtcaattttggaacaaatcccagaggaagagaataatcttggcccacatgatcgattggttcatgtttaccatttcatgaaagaccctaaccagaatcatcaaattcagaatttgagagatccctttgtatggttatttgggaaggtgagaccgctgctgaggtaatggagcgcatccagagaaaacttagagttcatgatgatgaattgtccaagttgaagcttgcattcatttccatgaacaaacaagagtacctccaagacactaacgttgtatcaacatgtttttaggcaagtgatttctttataatgcttacatgcataccttctcttgttcactatgttcatacacgatgctttgctttttactatacgagagatgtatatggtgcttgggaacaataccttggcttggagcacactgatacaacattgaaacaataccttggcttgggatcaataccggcaaggacccaacaagcccaagagggcacccaacgcttacttcgtgttcatgtgagatgcgagtttgtccccacctctttttaaattttttatggatgcttgttggttcgatctatttttggatgcattactatctatattattctattacgaagcaaaagtggcgccttcgtgttaccatgcccctaccgggtgtgggtacgagtgaagattttgacccgtgggtgcaacccgcacccgacccaaagttttgcgggtgtgggtttctatttcaacccgtgggtgacccgcacctgacccaaaatatggttcattctttattttgcggaaaaataagtaagatacaatagtaattattttgaataagtaacttggctaatgattcatgaaatgttttgttgttgctcaatgtgaaaaggtttaaaatacgtacatataaattgactattattgctatttaattgattattgctcaattattgtttaaaagtgtacacttagtaaaacccgcgggtgacccgaaacccgacgggttcgggcgcgcgtttggaatggcactcgtgggtgccatcatgggtgggtttcggtagtcttcacgggtgtgcatgccccctgcccgcggatgcccaccactgcagtaccctgctgctgtgtatagcacacaaatgcattctacaagatcacagatagtcaataacataaaaaaaccagtgtgcgatgtactaactatggtcaactctttctgcatttagttttgtacattaacaacattaatgtggtttatgtcaagtacatttcttaattaactaccttcatctaacacaatattcagggaataggtatatatgaatgttcgacagttcctagaatgctagcattgtagttgttgatgctttggaaacaaaaggcagcatcaaactactaaatactaataatgagagttgtttaccagtaaaattggaaatttataatctgaggcatagtaataagtttgttacacataattaccatctcttttgttttctgtagaaaagctcaaaagcattataaaagctaagtaatgtactccgatgttgatcctgttttgtcgcctatttcaagagactgacattccatagaagagggcaatggaggacgacacatttattttttgttctttgcactatctagcagactatcatcaatgctctaaaatgcagaggttagctggacaatcattttgggaggatgagaaaggaatatcatatgaatcaaatggtctataatgttctaactgatggcctagcaaggattctaatgcttagcttctgtttccatatcaagtttatgtcataattacttttttaatgtgttggatttattttcgaacttagggcgtgttcatttatgtgtcgcattcatggttcaaaattgatttgggtttggtgttcatttatcttgcatgtgttgcaatgaaggaggaatgggtggagggacgagcaagatgtcaatgttctattgaaacaaactgccttaattattaggctatcactactgaaacaaactacctctgtcgtcaacctactaacttccatattcttcacactcagctttgcaaaatttacttgactggctttttttggcttaaaatataactcagggagacgtgattttgggacgatcaaactgttgggattgcgcttggacattccgggcagcgtgcacccaagattgaccaagctgattcgacggtgctaggacaaagatcctgatgcgtgtctgacttttgcagagattactatagaactccaagatagtctacaccatatcgaggcacccaagggagccagccgtcgttcttgagcaaagatgtagaagaaataagaggaagaaaaagaataagaatacatacgtagggcaaggtttcctacttttttgtgtgttacacaagttgcagtatgagtgtttgtggtgtatgtcatagttataaatatttcaaggccaaggaatacctagctacgacaaagatggggatggctaggaaagaaaaccaattgtgggacaatgataattgatatcaatgtcagccccttatatgctacacctgcaacctgtaatcataccgtcaactgcacctgacatccgtgcatcagaagtttttaattctgatgatttagattatgtctataaatctgttgaggatggcatggaacatatttttacttcaacaacacaactccaatttggtcatgatttgtgcttgaatgaagaagtcaagatttccttttgactcagcctgtttttctgaattactggtttgttacaaaattgtagatataat

SEQ ID NO: 27767 - DNA, 192 bp, Zea Mays
tggggtttcctccgaagccgaggttgagtcttgccttcagttgccgtggtcgagcccgagccagggggtcgggcgaggcggaagtcgtccggccgaggccagggcggagtccgagccctggggtcgggcgaggcggagtttcgtcgtcttccgggtcttagcctgagtctgagccctggggtcgggcggagc

SEQ ID NO: 27768 - DNA, 6854 bp, Zea Mays
cgtcgctgctgcaggagctagggtttccggcgtgggcaaccggggtatgtgcagcagctgccgcactgcaggatctagggttccgacgactccgctcacggatggagggtggtagaagggcgagcgaatccctctcggcatacacccatggatcatgatgatactgattttcagagccaaaactttcaactagctggtgaaggcagtaacaaattctcatcaggtttgcgaccatttgcactaccaaaacttgatattgaggaccaattacaaggccatcttcgatttgataatttgatagatacagaagcatttttcagtgtacaagggcacgggaatagttggattgaggttctgtccactggaagcagtgttgttgattttagctctagcgcagctgaatcttgctcaatatctaaaactaataatgtctggtcagaggcaacatccactgaatctgtcgaaatgctattgaaatcggtgggagaaaatgagacaactggtgacatggataataatgcccaccttaagttaagtggtatggacagtcaaattgatcaatcgagtgtccatcctaaatctagtaactccctgccagatagtactgtagtgccaactgaggaagatcagtctttgagtactcattctagaatgacagacgatcttgatcgttctcagatatctcattctataatgactgccgacctttcaaacaccgagagtcagcttgaacattttcggcctttcttaatggacaagaaagctgagcaggcagtggattctgttggtgagaagtgcattgcaggtgagaagttgtcctcttcaaacaacgcaccaggaagctacccagccattgacaactattttggggcaggtcatgatgatcgttctttggacaaacttaatataccctcaactggagtagattcaaagaacttgaataatgaacctttcccagagttggctcccctgcagaacatatatactgattcatatcacttcaaggaagatactacagaatccgaggctggtgttactcctcaagattcaaagtttcgtcatatcaacgaaaataaagttgaaggtggactacaagaactgcaaagtttgtcatgtgctggtcagtccttgggcgctgtaaacttgtctagtcaagcaagcaatgaaactcttttgtcagaaagttctgatggattgctagaggccataacaaatccagttaagatgctgcacaggagtgatgatacttgcaataaagtgaacagcactcctcaaccatctttttcagcagtgcaacatggagctgaaggcctggaaaattcagttcacaggagcaatgagttcgttgttaaggagtttagtatcggttcaaattctcttttatctcaccaacctgaggcagacccaaaattttttaatccacatcctattagttctctgtctccgaaaagtaaaatttccgatgccacttgtgttcctgaagaaacaaagaatgttggatccaatagtataaacacctgctgtacaggtgatgaatcaaaacatgtagtgttggagaaccgacaatattctgttgacaacctaaaaagtggtgacatgggagaaaagatgtctggggaggaaatacccgcagtttcagggaacattgatcaaatgatagagaatgatcatgaagaaaaggctgccaatgctactggtacatccaaagataaggttgacccttctgacagtattgcacttgaaaactttgcagctgacactttcaatgcttcagaggattcagacattccgtcactaaatcataagaggtcatttgaggaacatgaatcttctgctttaggagtggagcctaaaaacacaaatttactccaatctacttctgggcttcaagagaaaatttcagcatcagtgatcagttctagtagtggcatcacacctaccattgttactgacaactttgatatttctgaggataaaaatggctgttcaataggtgtttcttctgttgattctcctgctttactagctgagaaggatttgaatatgtccacagtgaatactgaggagccattcaaggaaggggttaagtccgctttaggagatcaacacaatggtatttcttctggctctggacaaggaggggaaatgccagctgtcccaatggactcaaagattgccgtgtatagtggtactgtttctgctacagaaagggagaaattcaaggagcagcctaattctttgggttgtttgaccacaggagaaactcaggataaatcagatagtatggatccaaccacagcatctacattgggtggaaaggtggctgtgaagattgtaaaaactccactgaatgcaagtgatgatttgaatgcacatatgcaagatatagtgttaaatcaaggtacagattgtagttctggtactgtgccatctcaaggaaacgaaggctcaagcttattggaacctggtaatggtgatggaatctgcactggggttacatgtgggtccccttcagtgattagttgtgctgaatcctgtccccaagaaggtggacatggcagcactgctttacttcatcacacactatgtgggcaatctgaggatcctgaagatcatggggcctcagttgatggtatccagagctcaaaacaatgcaataccagaaatatagaatctgcacctggttctcaggagactagtgcagcaggaggtgatagaagcttctcatttgaggtgggagctccaccaaatgttgctgagaaagcccatagccctgtttggagccctttccctaaatacattacttctcagagtagcaagatggccacagaaaatactcaagctggaggttctttgaaggatactagtgatgatagtaagaaaatatctactgtggagtctggtaaagaacagctatcagaaaggaaagtaactgaaagttctgggggtggcctctcagacaactgcaatatagacgacatcattaagggtagaagttcaccgccgcggcagcatccaatccctgagtgttctgtttcttctgcagatttagtgaattttccattcacagatccacagcatttgcagctacgtgcacagatatttgtttatggagctcttattcaaggaacaccaccaggagaggcttacatggtggcggcttttggagaacctgtaggtggtggcaaacctacatgggaggctgcttggcgagctgcttttgaaagatttcagtataaaaaatcacctcatgtcagtttagagactcccacaagttcacttataggtagttctgtgcctgagaaagctagcaaaggtacagcaattacaactgtgccagctagcaaaaaagttggtaaaactgtggcgccagcacatcctgctgtaaccctacactctccaacttctgattttccttttggtagttctacatttaatctgcaacgaggcactcatctggattttagccaggcagtatcaccatttgcgtataattcacacatgagacatccgtctcctggtgttgccccctggtatacgcagagccctggtccacgccctgcagcctggttaattccaccacaaaacttaatatttgattcatcaatgcaaccggttattcctacaaatgaaactgcgaagggtgcatcatccaaaaacatatccgtttcacatactgtttcatctggtgttcttcccagcctggcaccttctattgtttcttctccaatagcagttgtgagtgatggaaaacagaaggctgcttctagctctaagcgtggcacaacatcacaaaagtcaagaaaaaaaaagaaagcttcagcaagttcagaacagcaacctgtaattgcttctcctcatctcaaaatgaacatgccatcttttactcctgccattaagcacacagcaggattgaccttatgcggtagcaagcctgttcctaacatgggccagattgcctctgaacataactaccagatcactggtggtatggatagtgatcaaagaatcatcttttcagaacagatccgtggtgcagtagaacaatcagctgcacaagctaaaagtgcaagcattgactcagtggaggcagttaagcacaaggagggcatatggagccatctatctacaatctcaaggaataagttacctccaaaagttgaagagaaacttacctcagttgcagctgctgctgaagcagcagtttctgttgcaaaggcagctgcagaagctgccaagatggcgtcagaggctgcattgcaggcaaaaatgatggcagatgaagctcttagctcttctatatctgtaatgtccatgcatcacgaagctgatcaatataatgtcattagcagtccgcctatcttgtcaagttcaacgccagcatcatctctgaaaaccaagaacaagagtcatgccccaggttccatcatttctgtggcacgggaggctgctagaaagagggttgaagaggcatctgcagctgcaaaacgtgctgaaaacttggatgccatattgaaagctgcagagcttgctgcggaagctgtgttcagggcaggaaccattattggaatgggagaaccactaccttttaccctaagagagcttttggaagctgggccgaatggctactggaagtctgcgagtgcgagaaataaatctggaagttgtaatgataatccagtaacagaaacattggaggtagatgcacctgctaactttaacaaatctggcagaaagcgcggtcggaaacctaaatatgatcaagcactaccaaattcggagccatcttcaagctgcaaagaattacagtcatatggaatacactcaggagtaggacatggagttgttgaagatgttcccattactgtgtcacctaatggtaacaatgttacatcaccaataaacattatctggaatggcattgaaaagggatctgcagttgaggttttatctgacaaaggtgggtttggagtagcttggttttctgctaaggttattgatataaatggaaataatgtttttgtcaactatgacaaccacaatggatctggtcctcatgaagaatgggtgccattgcgacaagagggggataagccgcctcagatacgtcttgcgcaccctgctaccctctcaaaattcaaaactaggaaacgactcagggaaacagcaggaagttgtttatgggttatcggagatcatgtagacgcttgggtcaacaatagctgttggcgagagggagttatttctcagaattatgagactgatgagacgaaatatgatgtacatttttcagttggaggtggtggtgagtccttagtagttgatgcttggagccttcgtccatcgcgtgtttggaaagatggtcaatgggtagagtggtcccatgcaagagaaaggaaatccaaatctaataagggcgattcacctcctgagaaacgccaaagaatcgacttgcttcaaactggtggcaatctatctgttcttggcgaagtggggggttcttcgaaggacaataatataaacaatgcaaaaaacccggaggaattaaagccattgtctttgtctcagggggaaattgttttcaacattgggaaaagtgtagttgagaataaatctgattctcttgcattcagacgtcctggactacaaaaagaaggatcaaaggtcgtctatggtgttccaaaacatggaaagaagaagaagtttatggaagtaagcaaacattatgatgcaggccaatctgacaagatttctgagggcaattcatctaacagattcgtgaaacatctgatgccacaattgccaaggccacgtgaaaatgcttccaaagttgaccctattagaggaaggagagtaggtgaaacaaggtctagattacctaaacctacgaagtcccacaatgttggagctagcagtgttcctggaaaggattccttgcctatgcaaatgcatgttccaaattctggtgtttctgaaaggagttctagttttgcaggaagttcgacaagcacttccaacaatgagaagcccacttcagaaaataataatccggtgcttggtgtgggccttagaactgaagtttcttctggtcctgaactgcaaactgcatctactgttcctagttccaagccaaatgtatccactactaatcgagctaaaaggaaatatgttcccactgtcagtaacacaaacagaggtatactaaaaacctctgaaaagtcgagttctgattctgctgagccccgaaggactacttctgattctgctgaacctagacgatctaacaggcgaattcaaccaacttcaaggttactagagggcttgcaaagttccctcgtaatctcgaaagttcctggcgagaaggttcataggagcaattacaaaagtgcatcctcaagagggagaactcaagctcatgggtgagtgaaggcaccacatagctcatagctgcttttggtgggatagctctcgtgtacatagctgtagccgtccagtatggaaggaggatagggttggagtaggaagtctttattggagcgcaaggattcagatgtattataaactagcttaagtgcattgtgttaaccttttcttttacttgctcgaattatacttttccgtgttgtagaatacctggaaatatccttttagtatgtgtggatacaccgggaaagaaattgggtgccgtttaaattcatccgataatttaacgtgagtctgaacgtcaatttgactcgctactatcgtttgatcatatcattccttttctaagtcgtctacctgcagttgcagaagctggatggtgctctgcttctgtgccgttgtgtagtgaatgcttgttgtttgatcgtttt

SEQ ID NO: 27769 - DNA, 3424 bp, Zea Mays
ctcacctacctcccgccgtactccagccaagcggccatccagctcttcctgcaccttcctttatgaacgtgcggagccagagagcaggctgctctctctctcccccctctcttctatctctctatctctacagtctacacaaatcatatttccccagcgtacaccttctgtctgctggattactgtggatttgaccatcgtacggcagcccacatcgctgcttctcccccggtcggttactgtagcaccaaagtttgatcttgccggggtttggaggaggtgaaaggttggggttttcttggtcctgggaatctgtccaggttcgtctctctatgtgaagattctgagaggttggctgtgagtcaagattttcggctcggcggtggcgaatcctctgctcctgactccgatttgggtattctcgttcttgattcctgactcttggcccgaaacttctgttctgttcttgccgaaatcgaagggaaacagctccattctggttgcaagttctttgtaaagattcgaggtggcattcagatttcggttacctgtgcttgtgctgttggttttgcttcgaaaatttgctgtttgggtagaccaaggttactgacggcctccgccgccgcagatgtgcggatttgagatggaatcgcagtgagagggttgaagagttgttcctgtccctgattctggtggcttagtttctggtgctctgtttggcaacttaagcgcttccattttcggttcatgcaagggtcgctttcggccatcggggagctctcagccgtgaggttttgaggtgggattgtgtcattgtgacctcaaggttgaaggagatgcttatggcgtcgatgtcagatagcgagacgaccaaccgaggcagcatgtgggaactggatcagaaccttgatcagcccatggacgaggaggccagtcaactgaagaacatgtacaaagaaaagaaattttcgtcaattttgttactgcggctcgcgtttcaaagtcttggggtagtgtttggggacttaggtacatcaccattgtatgttttctacaatatctttccacatggtgttgacgaagacgaggatgtaattggagctctatccttgatcatttacacactcaccctcatccctctgatgaagtatgtttttgtcgtcttgcgagctaacgacaatggtcaaggtggcacgtttgctctttattctctactgtgccggcatgcaaagcaaaagtgaagaaatggctagaggggcatgcatataaaaagaactgccttcttattcttgttctcattggtacctgtaccgccatcggagatgggattcttactcctgcaatctcagttctttctgcggcaggtggaataagggtccagaatcagaacatgagtacagatgtggtcgtaatcgtcgcggtgtttatattaattggcttattctgcatgcaacactatgggacagataaagttgggtggctctttgcacctttggtgctcctttggtttattctaatcgggagcgttgggttagtgaacatacgcaaatacaacagttctgttctaaaagcatacaatccagtctacatcttccggtattttagacgaggcaagtctgagatttggacatctcttggaggagtcatgcttagcatcacagggactgaagcattgtatgcagatctatgtcacttccctgtattggctattcagtttgcgttcaccttagtggtgttcccctgccttctactggcgtacactgggcaggctgcctacatcattgacaacaaggatcatgtagttgatgccttctaccgctccattccagaggccatatactggccagccttcatcatagcaactcttgcggcagtagttgcaagtcaagcaaccatatctgctacctactcgataattaagcaagcccttgcactgggctgtttcccccgtgtcaatgttgtgcatacctcgaagaaatttctggggcagatttacatccctgacatcaattgggtacttatgattctttgcattgctgtaactgctggattcaagaatcaaagccagataggaaatgcatatggcactgcagtggtgattgttatgctagttacaacatttctcatggtcccagtgatgctgctggtatggaaaagccactggatacttgttgtcatcttcctcgtgctctccttgacggttgagctcccatacttcacggcgtgcataaataaagtggatcaaggtggctgggttccactagtcatcgcaataaccttcttcgtcatcatgcacgtgtggcatttctgcactgtgaagcgctacgaatttgagatgcacagcaaggtctccatggcgtggattctggggctagggccgagccttggccttgtcagggtccctgggataggcttcgtgtacacagagctggcgagtggcgtcccgcacatcttctcccatttcgtcaccaacctccctgccatccactcggtggttgtctttgtctgcgtcaagtacctcccggtctacacggtgccagccgaggaacgattcatcatgaagaggatcgggccaaagaactaccacatgttccgctgcgtcgcaaggtatggatacaaggacatccacaagaaagacgacaacttcgagaagatgctcctggacaggctcttgatcttcgtcaggctggagagcatgatggacggctactccgactccgaggacctcaccgtgatggagcacaaggccaagaggtccaccagatcacttcagctgatcgagaaggctgggggtaataacacgatgagctccaccggtgacctgagctactcatcgtcgcaggactccattgttttggccaagtcacccctgacagggaacagcctgacgagatactcaagccagacacccggcgacgagctggagttcctgaaccgaagcaaggatgccggcgtcgtgcacttcctcgggaacaccgtcgtgcaggcgcgcagggactcggggatcttgaagaaggtcgccgtgaattatgtgtatgccttccttcggaagatgtgcagggagaacagtgtgatcttcaacgttccacatgaaagcctcctgaatgtagggcagatatactatatatgaatatttttgttttagattcttctgttcggactcgaagtgaacattgtacatggtgatcagtcctagagtaaagcttttagtcaggtctgcggcttttagtcagttctgcgactttcttgagcacatagattactggtattgccattggcacattctcgatgaggcttgctgactgctgtatccgaatgccatttctcccaactgtcaaccattgctgctgctgctgctgcatacatcatataaccgtccggcttagaaaaatgatgtcatgtatatctccagattagttttttt

SEQ ID NO: 27770 - DNA, 2525 bp, Zea Mays
aaaagccttgatgtgtccgtctccgtcatgaagacaaacattcaccgagccgaccgttgccttccccccaactcccagccccagcgtcaactgactacactcgctgactcgctcccccggttccccttctctgctcgccatcttttgctctccgcttggctcgtcaatcacctcctacgctccacacgccgccggcgactacaactgcttctgccgtggttacagagaagaagggtttggggagaagacaacctaaatcaattggatctgggagtatcagatctaaaaaggcatgtgttctttccttcactcctcttaagggtgtttgaatgcacgagcaaatagttagtggctaaaattagttgagatatccaaacaacctagctaatagttcagctattagcaatttttggtaaattagttaatagttaggtagctatttgttagctagctaattccactaacaatttttagccaactaactattagtgcattcaaacaccccgttatttgagcccgctggtattttcttagtgcattatttcccttttcacagtttaatatctgctctagacatcgattccgtgaaattctaggagattcgtacacgaattatatttgaaatttaggacttttgtacttggtgcagtgagaagttagatattctatcgaattaggcaaggacatcaatgtcgaacagcgaaattttaggccccgatagttgatgtggcactatttccaatgcaaacgttaatagatttacaatgtagtgagcctcacagttgaaccccatgattcataaaacagtttcatagtaaaagtatcatatgttgtttgtgcttggggcgagcagctcacaggcactctaccaatatcaaataaaaagcacttgatgcctgataatttgagaaaggtgcatgcttttccatagaatcattattttccctgttttctagcactcacaacttcctcctatattgactgatacatgtgtcctcttcaattggcacaggattccatttctattacttgtagtctctttctgttcttatatgagtggtaacttggttcatgctagtatgctttgttttcatcaaggtagaaaaagaaacttttctgtccggtcatggctttcccaactgcagcagctgttttgcttaatgagaacatgcagattcataaagggttgatgcaccaagtgccaaaccactgaaatcatcagccaaacctgagagaaaggctcttcaggatgtgtctaacattcctaaaggcactgctttaaagaacagatccacagtcaaagaggggtccgccttgaaagaaaggcctgcactccacaatgtgtctaacaacctcaaagagaggtccatcctgaaagagaggcctcctcttcaggatgtgtctaacacccgcaatgagaggtccatcctgaaagagaaatctgccctgtgtagccatgaagctattaagaacccagtgaatatttttgctgatgacgaagagaccaaagggtgccatgaatgggctaaggatgggatggagggcactcacttcactggaaatgattctcagaagttggataaagatgtgcaacacaaacgtatcaagaagaaagtggcaaaagttacgtcagcattgtatggctggtcacatgaggtatatggtcatgtgatgtttatggctatggttcccaagttttctgaagaatcgaaagagctggagctggaaccagagattcttccagacatcactaggtgtatgtctacctcaggcaagagggatgatgcaccaagcgccaaacggctgaagcctaagcttcaagaaccgaaggctcttcaggttcaggatttgtctaacactgtcaaagggagcccttctctgtgcagccatgaagctgtgaagaacccagtgaaaatattcactgttgaagagaccaaaaagtgtcatgaatcggctaatgatgtgtcggagggcactcacttcacaggaaatgatcgtcagaagctggataaggatgtgcaaggcaagcgtgacaaaacacagctggttgaagattctcctactgatgatgagcttgacgactacccatttttggacaacagtcctgttaagtttgagctgaaagatgagtcagtgattccagatattggagcaatctgaagtgatagtgtttgtgcgattgttctgtagcaatctatgtagtacgatgtttagtacatgttgtttgttctgtagcaaactatgtagtttgagctgaaagatgagtcagtgcctcatcgggtacttttgagtaccgtagcggttgtcaagtttcatgctctcctgaaacatccttcgcaactcgcaagtgaaactctggtttatgccctgaatcagctgctgaataagctaatgattgcatgagtatccgttgatgcatagtagtgaaaggaatggctaagagggagtgaattagtttttttttaattttgctcaaatctatgttttcagttttcagctaatgattgcatgagtatccgttgtac

SEQ ID NO: 27771 - DNA, 532 bp, Zea Mays
tcgtggcctttcctctgcatcccatccaagcgccgccccatagctcacttttccttgccccgccgtgccagcatcgttaagggcggatattgccgccgccatagaatctcgggccgtgactagccaaagctttaggcgggagttcaattggattcgcttggtcgcggtgaaggttgccagcgacgtttctggggcgaatcggggcccagcaccttggatttctcgccgttgagttgcagtccaccgcgtaccgcactgctctggagccagggcacgactcgacataaacctagtgaggacacgtatcacttgaagagcaagttggtacctggaatctcaagtgccaggcaagttgtgcccttgaccactttttacccaataatgttctttaatatcatttattcttgcataggttaattttgatgggacccaataggttaccctagattgtttatctcattaccttgtttacccctgaatcacttgggtagtttgctattgcgttacatggatttgggataattatttatca

SEQ ID NO: 27772 - DNA, 1608 bp, Zea Mays
ggtaggtcacatgcggtcggatggtgagagcctgagagggggtggcagcaccatggcgcgcgcttcaccgtccgtcccgacgcgtcggtcgagtactcgagtcgtcagcggtcggaaagactacctggagatcccctgggctgagctgcgctccatggtcgaaccgtcctttgctgagagatcgttgatctaccacaaagattacctcagcgatgcgaccatcgtgacatcttctgcggtcaatatcactgaacacgcggtccttactgctgacggccactctcttccatatgattatctcatcatagcgactggccatgctttggcttctcctgccagcagagctgagaggataaaagaattccagagagataatgggaagatagagtcgtcagaatctgtgctgataattgggggtggtccaactggtgttgaactggctggagagattgtggtagactacccggggaagagggtgacccttatccatagaggaccgcgtttactcgaattcattggagataaggcttcaaagaagtgccttgattggctgacttcaaagaaagtagacgtgctccttcagcaatcagttgagttgggctcattatcagacacagagaaggtgtacaagacatcaggcggagaaacagtaacagctgattgccactttgtatgcattggaaagccactgagttcgtcgtggctacatgataccatcctaaaggaatccttggatagcaaggggagagtaatggtggaaaaggatttaagagtgaaaggttttaataacatttttgcgattggtgacatcacagatattcctgaaatcaaacaagggtacctcgcccagaagcacgcgctgctagtggcgaagaacctgaagctactgaccaagggtctccctaacagcaaactggcgacttacagcaccggctatccgctggcgctcgtctctcttggaaggaaggaagggctggctcagtttccattgctgacgctcagcgggtgcttgccaggcatgatcaaatccggggatctattcgtcagcaagacgaggaagcagatgggcctgaatggttgactccagtccgaggaagcttgaaaaaatagctcgggtcctgggttatatacagacgatggattcctttacacacagcttgtgttttgctcgtatggccatatgtgttcgttctgtatctgtacgtgtgatggtgtcgtcgtgtggatgcttggaatggtgactagcagagtgtatgctacgtacatgtatacatggacctttttggtccaacaaaatgttgcttctgtagtatgtatgggcgcattttgtttgctggcaagtaaacaatgaaatcatctttgcttgctggcaacacgatgtcagcagtggcaatttgatgcctatgggccggcctatggatggagaagatatatgtgcatctggacatctggtcctatggggctatgggcgcctggagcagccgtgcaagtctgggactgcacgagtgtccagtgcccatccattgcaatctgttcccgtgcttgggcttgcactgttctccctgtacggagtagtattcacggttaatgtctgcaaaaaaaaaaaaa

SEQ ID NO: 27773 - DNA, 2845 bp, Zea Mays
gcgatggtcacctacacgcttgtgctcccataactgtctagtactactgatagagcacaacactgtcatgcattcccattcctttatttatctggacgtgcgccgtcagcaagatggcaactactccggcgctgtcacgcgaccctgcttcccgtcccgagctcgacgctggcctgatatatagcattggagtttgttggacctttggtggctagtcccgtccaaaagaatcgcaactcgcaaggcagcagagagcgaaggaggccaaggccatcgctctcctagcctcggagacttgcctttgcatacacatccccccggagggcggtgtgagggcatggctgcaaccgtgaggagggctgcttcctccgtcctctctcgcttcctcctcacaaagccttcgccttcgcctgcttctgccgccggcaataagtccgctctcctcggagcaggggctgctgctcttcacaggttcagcaccgcaccggcatccgcggccgcggccgcagaggagccgatccagcccgcggtggaggtgaagcacacccagctcctcatcaatggcaacttcgtcgacgctgcttctgacgttcccgacgctggacccgcgcaccggcgaggtcatcgcgcgcgtcgccgagggcgacagcgaggacatcgaccgcgccgtggccgccgcccgcagggccttcgacgagggcccgtggccgaggatgaccgcctacgagcggtgccgcgtgctgctgcgcttcgcggacctgatcgagcggcacgcggaggaggtcgcggcgctggagacgtgggacaacggcaagacgctggcgcaggcggcgggggccgaggtgcccatggtggcgcggtgcgtccggtactacgccgggtgggcggacaagatccacggcctggtggcgccggccgacggcgcgcaccacgtgcaggtgctgcacgagccggtcggcgtggccggccagatcatcccctggaacttcccgctgctcatgttcgcctggaaggtcggcccggcgctcgcctgcggcaacaccgtcgtcctcaagaccgccgagcagacgccgctctccgcgctctacgtggccaacctcctccacgaggctgggctccccgagggcgttctgaacgtggtgtccggcttcggcccgacggccggcgcagcgctctgcagccacatgggtgtcgacaagcttgcgttcacgggatcgacgggcacggggcagatcgtgctcgagctggcggcgaggagcaaccttaagccggtgacgctggagctcggtggcaagtcccctttcatcgtcatggacgacgccgacgtcgaccaggccgtcgagctcgcgcaccaggcggtcttcttcaaccagggccaatgctgctgcgccgggtcgcggacgttcgtgcacgagcgcgtgtacgacgagttcgtggagaagtccaaggcccgcgccctgaagcgcgtcgtcggcgaccccttcagggacggggtcgaacaggggcctcagatcgacggcgagcaattcaacaagatcttgcggtacgtccagtccggcgtcgacagcggtgccaccctcgtcgccggcggcgacagggtaggcgacaggggcttctacatacagccgacggtgtttgccgacgccaaggacgaaatgaagatcgctcgggaggagatattcgggccggtgcaaaccattctcaagttcagcggcgtggaggaggtgatccggcgcgcgaacgcgacgccctacgggctggcggcgggggtgttcacgcggagcctggacgcggccaacaccctgtcgcgggcgctgcgggcgggcaccgtgtgggtgaactgctacgacgtgttcgacgccaccatcccgttcggcggctacaagatgagcggcgtcgggcgggagaagggcatctacgccctccgcaactacctccagacaaaggccgtcgtcacacccatcaagaaccccgcatggctgtaaatcacatcctccgtccttgcccgcacggcgctgcgccggttctcggagaacgtgacgaataaaacaaacggtttggttaaaaagacaaggacgacggaaaatgggtcatttttatctcccttagagcatctccaacaatgcctcaaactaatgcctcaaatcgaaatatagggctctacacaggaaaaaccactccaacagtgcctcaattcaacaaattttgtcaaaaaactatagggcaccctctcaagtgcctcaaatatactacaccgtagtgggctgccctataatctagatttggggctttactgttggagcggggtgttttgttggtgccctaaattctataaaatttacttattttaaaattataaggcatttttataggtcacgttgttggagatgctcttaacaagcaccaccctagtcacgttttcatcgaactttaaaagcacgcgaattgctcagctctcaaaaccatttaaattacccattaggagaggttttcatggtgattttagcttttttttaattaatgtttggttgcaatgacaggacaggatgagatgagacgatctcttgtatctcttaaacaagtttgtttggttgagggtcaagtgttgggacaagactaggggtgggcattttaaaaccgaaaatcaaacccgaaccggaaccgaacccgaatagaccgaattgtcggtctattcgggttttcgggttcgggtttggttcctatatgtgctatatttcggggtatgggttcgggttcggttcctaacctttaaaacccgaatagacctaataacccgaaatataaaaaagctcttaatatgtgatggtattattatatgatttat

SEQ ID NO: 27774 - DNA, 1578 bp, Zea Mays
gactgcagaactgaacatcccaacccaagtcccgaaccctccctcaccactcccccgatctccgccactccaaaatgtggcgccgccaccacctcctccggctacttccgcctccggccaccgccgctaccgccgcggccccttcccacttcctgcgctacctctctacctcaagcaccccgaccccggccgcctccctggcctcgtccctcgcgtcggcgctcactgcgctctccacgaccccgccccccgccaccaccccggacgcttacttctccctccacttctccgacgtgcggcctaccaacgcgctcctcgccgaggcgctcgcgctctccccgcccgccacctcccgcgccgctgccgatctcttccgcttcctcgtccgccgccgctcgctccacccctccgacggcgcgctcgcgcccatcgttcgccacctcgcccgccgccgcgacttccccgccgtgcgcgcgctcatccaggagtttccaaccgctctcgggcccaccacgctcgacgcctatctccagcagctcaccagagccgggcgcccaacggacgctgtcaaggtgttcgacgaattgccggagcagctccgtaaccgcgaggctctcactttgctggtctcctcgctttcttccgagggattcccctcgcacgcagagcgagctgccaagaaggtcgccagtgagatcttcccagatgataatatctgcactttgcttgtatctggttatgccaatgctggtaagctcgaccatgcgctaaggttgattggtgagacacgtagaggtgggttccatccaggattggatgcgtataatgctgttcttgattgtgtctgccggctctgtcgcaagaaggatccactgaggatgccaatagaagcggagaagttcttagttgacatggaagcaaatgggattcctcgtgatgcaggcacatttcgggttctgatcacaaatttttgcaagatccgcaagacaggggatgccatgaatctgttccagcgtatgggtgagtggggctgctcaccggatgctgacacgtacttggtgctcattaggagcttgtaccaagctgcccgaacttcagagggggatgaaatgataacgtggatgcggtctgcaggatttggagataaacttgataggaaggcatattatggattcatcaagattttatgtgggattgagagggttgagcatgctgtcaaggtattccgtatgatgaaaggttatgggcatgctcctggagtaaaatcatataccttgctcattgagaagctggccagacacaatttaggggatcgttctaatgcacttttcagggaggcagttgcacgtggtgtacctgtggcacaaggagagtacaatgttgacaaaaggtatgtcaagacaaagaaggagaagacggtgaagaagaggctgactttgccagagaagatgagattgaagagcaagaggttatacaagctcagaatgagctttgtcaagaagcccaagcgtcgaatgctccgggtttaagcataattttggatacttgtgtcaaaataaatactggaaatttcatgga

SEQ ID NO: 27775 - DNA, 566 bp, Zea Mays
tacctggttggtgctcgtcgccggcgaaggacctcggcctgggcacctcctgtcgtagggagcgcggcgtaatcaagtggtctggatgaggagcgaaggcggccgcacacacgcccccccgagcgttcctcgaaccggaacccccaattgtacggggtgcctgccaagcaaagcaagcggttcggcggatggatttctccgctcctccgttcccgtgccgtgcccccggagatgccgagacggtgtagggaggcagtagctactatctgtcgtttgtcgggtcgggcgctagagtcctgttgctcgacgggcgctggaatcctctccagtagcgtgcgcgggagctctggtcgcggcgattggacaagcagtaagtagtacgcacgcacgccgggagacggggagaggagagggaaggggagtccaaggtatggccaaagccaagtctagcgtgtctaggaacgaaaggaagacgacggcaggtggagaggtgaggtgaggcgaggaagaggaacggtctccctctcctcttggtccccgctgggcccacctgcctccagtgccgt

SEQ ID NO: 27776 - DNA, 1780 bp, Zea Mays
ctgcagtcctcgcctccgccctccggcgcggcgggggagactttgcgcgccgacgcggccgcgccgtctcatctgtatggcgcccggtgtctccacgcgctctccactctcccgcagcccgcaggagtgcaggacccggctgccgcaaccgccccgtcgcagcgccaaacatcgcggagtggggccggtgcggccgcacctcgtcggcgcccgagttccacggcgccaggcagttctcgctggaggagctggcgcacgccaccaacggcttcgccgaggccaacctggtcggcgcgggggcctttggcctggtgtacaagggcctgctgctagacggcaccgtcgtcgccatcaagcgccgcgcgggcgcgccgcgccaggacttcgcaaacgagatcaggaggctgtcagagatctggcaccgcaacgtcgtgacgttgatcggcttctgccaagaaggcggtctacagatgctggtgttcgaatacctgcccaacgccagtgtcagcggccacttgtacgacaccggcaaggagacgatgaccaggctggagttcaagcagaggctgtcaatagccattggagcagctaaaggtctgagtcacctccacagcctggcgccgccgctgatccacagggacttcaagacgagcaacgtgctggtcgacgagaacttcatcgccaaggtgtccgacgccgggatccacaggctgctgcgagggcctgatggtggcgccgtcgccgctctggcgagtcgcggtgtcttccaagacccggaggtacattcatcggcgcaggcgcagctctctgagactgagagcagcgacgtgtacagcttcggggtgttccttctcgagctggtcacaggcagggaggctgcggggctgatgccgccggggtccagcaaggactctctcgctcaatggatggaggcgcgtttcgcctcgaacgagctggtcgacccgagactgggagggagcttcacctcggagggtatggcggaggtggtgggcctggcgtccagctgcctgagcccgtcggcgaggcggcggcccaggatgcggctggtggcggcggagctggaccggatcctggagaaggagatggccctgaccaccgtcatgggcgacggcggcaccgccatcgtcacgctcggcagccagctcttcacgtcctgactgaccgggatccgatggctggcatcgtcggcccaaggaggaagcatggtcgccgacgaagagacccccgcgttgcttccttcgtgtcctgggccgggagctgaacgacgcaacgcgatgcaagcagttcgtggccgccggtgattctccagctcactgctcacctcaggaaatttcaagagacggcgacaggcgcgcgaacctgtgtcctgcattttcttcagtcttccatgttcagagttccgttggatttcatccagcagctcagccaaaatatgtgtatgtgtaaaaattcacatctggaattggaagatggaatttatactagtactagaggcatattttgggctgtggaacctcatcacccagggtcacttatttccatttgtttattctttctctgaaacaacatgcgatgcgatgcgacactgcagctctcccaaaccgaactgtacccaaccgaagcgtgtcagtccagttcaattttaccactagatcgagctgctcctactactagaactacaactgaaacagaaagcattgtgcatgaattatctgcccaactagtgaagagtgacgaataacagaggtaaataaacggc

SEQ ID NO: 27777 - DNA, 632 bp, Zea Mays
gggtggaaactttgaaatgtctactatcacttgtagcattgtccaggatatggaacagtcaaggtgttacagaagataatgggttaattacatcttttgatgaagttagagtttaccccattcctgtaatgctttacctggtcaagaacttattgcagtattatatctttgaatatgtggatgcaccagcttaccagattctgaagaacttgaatattatcagcactggtgtcctgtaccgtataattctcaagaaaaagtcagaccatgttcttcagacccctattcgaggttgggtgatggcaattgtgatggctcttttaagtggttttgcaggagtatatactgaagttatcatcaagaaaaatccttcaagaaatatcaatgcacagaatttttggctgtacatatttgggatgctcttcaatttggttgcaatttgtgtccaggacttcgatgctgtcatgaacaaaggctttttccatggcgaggtttacatgagcacaaccattatttggataaaaaatatatctaagatgctaccagctcagacaatgatgcaagaagagcttttaccatcgctaaaaatgcagaaatctgaatgccttttaacaaatctaaaaactccttaa

SEQ ID NO: 27778 - DNA, 1449 bp, Zea Mays
aaagggacggcgtgcgtcgcgaactggtgctccggcgggcagaccacgcggtacgtgagttccaccacagagcacaggggcggaacacacgggcactagcggcggacgcgtgtggccggggatctagatctcccatctcctccaccacaccaccaccaacgcgcgcgcctcgcctcgtctccctccagtccaaaccgccgtcgaccgccttgcccccgactgtcgcggcgcccgcactcccacccgctgctgccggatcccctgcccctaccgtacggtctgcccgctttcaccgcccgcccgcccgccgccgccagcctagctggggtcgggtggagatccaccaggaaaagagggtgctctcttctcctcgtgcgggtgttgtaattttgtcaagccggaagggcagcagtacttgtagagttgttccaccatggccaatgatggagacgatggacaaagccaggattatctcttcaaaattgtcctgatcggggattcctctgttggtaaatcgaacttgctagcaagatttgcaaggaacgagttctacccaaactccaagtccactataggagtggagttccagacacaaaagttggtaatcgatgggaaggagattaaggctcagatatgggacactgctggacaagagcgctttcgagcagtgacatctgcttactaccgaggcgctgtgggagctcttctcgtctatgatattagcaggcgtcagactttcgacagtgttggtcgatggctcaatgaactacacaatcattctgatatgaatgtcgtcacgattctggtgggtaacaaaaccgatctgaagcatgcgcgtgaggtgagcaccgcggaaggacaagcactggccgaggctcagggcctcttcttcatggaaacctcagctttggattcgtcgaatgttgcagcagcttttcaaactgtggttaaggagatctacagcatactaagcaggaaggtgtttcagtcactagagcagaagaaaagagatctacagcatactaagcaggaaggtgtttcagtcactagagcagaagaaaagcgagctgcagtcgctaagcagcgggaaagccgtggtgctgcagggtgaagccaaccaaacaagcagtggtgggaggtggtgctgttcctcgtgacctgacacgaggactgcagctatggagggcgatcggattgtgagacattcgggtgtgtaaccctgtagtccgatttgtgaaaagttgcttttcccccatgttcttgttctaaaggtaagctggcgtggctgcttgtacgaaagctggtgttttccgtcggaggaaatcaatgtatagttcgattgatccttgggaggtgtcgatgatacacatgattgtgtaaagagaaaaagcgcgaccaacttgactgttgcgtcattctacatcattctagtcctagaaaccgttcttt

SEQ ID NO: 27779 - DNA, 2275 bp, Zea Mays
aaaagtaccctcgatctccaaccggttcaccactcaccactcaacagccctcccctctcatcatctcctccccccgcacctgcacagcctctcccgccgcgcgccgcctccgcgcgccatccagacgccagtgcgcgtcgcggtccgctgcccgcggtgcgttcaccctctccccatctcccttttcctctcccgcgcgcccttccctacgcgcctccgccggcgacgagtgcccaccagctggtgttacacacgtgtaacaatacattacatggcgctagtacagttcaatggtgccttgcttccccaactcggtgaaaaacctcggccgctatcctcgccgcctgcagttgcaagggctacctatgccgatgcaaggttcctggcaccgaaaaccagttcaagaggtagaggtaaacacctgctatcacctagttatagtttgcattcacagacctcttctgaacaaataaaccatgtaccgtcgtcaagatctcgccagaaaaggggctcaagttttgtcgtcagagctgaagctcctatcggaagcttgctaggagctatcatccagatgtaaacaaagatcctggtgctgaacaaaagttcaaggaaatcagcaatgcttatgaggttttgtctgatgatgagaagcgatcaatctatgataaatatggagaagcaggtctgaaaggtgctggcatgggcacaggagattactcaaacccgtttgatctattcgagtccctgtttgaaggattcggtgggatgggtggaatgggtggcggtcgtgctgcccgtaacagaccaatgcaaggtgatgatgagagctacaatctggtactcaatttcaaggatgcggtgtttggtgtggagaaagagattgagataaccagattggaaggctgtaacacctgcgatggaagtggtgctaagccaggtacaaaggcaacgacatgtaaaacttgtggaggccagggccaggtggtctcctccacaagaacaccactcggaatattccagcaagtctccacctgcaatacctgtggtggcaccggcgaattctccacgccttgcaacacctgttcgggcgatggccgagtgcgaaggacaaagaggatcagtctaaaggttcctgccggagtggattctggaagcaggctgagggttcggtctgagggtaatgctggccggagaggaggccctcctggggacctttatgtcttcattgacgttctctctgatcctgttcttaagcgagatgggacaaacattctctacacgtgcaaggtttcttacatcgacgcaatccttgggacaaccgtcaaagtccccactgtcgatggaatggttgacctcaagataccttcagggactcagccaggcacaactctggtgatggccaagaaaggtgttccgcttcttgggaagtcgaatgctcgcggagaccagcttgtgcgcgtacaggttgagatcccgaaacggctgagcagcgacgagaagaagctagttgaggagcttgcaaacctgaacaaggctcagacagccaatagcaggagttgatttattgagcaaatctttttaggacaccatgcttgtggtcacaggcaattttgatgcaaattgcagtgatgaaaagagttggtagtggttcaacacttctacgaactaaagaggtacactggagcgaagcgtgtcatgctcatgccatatctgtggcctcgtttctaagctattggaaaccaagtcggtgaccactggacgtcttgcaatagcttaacatatacgactttattagccattttttgttacacggctttttgtattcttgagagccttaggcaaaatctctggtagtggaatcaggcttagacttttacatttcttgcagaaatgctgcaccattgatggaatatgtaagctgcaccatggaaatgtgactgcagttttatggtttgtgatgcgtcgggggtttattgttttgctcttcaagttcgttatctaaacaatacatttatttgcccctggcaggggcagctgttgatttgaagctgcctctgcgcagagcaggtgcatttttgtggtctaggcagctgttgacatgaagctggttgttctgtgtttgcaactacttgggactctaatttaattttgttcctgtatgatgtttttaataaaatcgcaaatgctttttttctgcatgcacatgcgtaaaggcatccgcatgcacagtaggcattacaaatccggttggaaaggacgaaaatttgtccaaaaa

SEQ ID NO: 27780 - DNA, 3654 bp, Zea Mays
ctcgtcgcccccttctccgatccgatcggtctctgatcgctgcgtttcctggttcctcaaggtttattggggaatttttttagcgagttacctctttcccctcttgtgggctctgcggggaaatttagggtttagtattggggttgatcggacgatctagtgtggttaggccaacgattctccctgctgtggctcatgattttccaatttcgtgtaaatccggttcggtgtggtgccttgtttttttttctgttttctttattagggctcggattctgagtcacgaaatgaatgatcatctgatcttgtagttttgggggacttcgtctctcgtaggagggattctttggctgaggtagtgaggttgccctcggattggtccaaaaacgaaaaagttagccctcttcctcaggtccaatttggcatttttttcagaacacatacgatttctgccagtctgaagttttggactttatgtgagctgttgccaattcaactgcttctgctacacgatccattaactgctttccgatccgtgttctgtgatgtttgccctcttcctcagggccaatttggcaatttgtcagaacacacacaggcaacttttggggaactacacgtgtatggagttttattagtattccaggggcgtcacaatggcatactttcctgatgaagtagtagggtatatccttggttatgtaacgtcgcatcaggaccgcaacgcggtgtccttggtctgccgggcatggtacgacattgagcgtcatggccgccattcagtgcttgtaagaaactgttatgcggtgtgcccagagcgtgtacacatgcggtttcccaacatgcgtgcactgagcttgaagggcaaaccgcactttgctgaattcaaccttgtcccggcgggttggggtgccactgcaaatccatgggtggatgcgtgcgcccgtgcatgcccaggtcttgaggagctccggctgaagtttatggttgtgactgatgaatgcctcaagttgctttctctatcctttaccaactttaaatcacttgtccttgtttgttgtgaggggttcagtactaccgggcttgctaatattgccaccaattgcagctcttcactttcaggtttcttaaggaactagacttacaaaagagttgtgtgaaacatcaagaccatcagtggattaattgttttcccaagtcttcaacatcactagaatgcttgaatttttcctgcttgactggggaggtgaatgctgttgcactggaggaacttgttgcaaggagtccaaatcttaaaagtttaaggctgaatcttgcagttccatttgatgttttgtccagaatcctttctcgcacacctaagctagaggatttaggcacaggatcctttttacaaggcaatgaccctgctgcatatgccagtttatgtagagctcttgagaactgcacttcactgaagagtatatctggtttttgggatgctccaggcttttatgttcaaggaattttgtcaaattgcaagatcagaaatcttacatgcttgaatctcagctatgctacattgattcagagtacccagcttatcggtattattcgtcattgtaagaagctccatgtcttatgggttacatccagttctcttgatgagtactctacaaccttactgaactaggaattagaaagacacggccatttgattgctgggtaagatgtccttgaaacctgaggcagtgagttttttttttgcttgcttttacaagcgagcgaatttgacccaccagctctggcaaggtatgcttttttgggctggcttgggaactaaacttgccattaggctatctccaacagctctcctatcattttctctatttcaaactccactctccaaacagtgatatctacagtgaaaaacagtgttttgcacgaccttatacataatatgttggatacagccttagatataagttgtgcctaataggcaaaagtctgcatactgtaacacttttgttaaactgtctggcaattgcgatgcacagagccataataatacattaataccacacccatgtttcgtaatctccagcttgtaccaatatagacgtgtcagaaccttactacctgccaacactatacattcctgtatttttattgtgataagagttggctaaatgtaagagtcttctgaaataaaaaccttttcaaatttctttgccatgtttagtaagatcaaaacagtttattgatactgttttgtgtttctctttcaactcagcctctctgtaaaatgcaggggtaaggcttgccttggttattgtttccccagatcccactcatgtggaaccgccaaaattgggtttgttttgtgtttgtcttcacaagaaaaggttgctccctcaactgtatgttaatggtatccttaggggtatgagttgtaaccctgcattgatgatacccttaggattacagttgatatgatacaaccagtgttagatcacattggtgatgagggcttgaaggctgtgtccttttcttgtcctgatcttcaggagttgagggtatatccaagtgttgttgcaccaagaggtactgtgacggaggaagggttggtagccctatcttcgtgtcggaagttacagcatgtgctcttctcttgtgttcgaatgacaaacacggcgctgatgacaatagcaaggtactgcccacggctaacgtccttcagactatgcattcgcaagcccaggtcagcagacgccgtcacaggacagccactggacgaaggctttggggcgatagtgcggtcctgcagaggcctgaggcgtcttgccatgtccggcctcctcacggacagcgtgttcctgtacatcggcatgtacgcggagaagctggagatgctctcggtaacgttcgcgggggacaccgacgacggcatggtctatgtgctcaatggctgcaggaacctcaagaagctggtaatcaaggagagccccttcggtgacgccgctctcctcgcgggcgcgcacaggtacgagtcaatgcgcagtctctggatgtcgtcctgccagatcaccctgggtggctgcaaggcccttgcggccaccatgccaaacatcaatgtcgaggtcatcggtggggcgagctttggtgcgatggatggtggtgtcagcggtgcgaggaaggtggacatgctctacctctaccgtactctggctggacctagatgcgatacgccagggttcgtctcgatattgtgagctgtatctatggctactgttggtggcgttcagggaaacccgatgttcttaaccgtgcctgctgcgggctgtggctgtgctactgtctggtagtgtttcggaaacatgatgtttatttgcgtaaggtagtgtttggttctggaaccattttaagccttgttcagatattcatatacctcatggattggaagtgattagaaaaaaatatgaataattttgacttactatgtattgaaactcacttaatcccctctaatccatatgaaattgagatgaaaccgaacagacccttaatccatatgaaattgagatgaaaccgaacagacccttagatgaaatggctctgttttctagatcctaagaacagaatggcttagatgaaatggctctgttttctagaacc

SEQ ID NO: 27781 - DNA, 3647 bp, Zea Mays
cctcgaaccgacgaggctctcttctctatcctctgtgtcccctccaccaaaaccgacggcgacgtcgctctcctccaccggtgctcggcgctctcccccgacggccctctcttctctatcatctttgtcccctccaccaaaaccgacggcgacgtcgctctccaccggtgctagactgtcctgtgaacggcagagctgagcagttttgatccagagcttagcggcggcagagctggaggagggagaacggtgaacatatttgatagggcaaaagtgtccggtcactagttaccaatataatcaaataagatggtaccactaccacgggccattggagctcaggagctgctgctgtgttccggagtccggacttccgattccggcggcgctcacggatgagacgagacgatggctggccactgttcccccaactccgcagcggagagagggagaggaacgccgggcgcgggggcggcgcaatgacgtggcgtcgtccctccatctggaccgcatgccatgtctccaatcgctgctccgatgctgcccgctccattgccaagaatagaacgtactccaatcgtatccatagggagctcaaccaaccaaccatccatccatggattggtgccacaaacaacaagaccggccaagagggaagagcggaggagaggcggctcttgcagctgtcgggccggggaacaacatcggaggggctagtcatggtcttggctaggggatttctgatcgcctcctctcctctcctgccccgccgtgccgcaagccgcaatgcaactatgaaatctgagctcgccgcttccctccgccattcacgtcggtgacatttattcatttccttcattcaggtaacatcctcgacgccccaacatctatatgtttcgaaaatgcacactgccagtcagtctatagctgattgcgatatggatcatggatcgacagtccatgcccttcacacaatcaaaatcgaatcttggttgcacaactggaataacgcacatcgttttcccccctcaacataggatcgtctctgtctgaaagcacagcaagttggtatttggatcaggactcgtagggagcaaaaacggcagcgcattgccaggacagaggtcatcctgaagttctccttaagtcggacacttagaccaggctgacgatgtcagcttccgagttcagaattccataccagcaagtttcttcttcacagcctgttgagaatgtgaatcagtttaagacctgtcgatgtggggagggagacccaaactccacatctgaaactggtgacagcccgccggcctcttgtcctaattgtcaggtccttaagagtggacatttactactttcatctaaaggaattggatggacatcatggaaaaagcgctggtttattcttacaagggcatccctagttttcttcagaagtgaccctaatgtacctccacccagaggagctgaaccgattgttacacttggtggaatcgacttgaatagctctggaagcgttgccgtcaaagaagaaaggaaacttttgacagtgttctttcctgatggtcgtgatggacgaactttcactctgaaggcagaaactacagaagacctaaatgagtggagaaatgcactggagagtgctttagcacaggcacccagcgtagcaaatacaatggggcaaaatccaatattcagcactgatgtagcagcagaacctgctgaagctccagctgaacagtcggaggacagttctgttattggcagacctgcagaatttgcacttgtagatgctgatggtagtccatcatttctggagaaggccctgaagttcattgaagatcatggggtaaaggtagagggcatcctgcgtcagtctgctgatgttgaagaagtcaaacgcagaattcaggattatgaaaaggggaaaaacgagttctctccagaagaggatgctcatgttattggtgactgtattaaggacttggaagaaggttcctgttcttcagatgcttataccgagtctgaggatgatgatgttgataaggaatattccacagataatgacattaatgatgatgatgacggttcttatgattctggtgaagatgacattgaagaagacttggactactctgatgacagtgaacatgacagtaagatcaacactaatgtcaaggatggcaaggttaaaaacaatatctcagaaactgcagaagttgcacaggcaaagggtgcttctcatatggagaccaatagtcaatccaaccagaaacaagaatcatgtggaccaaatggatccaaagatcgtatactaagatcaacttctcgttcatcatcctccagagaaaaatctatggagaaatcatgcagttcggcacacaggggaaaaagaaccttatggggccgtacttcagcaagaaaagacctgtcaacagaggagattgaatgctgcagtgatgatgagtcccttattgagaaacttgagagcaacaaggttgatctccaatcgaaaattgcaaaggaggccaaagaaaatgctattctacagtcaagtctagaaaagcggaaagaagaactacatgagcgccgtttagcacttgaaaaggaagttgaaaatttgagggagcagctgcagaaggagagaagtttgaggacatccttggagtccggggtgatgaatttgcgaagagggcaggtgtccttgccgtcaacaacagacagcaagactaaggctgatcttgaggaggttgcaactgctgaatctgatattataaacttgaagcaagaggtttctgatcttcgtgggcaggtcagtggccagcagctgtgctgtgaatcatgcaacaaaaggctcctaaacacagacaggcttggcggacctgaaagctcatcagtggcagcgtcaccgaccattgggagtgactctgcatctggcatggttaaaaaagaacagaaaacatttcagggtgatatcgagcaatcaaggaagcagacggcacaggattcgccttcttcgacagacaagccaggtcacgaggcggtcgggggcagcagccagagggctcctcaaagaaggcaatcgattgccagggagggccaagatgggtggtcgtcatcatcctctaattcgaagtggaatcttgctcagaaacaatattcaaatagcccattgataagagggcttcatggatccagcagactagaggatttcggtggaagcataccaccagcagcgtcatcggcattagtcaagctgacaaaccggctcaacttcctgaaagaacggagggcgctgctggcaagcgagatgcagagcttggatctgggtcggcccccagcagcagctgctgctccatcagccaagtccccaacaccaaaaggccatgaaaggaagaagagtcgagactgaggaagatgttgtgctcttctgaatgctagttagccttatgattaccagcagtgtagtttgtgtgcatcccattcccttccatagtgctgtctgtctgtacatgtttccacaaattctactgcggatacataatatagatacggctggacaggctgctttgttattgttcaaattgttgctgaattgattcgtcgctcaaagcactttgctgacacatttctgatgttaaaaaaaa

SEQ ID NO: 27782 - DNA, 359 bp, Zea Mays
gattataaaggacaaattgtcacacccagttttagaaggcaaaccgaatgcgaatcatgtacatgccaggaccagcaattcacgtacacaacaattacatagttggacatcatcacacagtgctcaaataataacataaaagcgtattaatttgattacatcatgatgcccaagacatccacatagtattaaacataaataaaagtgcaaaaacaaaacgtagcaacacatgaccttcataggtagccgattgggggtttgccgctaacccattcctagaactcatcatagtcttggaactcctagaaatcctccaccacgacttcatcttcttctgagcagtggttggaatgtggaca

SEQ ID NO: 27783 - DNA, 2180 bp, Zea Mays
ggcgaggcaccgacgcccaaaaataactaggcgtccccacaaaccgctcaaccttccctccctctcccctcttcatcgctccgctgcgctggccacgagatccacgccgcctcctctccggcgccccgccctcgcctctggtgggccacgctgccctcctcgcgacctccgcgcggctgcgaacgaccgacgaccgccggtttcgctgagcactgcgcaggaggcacgaggaggtggattccccgacaggcgcggtgccggcctgagtgacagggcggccgggcgccggtgacctgctcggcttcgccaaatttgcgggcggcgtcttgcgccgtgctgctgtcgctggaggcgtggagcaagggagcccggaggagggggaggccttgctcgcagccgcattggccggtaatactatctccgaccgaggaggcaggcggccgatttagtagttccctccccgctccggacgcgccgggcgccctaggtgcctctcgcccccgcttggtccatggtccatggggtggaaggttaagtcgtcgccggcggcggcgcccggcgacaagctcaggttccctccctcctccgccgcgcggtcgcggatgaagctctggctggtgcccgccaccaccacggtgctgctctggacctgcgtcctgcagctcaccgccgtcggggacacctggggcccacgtgtgctcaagggctggccctcctgcctcacgccgcacgaggaggcttccgccgcgcgcccgcaccctctcgccgtcgacaaggccgcgctcgcgctgccgcccaaaagaatatataggaacaatggttacttgatggtttcgtgcaatggtgggcttaaccaaatgcgagctgcaatatgtgacatggttgtaattgcaagatatttgaatgtgactttagtcgtgccagagttggataaaacttcattttggaacgatccaagtgagttccaagatatatttgatgttgagcactttataacctcattacgaggtgaagttcgcattctgagagaattacctccaagggtaaagagaagagttgaacttggaatgtttcactccatgcctccaattagttggtctgatatctcctactatcaaaatcagattcttcctttgattcgtaagtacaaggttctccatttgaatagaactgatgctaggctagcaaacaatggtttaccaatagaaattcagaaacttcgatgccgagtaaattatgcctccctcaaatttaccccacaaattgaagagttgggcaagagagtaattagaattcttcgccaaaatggacctttcttggtacttcatttacggtatgaaatggatatgttggctttctctggctgtacacaaggttgcagtactgaagaggcagaagaactcacaagaatgaggtatgcttatccatggtggaaagaaaaagtgattgactcagacttgaaaagaaaagatggcctttgcccattgacgcctgaggagactgctcttgtcctcagagcacttgacatcgatagaagtatgcaaatatacattgctgctggggaaatatacggtggaaagcgcaggatggcttctctaacttcagcatacccgaatgttgtgaggaaggagacacttctggaaccttctgatctgatgttcttccagaaccattcatcacaaatggcagcacttgattacttagtatccttagaaagtgatatatttgttccaacatatgatggaaacatggctaaagtcgttgagggtcatcggagattcatgggttacaagaagaccgtcttgttagaccgaaaactcattgttgagctagtggaccggtacacaaatggttctctgctgtgggatgagttctcttcactgatcaaggttgcccatgcaaagcggatgggatcagcttcaaagaggatggtgattcctgacagacccaaggaagaggactatttctatgccaatccccaagaatgcctccaggatcgtgattttttgcaaacatcatagggccaaagcattggtgaaagtgtttctgtcggtactgatgatttcttcatgtgggctgggcaaaaacaacgcagagcgttttatcagtttgcatgtgtccgttggcattgtgccaatgccaacgtacttttatttcaccattggcagctttgtcagctg

SEQ ID NO: 27784 - DNA, 2461 bp, Zea Mays
attcgcttcagcctcacgcctacccacgacgctgggagacccgaacgagcgaggacgagcgcccgcaacaccgatgcgccgccgccccctggccctagcgcctcgcgccgtcgctccatggccggtggccctagcgccccgcgccgccgctctgtggccgatggccctagccctaggcgccgccgctccgtgggccgtggccctatcgatcatgccggagcaccgcccaccggctagctggcagcccgcagccgccacggcaccacgcgtccgactcccacgtggccatgcctcgtcctccgtgctcgcctagccgctagcagcctagcgcgacagtcggcagtcatgaaaaacttttgatttcgccaggagacaaacatgctacataccctcataagaatatgaatattgaggaggaacccacaaacaaagaagatcatatattgaatgtgtcacatacagaaggtcatgaaaaccttttgatttcgccaggagacaaacatggtacatcccttcgtgaggatgtgaatattgaggaggaacccacaatcaaagaagatcatatattgaatgtgtcacatatagacggtcataaaaaccttttgatttcgccaggagacaaatatgctacattccctcatgaggatgtgaatattgtggaggaacccacaatcataaaacctttttacagtttatggctgaaaatgatatgtctactggtgttatcttatatgatgacgtaaaggattgtatgataacagttattgtaagagaaatgagtgtagactttctaaattacatttttaataaattcgagagaggaaagtgttggagtgatggctgagaattaagtgatatggaaatggaagttgaagcaagaagaaagtttgtcattaccaaggaggctgacgcagatcttactgttgaagatgacacacaaaatatatttgttcatcttggttttctggtaccgtattataaaaaaggaaactcaatccagcattttttgattccttcggaaaagatatattatacttttctgatcttaagaatttttcaataaaatggaaaaggtttgtcaaactcattagatcagcgttagctttgaaagcgcctttggtcagattaaccttaatctgtgagatgtctacaattatcgtattgcagctttaattatctaattctgcatattattaagtattataaaaaaatgtcaagattgacgtgcttcagtaaaatgggttatgccacacagacaggtctaccactacaggaacaatatctctttaaggtatttttatgataagtggtgttgtaacttatgacacgtaatgtggtatttaagaaacttcgttaagcatgtcctgacctacgtaaaagagtagaggaaatgctgaaggaagtttcttcaataccacattacgtgccataagttacaacaccacttatcataggaatacattaaagagatattgttcctgtagtggtagacctgtccgtgtggcataacccattttattgaagcacgccaatattgacattttttgataacacttgatgatatgcagaattagataatttaagctgcaatgcgataactgtggacatctcacagattaaggtcgatctgatcaaagacgcttttaaagctaacactgatctaatgagtttgacaaacattttccattttattagaaatttcttaaaatcatgaaagtataagatattttttctcaaggaataaaaaaatgctagaattgagttttctttcttataatacggtaccaggagaccaagataaacaaataaattttgtgtgccctcttcaacagtaagatctgcgtcagcctacttggtaatgacaaactttcttcctgcctcaatttctatttccatatcacttaattcccagccatcactccagcactttctttccttaaatttattaaaaatgtaatttagaaagtttagacccatttctcttccagtaactgttgtcatacaatcctctacgccatcatataagataacaccagtagacataccattttcagtcataaactgcaaaaagtttttatgactgcaaatgcaaagtaaacacatatcactaacttaaacaaatagaaattaacatgcttattaaaacgacgttaaaacgacgtttaaacgtcgtttaaactataaaacgctgacagaaagtgaaacgacaacgttttacgattcgtcgtaaaacgtcgtttaaacgtcgcgttttgacgtttaaacgcgttatagagtgaaacaccgcgtttcgggcgtttaatgcgtctgctgctagaaattggcccaacctaattagaaactcccgcccagcccgcccaggccgccgctacaggccgcactatcaccagcccaattaggaactcgcgttctcaccagccgccgcactccagggcgcgctccagcctccaggccgccgctg

SEQ ID NO: 27785 - DNA, 2128 bp, Zea Mays
atctgctccctcccctatctgttttgctgagcaaagagagtggatattttggctgctagaagtgaccaagttcagttttccttgccatgttcagaggtcccactagcccctgttgaaaatatcaacttcaaaccatatgagcctgtgttggactggtgcataagagccacgtattggagtccatatgtattgctggcaccatgggaatacacccttgctgcatgttgaacaggtttaaggggcatctgtccattctagctgcttaaaaggcaaaattcagtgaaggtcgccctccctgccttgagttccacctacagaccactgcagggtgtggagctacttgtgttctagttggtgtagcctctccccagtcatcaagcttggtctgcctagagctggcatgccaccctcgccgtgaccaggtaacttcaagggtttccttagccgagctgtacatgttttgtgctctgcataagatagtgaggctcatatgatggtgagtaaatctccttaagacagttttgatggatgttatatgaaatttggagtaaaagctggctaaagttgggctgttaagttagctgtgattgagtttgttcagttcctgaaatctgtattgcagcacatggtgctcagtttagagccctttaggcatcaaaccatgtggttttggactgaagtttctataacaaacttggagacaatgttagggggataattcttggtaggggtcatgccattgaaactacatcaaactgggagtaatggtgcctaaatgtgtgctgtcagacttattttctctgaactagattcagttaactgaaatctggaatttcactgttggtgctcagtttggagtttttttggtgaccaaatcatgggtttttaggttaggagttctataacaaagtgaaataccaaggtaaggcaaacaagtttcatgtgaatagttgggcttgttactatgaagaaattgggggaaaacctattgtaaaattctgtgtcagacttgctatattgttgttttagttaagctgaaactggacttttcagtagattttgttctactttagtgcatcatagctattgctctgtgtatttttagtcttggagtgttataccaaagtggaagagcaatacttagggaatagatttggttcagtaagtggggtcttttgtcatgcgagtttgtgagataaaaggtattgaacaaagaggagagggatggagcagcaggactgatgagatcagattcagtgtttagtggggttactgaagattttttcatccctactggttgcacttgtgtgaagggatggagataagattgtagtacatatttgaaggtgctagaggtctcactccatgatgaaagtatccaagtttggaccgatttgggttgtaaaaaaatctcctctccctgctgtcctacatttctaggcaccaataaagataagtcttgggtgacgaaaaagggtatagtggtctcattcccttctgaaatatcaagtgctgcacctgttagtgcctgtccacagatggggccttatctgccttagttccctgtctacaaaaagggacaaattggatatttggctgggtgagctcgaccagattcagtgtcctggctcggcttgaatgttggcgtggtgttggtgcttgtaagccatgtatttgtgtccatgttgtgctggcaccctgggagtctttctccactgagttgtatacaagttcagagataattgattacatgttcagctaccttgagtgctgagttcagaaaagttcctcccagtcctcaagttccagcttttgttcactatttgtgtgaggtaattcccagaagaagaagatgaaattcaagaagtggtttctgaagaggagtctgctttagtgcctgctcaacaagtaatgggagccatctaactggggtttaatagagggatttagacctccgtctctgcaacaaaggagaagttttattcacttatctttgggttagttacttcatgtggaggacttgaagcttagaatgtttttatatatctcttatggaaaggcttcacccttccaattattgtaataagttatgcacttcgagtactatcaggacttgtaataaatacat

SEQ ID NO: 27786 - DNA, 4682 bp, Zea Mays
gtctgcctctcaaatctcaccgcctgctcttcttcggtcccggctcgggctcctccatatgagcgcgcgctaggttctctctcgtcgtctctcgtggcggctggcgacgactggggaccgccggtaggcgcccaggccttcgtcgcgctggtctttctagggcccttcgccggcgacgatcaccctccgcgaccagatccccaccgtcgctggccttcttcgaggcccagatccccattgtaggccccttgcttcttctcctcaaccggagcttccaaaactcccttgcagagcttgtagaggttatggaaggtatgggtgtgccttcaccaccgacagttgggactccgtcggcctcgccctgccgcattacgtcccccgttgatgataccaatgcgtcgcttggccaagaaccagagtgcgcattgacatatatcagacaggacgatcctgacacattcattatctcgggaaattttcatccaaggcatcaaatcgattgggattcaattgaagtagaagaaaggtggaatgaggaaggaagacaggatgttactagtgaacgaggattgtatattcaactcggtttgcataatgaagatgagagggtatttaagcaaagggaagatgattcaagtgctcattgtgctggaaataatagggaagaatttcacgatgaagcttcaactgccatgccttgttctgattttgtattagatgggacaaggactatctatgatatgaacaatcctgtaatggagcctggtagcttgtacgcatcaatggagcagtttagacttgcaattagacagtacgccataaataaagaatttgagttgggcattgaggctaccaacaagactagattcagagggtactgtaaagggcctgattgtccttggagcattcatgcgaggtctgagatgaaaggatcacccactattcaagttattgtcttaaacgatgagcacacatgtacatcgagcgggagacgcaagacaacgacaccaacaggtgcttgggttgcggcaagggctcttccactacttatgaaaaaaccacatatgggtgctaaggagttacaaagtatgttgcaagatacatttggatgcactattacatatgatacaatttggcatgggaaagagaaagctctgaagcaattgtttgggagttgggaagagagtttccaacttctatggtcttggagagaagcagttatacagaagtcaccggatagtattatcgagttggatgttaaaatggatgagggccggccattttttagcagatttttttgtgcacttggtccttgcattactggtttcaaagagggatgtagaccttatcttagtgttgactcaactgctcttaatggaagatggaatggtcacctgtgttgtgccataggggttgatggacagaattggatgtaccctgttgcttatggattctttgaggcagaaacaacagaaaactggacatggttctttcagcagttgcgcaaggctgtgggagatcttcctctactagcattgtgttcagatgcttgcaaaggtctaaaaaatgccatgaacactgttttccctcaagctgaaaaaagggagtgtttcagacacctaatgcagaactacgtgaagcaatttgttggatccgagtacatgtatcctgcagctagagcatataggagggaggtgttcgaccattacttttccaatgtccaagaaattcccaaggtgtctagttggttatatgagcatcatgatagtttgtggtatcgtagtgggtttaatccagccatcaagtgcgactatgttaccaacaacatagcagaagtgttcaacaattggattaaggattggaaagatctgcctgtctgtgacttggctgacaagataaggaaggaaatcatggagttgtttcataggaggagggaaataggacagaggttgcaaggtcgaatactaccctccgtggtccatatcctccatgtaaggactagaggtttaggtcacttaacagttaagaaagctgacaattacattgcggaggtgagggataataataatgtgcactctaagcacattgtgaatgctcaattgagacaatgttcatgcaacgagtggcagcatacggggaagccatgtcaccatgcccttcgcttaataacaacacaacaatttagagatgttcggatggaagattttgtggatgactactactcagttgataagttcatgaaggcttactcgagggtagtggagccaattggtgacaaatctttctggcctacagtgccatttgcaaaagaggtgtgtgcttctattgggaagcgtggagttggccgtcaaaggaaaaacatgattaaagggtgcctagagggaggaagtggtaagaagccaaacgaaaatgaaaatgtcaaaactaagaagatgattcgtgggaagttcaagtgtccaaactgtggtgaattgggacacaggaaagccagctacaaatgtcctttgaatggaacaaaaaaacggaaaaggagagcaaggaaaaatgttactaaaggttggttcccaaaagatgttgaggcatgatgatggtgcatgcactagccacacaaccacccccatgtgatgattgtgatgccagtattgcgaaaatctctccactttcatctcccagacctatctagaggctagtgctggaccagtgtaccctaggagctgggtgccaggtgcggtggcgggcggggcctagcaaagcatgacgctgtaggagggatccagtcatccgatacgtcagcactccggcacagcagtaggcatctcggaagctggcagggccacagggcaccacgcccaaggcttagccgcgcaggcactgagcagccaagtagtcaggcagtcagtgagcagcagcagacggcagcaaggctggaagcgcgaagtacctatataggcatataagtttagttcgaccgggagtttacttctctgttatctgtgacttgcccgaccccgacttgatgtgcattgtagattatcagaaattgattaatgatttaatcacagattttaatcaactcaacacgtcgagaagaatatttttgtgctcatagttttttagttcaagcaatgttaatactagtggtacttccctgagttcatatcaatgcttagtcttgggctcctcagaaatgcaaattctttctttggcttgcaattagaaacaagtgttggactgctgataatctggagaagaggggttgcagcacccaagcagctgccctttgtgtgaccaagaaagggaaacgatacaacacatcatcactacctgtgtttttgcccggcaattctggtttcttatctttgacactcgggatgagtcacctcgctcttagggctgatgagcggtcgtttgaggactggtggaggaaggccagcaacagtacaaggataagagaaaagggatcaactgtgtcattattttgggggcttggtgcctctggctgcatagaaatagaacgttttttatgggaatcatccattcagagggtgcagcaacatttcagtgacgagttctcctgttggctcttggtgcgcgccaggagtttgggtcagcttggtctccctagttccatgaggttggctcgggtgggtgagtggtgcgactcgtcctctcatgaggctcgtcaccttgagcaacatgccgatcctgcagcagctgcacctggaggagcagctcctgcgccgcacatcggacaactggtgtgtcatcaacgatggcatggcccctgctaccattctcatgggactgcaggagagtctcggagcttgtcgacatacagccggtcctctgggaccaagtgccgattgtgaggaggttcagtggaggtggcacgtcattgttgattggggaacggtggttgtgactttcatttgcaacaagaatgccgttgccgggctgcagatttatggcaaaaaatttgacagatttggtgaatttcatctgcgtgagaatgactatgcatttagtcactcgaaagtttggcggaaatgctcaatcaataacaaaaaatcgttgggttcatcacacgtcgttcttgtgggattatgatgtaaaaaatatggattatctcaaaatcccaaagcgtgcacctgaatatcgactggcaagaaaccacagatttcttgtgccgcatgaaggagtacataccttcgcggtcagttttcaccgatgaggtcactgcggccctgggagaacacttctcagttcagcccgtggatctacaagcagttctttccggtgatgaaggatccgtgccttctacaaagctgctgtcacaacaggacctagaaagaaattgtttcgtccaaagaatcccttaacaatatagaaagttgaagcgtgaccatgcttgtcgtttttgttgtgaaatatgagcagttttgtcgagctgtgaattcattcaaacattatggtcaacccagtacgtacatacgaatgcccaccaccatctttagtaacaaatggttatgttttggattgtaggtctaccgttccaagcttgggttacacgttatttgcctatgggctctagaccgagtgctaaaactatgagagactggctccaacatactctgtaaatggttatgtactctaaattataaagaaattttttgtcttcttat

SEQ ID NO: 27787 - DNA, 2216 bp, Zea Mays
tgcttcaggtccttgatgctaccaacagatgatataccacaaatgttttcgacctaacaaagagggcatagaaagtagaagttggttgctcctttaaagcatcagtttcaagtagccatcagctgaaatctaccattgctgaaacaaggtgaaaaaaatgcagaatggactacttagagatagctacactatcgatgcatctacatcattttggactatatgggacaccatcagtaatggttgatcttgtctactgtgctttggagttcctttcaactttgcttggagcctttcatgccactgatggagtcatatgcctctgcccagaaattcagtttctgactgaactaaacggtggtggtttgaatcatcgtggttcactggttttcacaatattgggattcttggcaaccatgaggacattatgagattcttggctaccatgaggacaaattgttcaattacattttctacgtctatttcgaagcgtcgatggcggatgtccgcacacaaaatgccttgaagggtctggaggaagttgcaagtttcctgcgtgtccttggctactatccgtgcaacacaataacgatatgagctgttgcgtcacactgtctatcttggttgctccgccttggaagaccagagtgggagatggttgctatttctgctcaagttagcgagaataaatactttgtttcgatggcatatcgttgaataaaaggttcctcttcccttgtttggaagagattatggtcattatacactcccgactgaatatgaacactcttgaaatacattgcgaagctgcagaggatcgtcattagaattgcatgaaggtataggcatctgatggaggacatgttgtctctactcccgcatatgaaggacaaccaggacaaggtcgagtccaagcagagcaaggggaacacgccgagcaagctgcttgagctcaggagttgctccagctgcctttcttcgagattctggctgttgaccatgcgtcggatgagggcgcgattgtaccaattggttcgcagcatgatgcacatttgaccaaactgatgaatatggaaaatgaccaacctttgttgccggcaccaccagttaatctggaatcagccatccttgagcaaaatgcaaatatggtggctctcaaggaaggctgttctgtgggaagtgagctgccacctggtctgcagggtaattttggtggtaacaaagcaaacacgtgtacttcagcactgcattctattgatgaaggtgaagaaataacttgtggtttcattaaacatgagaggagttatgatttacagaatttgactatggataagtcaattcaagtgtctaatgaaacaaagtacaagtttcttgctcataagcccagagtaggctgtgaaactgctattcaaaactgtgagttggcttctgcattgccagatacagaatttcatggccctgttgcaaccatttcaactacgggtcaatcagaaggatctgacactgagattaatgttccaaactattctgacctagaagcactgatacttgatctggacctgattccatgggatcaagaatctgacttcatccaaccagaagtttcaaggtttcagtatcctgaaagcaggaaggatttgataagattagagaaaggtgtctgctcttatatgaaccgatctatcatgtctaagggtgctttcgcaattctttatggccaacgcacgaaatactacataagagagcccgaggtaagtcttgggagagaaacagaagaagtacatgttgatatcgatttgagtaaagaaggaaaggcaaacaaaatatcccgtcgacaggcagttattaagatggacgatggtggatctttctacataaacaatactgggaagttttcaattttcgtgaatagcaaagaagtaccctgcagtaaacgtataaacttaatgtcagactcattaattgagataaggaacctgaaattcatttttcacgtgaaccacgaggctgcaaggcaatacatagttcgaaaaaggagaggaagctcccaaggcgggatcacggcgtttgattggagtcagaacccatgagtagttaacgttatgatcaaggttgtttataatctgcgatagctacctctctcttcaagaaagtattggataagcgtaaagttatttataatttccgatagctaatatttctctcttccagttagcact

SEQ ID NO: 27788 - DNA, 3148 bp, Zea Mays
cttgtcccggctggagccgcggcccaagaactgaggcgagtcgcgagcgtaccctagccgccagccgctcaacacgcccgagacctcaactcccgacgccttctgtttcagcgtcctgctaggccgccgcagttcccctgctaggccgccgcagttccctctccgctccgccggatccatccctcgctctgctcatcgccccaatgccgaaaaaggtcgccatgcggcgaggtaagcccgcccccgaccaagggaagaggcggcgccacgggccgcggctgtccaaggtgatgcttcgggagctcgacgcgatggggcctggccctgcccgcggctccgatggtgaggaggacgggtccgacgcggttgccgaggacgtgtacgagtacgaggaaggggtgcccgaggaggaggccggcaagaacggccgctatgacaccgtcgccaagatgaggatgtgccttcggaggaaggcgaggatatggacgaagatgacaatgacgacggtgatgatgaggagaagcagataagaatacttcaggagacgaccggaatgcccagagaagccttcgatggaaagaagaggaaacagccatcggagctgcacctgcagcatggcgatggagatggtcctgtcacaattcatgatctcttggacaatgtccaggggaaacctggttatagcaagatccgtaagaggctgcagcagcaggagaaaaaaccgatggtcgtgctagccccacttccaaaagtagagagggacaagatcgagcgcagcgtgacgtttcagaaatccaagaatgagctaacaaagtgggaaggaatcgtgaagagtaacagggaagctcctgtactatactttgaaaatgataccaacttgggtgtgaacactgttgcggcaattgctagcgaatttaaaccaaggactgagtttgagaagaagattgctgagattacgcaaagcactgaaataatagaagcacacaagaacgatggtgccaaaatcctggaacttaacaagattgatgcagaagatgtgagagaacaccaaaaccgtcttgctaagatgcgcagccttctattccgtcatgaaatgaaagcaaagcgtatgaagaagatcaagtccaggacatatcatcggatgttgaagaaggacaaattgaaggcagcatcagcagatttcgaggcagatcctgaagctgtcacagatcatgctaggaaacaagaatttaaacgggcagaggaaaggatgacattaaagcacaagaatacatcacaatgggcaaagcgcatcctcaagcgtggattgtctgttcaagatgaaggcacccgagctgccattgcagcacagctccaacaaaatactcttctgactagaaaaatgaattccatgaaggatgattctagtagtgaagaaagttcagatgatgatgacgacgagagtgactcagaagcaaaaatcttaaacagagggaaagaaaagattcttaaagctcttgaagaagacaatgagataccgaattctggagttttttcgttgcctttcatggagcgtgctatgaaaaagcgcgaggaagcaacttatgaggaagcacgacaggctcttgaagaatacgatgattccttgaagaaattagaggacaataacactgaacaaaacgaagacaaagttaaggtgtcaggtaaaagaacgtttgggcctaccaaaaatacgcacgaagagttagtgaagaggaaaaaattacaagatactgaaaacagcagtgatagcgagtatgattctgagccagcccagcctttgagcaataatgaagtaactatgaaacatgatgatacccaatttgggagtgcactactggatgatgaaccacagaatgatatatacagaaactttactgatatcataaaaaatcctggtcctaagacaactttcgaagttggaatgttagctggtgattcatggaagaaaggtagccattctggtatcttgcggtcaagagcgacaaaggaaaggaccacagcaatgccaatgacattaccaataaatccaaaataccggttccttctattgtagacccacagcctaagcaacaggatcacaattccgattcagattctgaggaagagatggttgaaggcaacttgaccatccctgacagaaaggagagctatgaacttccatcgcaagctgatctcatacgtcaggcttttgctggtgatgatgttgaagctgaatttgagaaagacaaaatggatgttttaaatgaggagaatcctgaacctgaaaagcctgctcttgttcctggctggggccagtggacagacatccaacagaaaaaaggacttccctcatggatgataaaagaacatgaagttgctaaaagaaatagagaagaagccttgaagaggaggaaagactcgaagcttaagcatgtcattatttctgaacatgtagataagaagactgaaaagtatttggtaaggaaactgcctttcccttacacttcgaaagatgtgtatgagcagagcattcgaatgcctattgggcctgatttcaacccagcgatatcagtttctgctctcaatcgacctgcgattgttaagaagcctggtgttatcattaaaccaatacaatacgaggaggttaatccccatgagaagctcgatgaaccaaaacgtgtcattcagagagcaaccccaaaccggaatgcaaagaaagcctttgccaaacaaggaaaaagcgtaacttcacaaaagagaaagtgacgagacagtcatcttctcgtcaatggcttcatttggacaaaggagagctcatccgaattttgttgcccccgccgaatttgcacatgcatggctccaggtgtgtgcagtgattcttccctttatgaaagttcccgcttcggcgcatgacccatgggcaaaaggtttcacaccactggtttatgagagcagagaaattttggtacaagtagttctgtatttgttatttattgcattcgccacgcatcgtccaaatgagacggatgctatatttcagttctgatgatggccactggttaactagagtcacctgtcttgtatggatccccacttttcagacgccggtaaatttgtatgatttgcgaaatgttcgactgatcgaaga

SEQ ID NO: 27789 - DNA, 1853 bp, Zea Mays
attgataccagcagaaaaaaacaactcaagcctcgcccggtcgcccctccctccctccctctgccccgggtttccagggaaacccacccccagatccaaatccagcgaagcgacagagatcaaggatggagctggaggtgggtgcgccttcgccggcgaggtacctggtgggggcagcgatcatgatggccggcgtggtgctcccgctggcgtacatgatcttccgcagcaagcgttcgccttcctccgcctccgccgcggggccctcctccttctccaagcagacgtaggaacaaagggctcatctgatctgagcgagtgggtgaatcgatcgccttcccctgatgcttgtcattctgtctgttttggcaccgcgagatcctccaactgcttctcgagactgggcatcatcacgtcaaatactagctgattagtagtcagttccttttgtaccttgtgtagatcagatcgattgcttatttggctgatttgatacaattataaacaatgggtttacttttgagtgcactacttacaagcatcattcatacggatttcagtttacctaaacaaaccacttgccctcttctgctgcttggctggtttattacgataactgtgcagaatttctctctatgctagttctccctcaattccaaaatgtaagttgttttagttttgtctgagttaagcttctctaagactaagtttatagaacatcaaattggtttcgctgagaccaccaggaaatatgtcttgccacttgacagtgcatttatttggtattgtagacgttaatatattttctatagacttcatcagaattagagaattttgacttaggacatgaaaacggcctatgttttggaaacatagggaatactatgtttgtggtttaataaggagcacacttgttgtgccattcatccttttgcatcatcagctgttgatggtctagttgttgcattgtcagatctaacagcattgggattgaattcggcactgatcctgcccttctgtgtagttgtgattcctatgcgatattttcttcagtgcttccctcttcaaagtttggtttgctctcttcagtccccttctttattctattctaacggaggcctttcatgtcattcgcttccaggagctgacacatacattgttgctaagtgcattagtttgttatctgataatccacacctccagatgtgccctgtatgtttgtgttcttataagttggctcctattgaattgtctgtgttcctgcacatgaaggtagtaaacaaatcagtgtgctgccccagaaaagtcagatggatcgattgtttttgtggctacatgaagggcttgcggcttgccttgtggcttgtgatcaagatggtaattctcatggaggctactgggtattcagggcctacccttcctcagtattgaatcaaaccccgatatttaagactgtcccttctgaagttgacgtgacatgctcgagcgctggagcgcgtcgacatcaccggtttctaccctgagtgtgtcctattaaagtgagaagtacctgctggacctagcatgatgtatgtgtccttgagtcttgagaccgcaacatatcaacatcactcgaagaggctgggcacctactgatcagtgatcacataacacagatggagagaaatatatgtgttcctgttttttattttgtattctagtaaaaaaaatactagcttctacagtttccatcatcaaacgcttatcccacttttctgcctcctggatactttgtgtcacgtacgttctctattgccacttggtgatgctgcttgtgtatctcatgcatatctgaatcccaggagatatcgtcc

SEQ ID NO: 27790 - DNA, 1342 bp, Zea Mays
cacaaataaacaaacaaaccgcaaggcttggaacgagaaagaaataaagaaattgataaaacagtagaaaagcgtcttggagatggcgcgcaccgagaagctcaccagcgatggctgctccggcggcgaagtccaagtggaggtggagctcggcatgggggtggacgggaaggggatcatagagtgccggatatgccaggaggagggggaggaggccgctatggactcaccttgcgcttgcgctggcacactcaagtttgcccacaggaaatgcatacagagatggtgcaacaagaagggaaatattacatgcgaaatctgcaaccaggtttactccccgaattatgtcatccctccaccgaaatgttgttcagatgaaatggacatgaatcttaggcaaaactgggtcggacgaatcgatccccatgattcccatttcctagccatcgccatcgcagagcagcagcttctgcaagctgaatttgatgactgtgtatctgcaaattctagcggtgccacatgctgccgatccattgctttaattgtgatgttccttttgctcgtacgccatgtaattgtcattgtgagggatgttagcatgctacaagatgcaacggtgctgttcagcgcaactcttcagtttgcgggattctttcttccttgttatgtaatagctcgttcttgctatgctttgcagcatcggagacggagacaggtgtagggaggctcacctgaaccttaaggaacacaaagacgcaccaattgaagcgccgtctcggcggtaccaccgaagataggaggactacatggaagcttgcgaagtgagcctccccgttgttgcttggattcaccgcaaagcatttggtttctgtcctgaagacgtcggcggtttaattaggttgattgagtagcgagagcaggcgctgtgaagctcaagtgtacatacgttgagggggacaaggccttttttttttacagctgagaggaagcaaaatgtagcctcacacatttctgctgcaaataaaagaacaatcgcccgtcagcgcctctgaagtttatgcttggtttgggattgctggcttgcacctcgcagttgaagagtaggtagtagtagtacagggcggctgctacctgctgctgctggacaagtgcgtacagagggtggtttctgaatgggacagacgtggagtcacgggctcagtgccgctctaatgctccgttaagtgccggattgtctcttcgtcagtaattatgacattgcaatcgcctgtaattttcagtacacccatcatgaggaacacggtggcaaccctcgtcacttcgtcacttataaccatctttg

SEQ ID NO: 27791 - DNA, 1327 bp, Zea Mays
accggtagaaaaagaggtctaaggttgcgccgcgaagaggtttgcccacgcgcgccccgccccgccgccgcagccatgaagcagtcgccgtctcagaatcagagcccaaagaccccatcgcgctcggccccggagccgtggctggtggccgcggcggcggcgagcgccagcgacgactcgtgcgtgaacgacgtggacagcttcgcgcgcaccgtggccgccgtgaagtccaaggccgcgtcgtgcgcgcggccggacatgctggcgtccgtgctgtcgcactacgccgccaagtggctcccggacgtggcgcctcccacgtcgtcgtccgcctcggggcgcttcctgccgccggagagccccacggccacgtggctgaagaagcggctcctcctggagtccctcgtggccgcgctccctccggacccggcggcgggcggcggcggctgctgcgccgcggccgtcgccgacgacggcatcacgtgcgacttcctgctgaagctgctccgcgcggggagcatggtgggcgcggacgcggcgctgctgcgggacctggaggcgcgcgcggcgagacggctggaccaggcgacgctgggcgccgtgatgataccggcgttcggccacggcggcgagcacgcgccggcgctgctcctggacgtgcccctcgtgctgcgcctcgtgcgcgggttcctcaaggagggaggcggcagcaaggccggcggcggcgccgccctcgtcggcggcggcggcgcggcggccgcccgcgtggccaggctcgtggacgcgtacctggccgaggccgcgctggaggccggcctgcgccccgccgagttcgaggagctcgcgcgcgccgtgcccgcccacgcgcgccccgccgacgacgcgctgtaccgcgccgtcgacacctacctcaaggtgcagtgcaacgcgctgcaggcccaggtggacaggctgggctccgagaggcggcggcgcggcgggggcggcgggggcttcttcaagtggagcgcgttctggttcggcggcggcatgggtgccgacgtcgctagggtcgacgactccgagagcggcatggagcgccggacaccgcccaaggggaagaagagcgccacggcgacgcccaacgccaagtggcgcaagtccacgtcctgagatgacaagggtgttgtgttgaagggatggcgatcgacggccgttaattgtgttttctgctttttggatggggtttgtgattactttgagtttgaacatcatatattttatattgtgttgctgtcaactcgagtttgtgttcgtggtgaaactatcaggctggaaactgtacgac

SEQ ID NO: 27792 - DNA, 475 bp, Zea Mays
taacgtattctccagcaaagaataaacatgagaattaaacacaatcccaagaatcaacaagagtagacgttgtatgcaacacaacaaggtaaacgatgcaactagaactgatcccaaaaatcaacaagagtagatgttgtccgcaacacagctaggtaaacgatgcagctagaacttcaaataaaccaaaacttcgctctacgattggaatatcctactgttatattgggtgtaggccggaatacttttgaacacaacattcaacagacgaagcatgttcttcattttgtctctaaatattatgtgtcattacagaagcaaaccttattctggatatgctatatgatatctatgtactactatgtcatgtaaccatctataaactcattagggtggtagaacatgttgccatattttgtatacaaataaaaccatttgatttagcttgatgaaaacgtataacatcaaaaacaag

SEQ ID NO: 27793 - DNA, 2450 bp, Zea Mays
gctgttcctgtttgcgacactccctgctaccactcagccgagccgagtagccgaccgaatcggcgtctcctccctccgcagctccgtttctccgacgcgctcagccgccggctaaccatctcaattctcacgacgtcaccgcctagtcgccctcactgacgacgcggcgccatgcctcctcttcctcgcgcccgcgccatcctactaccagtccctcctcctctccctcggttccaacgacaccgccgccgcccacctgcacgcgctcaccatccgcccccacctagcgggcacgggcgccaacgccctcgccgccgcgcacgtcgccgccacgctctcctcccactccttccggacccgcctcacgagctactccgtgctcctctcctaccctgcgtaccgctctctctcactctccgcgccggatcgcgacactgtgctcttcgctttgaagcaggaaacctacgcaggcgacccttacgaggcggtctccgccgaggccgtccccaccttcctcgcctacgcggcctccggttcggtctccgccgaggccgtctacgccaactacggccgcgcagaagatttcgcttacctcgccgcccgcggcatcgacgtcaccgggaaggtcgccgtcgcgcgctacggcgaagtgttccgcggcgacatcgtcaggaacgcgcgggatgccggcgccgccgcggcggtgatttactccgacgcgaaggactacgcggccgggaagaccttcccggacggaccgtggatgccgccgacaggcgtgcaggtgggtagcacgttcaagggggtgggggaccccacaacgccgatgtgggcgtcgtcggagggctgcgagcgcctgaccatcgcggaggcgatgagctccgatgacatgccggggataccggcgctgccggtgtcctggaaggatggggagaccatactacagctcatcggcggcgatgtggcgcccgagaattggcaaggaggcgatggcgcggcggcctataggtttgggcctggcccggcagtgctcaatctgacctacacagggaatgagacgatggttactattcagaatgtcatttcggtgattgaagggggagaagaacctgaacggtatgtaatccttggaaatcaccgtgatgcatggacatttggggcagttgatccgaacagcgggacagcatccttgcttgagctagctcaacggttgtctgagctgcaaaagaagggctggagacctcgacggaccatcatcttgtgcaactgggatgccgaagagtatggattgacaggatccactgaatgggtcgaggagaacagggcaatgctaacttcaagaactgttgcttacctaaatgttgattctgcagtggctggtcatggattttatgcatctgcaactcctcaacttgatgaattgcttaaagaagctagtaagcaggtccaaaatccggacaatgggacacagagtctctatgatttgtggatgtcttctaacagttctcctttgattggaagattaggagggggaagttcggattattctgcatttgttcaacacattggtattccatcagtggacatggcgattgggtcagactatccggtctatcatagcttgtatgatgacttcatatggatggaaaagtttggagatcccttgttccagaggcatgttgcagctgcaagcatgtgggggcttgttgctcttaggctctcagatgaggagatcctacccttcaactacagcaattatgccacagagcttgagaatggagcattgggcataagtgaaagagtacagggaatgcctgtcagcttatcacccctgcacaagtcaatcaaagagttcagaaaggcagttgcaaaagtggattctgaattgaaggctctacagacatggaaaatttggtccccatggagaaacaaccccttaaaggtcagagacatcaatgatcggttgatgatgaccgaacgggcattcacagaccgggaaggactgtctggacggccatggtacaaacacctgatttacgcaccttcgctgcacaacgattacggggctgaagtgtatccaggcattggtgacgccattgagagggtgaagaaaacaaatacttctgaatccttgcaatctatacaacatgagatttacagggtctctcgagtcataaaccaggcagcgcttgttttaagtggagggctcacgtgaatgcagtagctggactgatacagtattgcatagtatggtgatattaaggggaaaaataaatttcactggcagtcattacatttgtgccgagttcttattttgattctggtacctataaattgcatattactctttccaaacttatccggttcctattttaaatcgtattctcaaaatttgtcatgggttcttatttcaaatttcaataaacactcggctccataaacttattgtt

SEQ ID NO: 27794 - DNA, 3529 bp, Zea Mays
cgtaaccgcacaaattccaccgatccccctcgccccggtcaaatcctctagcctccctgtgcccggcggcgagccccatggatccttccgtcgcccggcggcaggaggcggagcggtttatgaacatcgccgagaagctcctgatggcgcgggacctcgagggctgcaagcagttcgtcgcccaagccctttccttcgacccccgcaccccgggcgccgacgacctcctcgccgccgccgatgccctcctcgcggcccagcgtcggcgcctcccgtccgggcccctcgacccctacgccgtccttggcctcgactccgccgtcccggcctcccgcgaccccgacgtcgtgcattcccattaccgccgcctctccctcttgctcaaccgctcccaccccgaccgtccctgctccctcgccttcgccgaagccgcccgcctcgtcgccgacgcttgggccttcctgtcagatcccctccgcaaagcctccctcgactccgacctcgacgccgccgccgctgcaactaacgcagcggcagccgccgccgccgccgccgccgctcgtgtacccatcgatccccatccagagaagcagaatcagctgcagtcacagcctcctccgccgccgccacttgctccgcagccaatgcagactgtgtcaggcacgccgccaccaaagcgcgggcggccgccgcgggctgccaaaacgccggcgacgccgcctgctccgcagaccgtttcgggcacgtcgccaacaaagcgcggccggccgccgcgggctgccaaacaatcgcctgaggttgaacggaaccaggagggggaagctcaacaggcgccagtcttctggacagcttgtccctcctgctgccatttacaccagtacgaccactcctacgagtcgcaaacgctgctttgccctagctgccgccggccgtttgttgccactgcaatgtccacgcagccgcccatcgtgccaggcacagacatgtattactgctcctgggggttcttcccaatgggtttccctggtggtcctgcattcgctgaaccactcaattccccgcagcagcaggcacctgctgctctaggattttatccaatggggccatacttgccattaccaagcctaagtggcattgtggaaggggaaggcaataaggcagttgatgctggcactggcattcctgtcatcccaacagtggcagcaccagcatcagcatcatcgccagcgccgacagcggcaacaccagtggagttcttacatgtgaaggttggggcaaagaagcgagggcggcccaaaggcagcaagaacaaaaaagctgtggttgaggtaaattagggctatggaatgacacatgtgaaggttggggcaaagaagcgaggatgccctgactgcctgaaggcagcaagaacaagaaagtggtgattgagatcgattagggctatggcatgctgatcgctgcatcattcgacatctgcatcagttgtaaactacattgtgtatgtgtatgtgtatggttcttttcttgcttgcagatgacttgggcactgtaagatggtcgagggttagagcttcacctcgatagttggtcaagaatcagagcttcaccattcatgaattttggtgactaggtttttctccttacttccatagcgaagtttaccatagtagtcagttcaggtgagatctgttttttgtttgtatcatcccattagatgggtgagatgtttcatattgtagggtggcagctgctcaagtgcccattatgctgtctgcaacttgtaaagattaggagatggataataagctatgtgaatgcacattaattataaacactcagtgtgaaactgttgaaattgccaactttgcttcggcaatttggaatagtttgtcacacctcttgacttgtcgcctcaacgcgggcacaggcacagctgttgcttatctgcctaatgtgccggagtcattgccatggcacatggtactgtgatgggcagagcaagtggtgggtgcatgcacgaggagctggtgatggcagaggggatcttatgcaccatggatggtgagttgtctatgcatggcagacctacggtgagcggctctggtacagtggtctctggcggccgaacatcaggccttgtctttttggttgtgtagaaattagggcttgtttggttagaaggggattgaggggaaactgagctagtttccccctcaatcccctcctaaccaaacaagcccttattgtttttttggcatcctcaggctgttgttgatctgttttgtttgtgcttgtcttgccttgcactgtggattctttagccaacaaacactggcatgacctcagggcctgtcagagttcagcgtatgcaacataggcaagaagactctctgcggtccatgacacagggcaccatgttgtgcctgcccatctcttgcttgctctatcatttgggaatcatgccgctactactgtaccatcttggtttaaaaggaaggctaaagaatttttgactgggcacacagactgacaggcatgagtttctagcaacatcagtaattcagcatgcatgtatgtttgatcagtaggggttacctgtgatttagatgtggttcctgtttaatcgttgtcctacatgaacttggctttgaagaattgtttagacttgatcctaatgtggaatgtttgtacgttagattttttgtgtaaatataagttattgaagcattaagattgaactgttaggcatttaaatgaagaccctcttgatgtcttatgtatggttatgtttttctgattcattatcagtaagattaacataatttggtgatgagggctaaaagcttcgttttttgattttttttttcagaatctaacgtttcatgtgccaatcatgtctgcttctcccaaaacttacttcagagctgatttcaacttgcccccccctggtttagtttatttctaatttcctccttttagctcttttttatatggtaatcactattgtgtcattgccttgatgccttctatagatcttattgtttttcattgtatttaatcatcacctgttttcagggcaaaggaagagcattttctgctggaggtgatgttgctgcagttgtctgatgtatacataaagttgcactggatgcctccgaggttggaacaagtgcatgacgaagctgttgtagaatatttctccagaattgatgacccacagtgggaagatttggacctacctgccagacgttcccatggaagaaccatcgagtccaagctctgattgaaggtcacgggagaagggtggaacactggaacggagcctcggtagtggtcagtcagaataacacattacacacatcatctcgagtttgaagagtctgcagactgtttgatagaataaacatgaatgtttcatataggtcaaacttttatcacagaagaaactctttcctgtttatacgtgggagtcatatccattttaaaataattataaagaataaaatggaaacaaaaaaagtactggaaa

SEQ ID NO: 27795 - DNA, 229 bp, Zea Mays
agggtttgcctcatccaaagtaattgcgcgcaacaatggcctgcggcatgtgctcggcttcgacggtagaaagagcgacgggattttgcttctttgaagcccaagacaccaaggatcttcccaagaactggcaagtccccgatgtgctctttctattgattttacacccctcccaatcgacatccgaataaccaattaaatcaaaggtggatcccctaggataccaaag

SEQ ID NO: 27796 - DNA, 1476 bp, Zea Mays
ccagccttttgcccaaatcacccatccgcaccatccgcgagcaagctccagcgatccagccgcatgccacgcaggccctatgacgcccgccatcctcatccaggagtgcccccacccccagcgccccttccacccccgcaccgccgtcctgcccctctcccctcccacacccactcccttcctccatctccatgctcggcgccctcaccatctcccctctgcctccgctccacctccctaaccgcctccgacctaaccgcctccccccatagaccgaacgggatcttcgcgtccgacgcgcccatcgacgtggacgccgccatggaggacgagctacgggagaaggaggacggtgcgtatgtggaacgtctcagatctgccactctatctccggcaacctaggtcgggtgaggtagttcttcgatgtgatgcctgagtggaacttggtatcctagaacgagatgttgggaacgtatgcctacacagcagactccaggcgccacccggggtacctctcgcgccagatccactcatccacatgccagcaaccccgcgtcgccggcgaccgcgctccggtcgtaggctcatccacagccagcggtggagattcctcccccccagccatacaacttccacaacctcgactgtcgcaccatactcctcgtcgaggcaccgtacgcacctacttcaccctgccccctgaccaccccttcgagccggtgcccttgctaccctttccacaacacctgctcccccgcgccgcccccaacgtctggccaccgcagatatgcattcccatgctcacaccgatgcagacacagccacacgacgctaggtgcactgcaaacaccctgccaaccagcttccattgcgatggttctggttgaaatttatttttattgtgatatcttaaaatacacaaggttccggtgcttatgtattgcatctttctactgcttcttattttgctttatagttgcttcaaatggtttataggtagccccaggcaactcgaaagaggtagcagctgcactgtctcaggctttaagaaattctttagaaagaatgagcagttcagagatgcacttgcgaagcacagacttctgacaccaacgacaccattagcaaggcagggatccgatgatatgtccttggtgtcatccgtgatataaaccacttcctttagtcatgtgctattcttcactgttattcatgtgtacagttgttcctttccatagtcacagagtgtaggtttctagattttttgcttgtgaagtctacccacgctgcctcgctcttgttctttataatgagatgaaattgtatggtggctttgcgagtgagatgaaatgtatggtggctttgtgagtgaaccattgtggtttaccaagtctatttcaactcaaaaaatggcatcgggaggcaaaacaactgcaaaagggagcaaggctatgacggtaccggtagcgaaggccc

SEQ ID NO: 27797 - DNA, 2103 bp, Zea Mays
cggcgctcgacggctcccgctacggcgtcacgagccacaccgggctcttcctggcccgtggctgcctcgggaaagcggcggccaccggcaactgctccgtgtccgcgaccatcatgaaaaccgcgctccgcacggcggggtgcggcgacaaaggcgccatctggacgtgcgtggccgcgccgctgccgccgccgcagggcctcaacgccacggctgctgctgcggcgtgggacggggaggcgggccagttcctgccgtggaagaaggtggaggacgctgggtgcgaggacgcactcacgtccgcggtgtccgcgttatcgccggaggggctgccgtcggtggatttcggcgccgcggagctggggtggtggctcgacgggacgtgcgccaacgctaccgcgggcggccagtgcgcgcggaacgcgacatgccaggacatcgagacgtcgagaggcacgaggggccaccgctgcgcgtgcgtggtcgccgggatgtccggtgacggatacgccgccggcgatggatgctactacgtcgccgagcgttccgcgaagaagattgtcctcgtagttgcagcaggtgttgcggcgagcgtggcggcggccaccggcgcgcttctgctgtgctggctgcagtgccggcggcgcaaggccgggcgctcggcgtcggagcggctggcggcgatgcggctgctgtcggaggcggcgacgtcgagcggcgtgccggtgtactcgtacggcgagatcgcgcgcgcgaccaactccttctcgcacacacaccgcctgggcacgggcgcgtacggcaccgtgtacgtgggcaagctcccgggcacgggcagcgcgccggcgctggtggccatcaagcgcctgcgccgacgccaccaccacgacgaggacgaggacgcggctgcggaggcggcgctgctgctgaacgagatcaagctcatctcctccgtgagccacccgaacctggtccgcctcctcggctgctgcctcgacggcggcgagcaggtgctcgtctacgagtacgtgcccaacggcacgctctcccagcacctccactccgcgggcgccagcaccgggggccgcggcgcgttgacgtggcgcgcgcggctcggcgtggcggtggagacggcgggcgccatcgcgcacctgcacggcatgcggccgcccatcttccaccgcgacgtcaagtccagcaacatcttgctcgacgccgcgctgcgccccaagctggccgacttcggcctgtcccgcgccgtggaccgcctggaggccgcgcgctcgcacgtgtccaccgcgccgcagggcacacccgggtacgtggacccggagtaccaccagaacttccacctctccgacaagagcgacgtgtacagcttcggcgtcgtgctgctagagctcgtcaccgctatgaaggtcgtcgacttcgaccgcccgcccgccgaggtcaacctcgcctccctcgcgctcgaccgcatcggcaagggccaggtcgccgagatcgtcgacccggccctccttggcgccggcgaggactgggtcatgggctccgtccgccacgtcagcgagctagccttccggtgcctggcgttccagaaggacgtccggccgtccatgcgcgaggtggccgccgagctgcagcggatccggtccgccgccccggacggcgccgatcccgaggagcccgcggggtctaggctccggcctgtgagtatgatggacatccagatcgacgtgagcttgggcggcccggacacggcggcaaagaaggcggcttcgcccgtgtcggtgcaggaggtgtgggtcagcgaccggagctcgccgtccaccaacggctccatgccgcgctttgctgcgtagcttaagctagctagctcttgtacactgatgagaaaaaccaatgtaatttagcaaaaaaaaagaacattttttgtctagtaaaattttctctataaaaaaaccactgtacaagatgccatccattgttgtaacggaaacgtaatttactgtatagcattaccttaaattcccaccggcattagcacgaaaactgcccatggcattgctaacagggtcacgataaggcatcatttgtttcttt

SEQ ID NO: 27798 - DNA, 468 bp, Zea Mays
ggtggactcagggtcaaatccctccccaccttgcctttataagttgtgcagcaaacgttatacggctcctcttccacctccgtgagaatcaccgaccgatagcaccgtgtgcgggagagctatgaggaaaacgtgaagggaggctcgccattggtgattcgtggcccttggggaaacctggtcgtgattgtggcctaggggaagaccacggagcacgccgggcgcatacgcgaggaaatcaagggctgatcacccatgctgcggggcggattactcaccggtgaacaatccacgtcgcttggccgccaatcctcgtcggtagggcgcatcacttcaaaatcggagacaagcaagctactgaggacccaggtgtttagtaggaggaaaaattattgggcaggagctcgttgaaggcaagttgtacccttgatcacttctatttactcaataatgctcctgttaatcatt

SEQ ID NO: 27799 - DNA, 672 bp, Zea Mays
ctcgtggatgatgccggtatttttaccgaggtatccggaactgtgtaaggtcccgactaatcctcgttggtgcccctacgcaaagggaagcccacgcgagggccaagcacttcggtcgagtaactccgtaaagagccgcgggccttctccacgcgcaagtggtgctccgcttccggctcctctcggacgctccccgtcatctccactatcgagcttccggccgaaacgccgcgggcctcgtttcctccggtacacggtggcgaccgtgacacaaacacggttgtcacggtctcgcaagactctcgccccactcggtacaattacaacggctcgcgcaagagccgagggttgtgtggttttacaaaactcacccaactaactagggatcacctagagcaagcactaaagcggtctaactaacctatgcacttcacaaagcacctacgctaatcaccgagtgattctattaagcacttgggtgtaggagcacttgggaatgtctaatgtatgccttagtatgtctcttgggctcccacacttggaaatggccggttgggggtgtatttatagccccaacacaaatagagccgttggagaaaagctgctgcttcttgcggcacaccggacagtccggtggtgcaccggacaacgcactgtagcctgtccggtgcg

SEQ ID NO: 27800 - DNA, 1849 bp, Zea Mays
cgacctattttgacaaattcctccaccgctcatcctctcccgcgcgcttgcccctttccgcttggccttccgcccctcctcttctccgcacggagcgccgccacaggtgattgctagggtttcggggccgccgcctgcagcagccctaccgccagcgctcctacgcctgtgtccctgttcctctccgtcccgttctgccggcgtaccacggctgacggccgacgccctgcagatccagcaaaggcaacgctgagatccctacgacttcgaacggcctgtgacctgtggatctgtgccagcctgttggtcgagctacctgctccagaccgagcagcccgtgttaaagctagctaaggaaacagggcctaagtgagctcagaggaaaaaaaggaacgcaatggaggaagggaacgtgcgggtggacctcgacaagctccccatcaagcgccttgaggccattgaggagactggcaacgagcactacccaccgtatttgatatggtgatccgggagacgtttaaccagtctcaaggcatcaatgttactgggatgtgcgaagattttctccaattagctattggccaggagtgttcgttgtgcctttcgcttgagctctctggacagaacaataacgcaggaacagtaggacagcaagatcatatggatacaaattatcctggaaatcttgcagtagccactgtaaatgggaaggagtcctcaaataaggatgtgagagggtttcctaaccccaaaagcttagaaatctacctgctccatatgttccatgaaattcttaggaaactcagggagaaatctcgtcatgtggttcgctaccagagttctgctcaggctgcacctgacgattgtggcctgctaagccatttttgcatgacagtggctcacaggatattttctaacaaagtacatttggagctggaaagcgtggttagtagggttccttatctccatctgcgttcccttcctacatggcattctcgaacttcttcctggtctctctgcttgaaagttcctcagcctatcctggccaccggtcgagtcacaaagccttcagactatcacgagctgaagtacaaatccaggtcgcagtttagtacaaaggtgatcttgaaagatggccaaattagtttaatgggtgagggctccccaagcattgttgggtccttgactgggaagccatctgattcacgtctgataaatagttacaattgtgacttggaagacctcccaatgatgcttctgcagcaggtcgccagtcaagtaatccactggctccatgatgaagcgatgattcttgggatgaacgtgaccagagatttcctgtgcctgtactttgaccttggccaaggcgaaacacttggtctattggcacatgtcgacccggatgacacctatggctgcatctcatggtacctcactgttgaacacccaatggaggaggggaagatgtcagctggcagtccagagtcagagaagcgaaggtttttggggtacctttccctggaagtgctttactctaccctgatggacctgataaaattgtgcagcacaagtgatcaaattcgtgcctcttgatcgacataagtggatgaaatgatgtatgtccgtgcagtgtttaagagtatgtaaattgaggcattatgtgcaccttttgtttgctaataggatgtttggcttgaaaaatggagtccatcctctcactcttcagtatgtttgtttggttcatgaatgaaataagctgatacatcaccatcttatttcactaagttaataattagtattagcatgtggaataaagttgtctcgctactctattaaaaaaaagttccag

SEQ ID NO: 27801 - DNA, 176 bp, Zea Mays
gttcatccaaagtgcaggactcgctcttaaaagaagacttgccattatatgtcctactcagttagggaggaaaagaaggggaatgctggggccaactgccaagatgaacctctcaattgacaagcgatgcaggataaataatttgtccacaagcatgattgcattatcccagattt

SEQ ID NO: 27802 - DNA, 5079 bp, Zea Mays
  misc_feature (1)..(1): n is a, c, g, or t
ncccgtctccgtctccttctcctcctccccgtcgccgtctccgagtctccctctatttctctccgcccttgttcttctcctctctccctctatcttattacctcaagtagaagtagtatatattttttgtccgccttttcaatttttccttttatctccctgcgtctcttcgtcgtcctcctgctgtggcggccgccggcgatccccgatcggcgatactcagattctagttgtccattgtgctgcactgcagcagtagacaatcgtgtttttcggtgttttgtctgtctctccttgatcattcagatgcctgtacagctcaactgctatagctagctgtatatatctggttgaagaggactaatctagcaacaatgtcatcgcttcagttattgcaactaacagaacgggggcgcaaccttttgtcttcaagaaggagaacacttgcaattgtttctggtgcagtacttgctggtggagctttagcatatgcgcagtcaggtcgatggaaaaaacaccaggaagcaaattcttgcagtgatgcaaactcacatagcagtaataacggaagaactagtcagaacggcattgatggtaaattggttaaaacaaggaaaaagaaaagtggactgaagtccttgcattttttggctgctattttacttaagaagattggcccgaatggaacgaattaccttattggcttgatactaacagcagtcttgcgtacagctgttggccacagattggcaaaagtacaaggatatttattcagatctgcattccttcggcgtattccgacctttacacgtctcattattgaaaatcttcttctatgctttctccaatccacgttatatcagacatcaaagtacttaacagggtctttaggcctgcgcttcaagaaaatcttgacagatcttgtccatgctgattattttgagaacatggtgtactacaagatctcacatgttgatcatcggatcacaaacccagagcaaaggattgcaagtgacataccaaagttctgctcagaattaagtgaccttgtacaggatgatctggctgcaattgtagaagggttaatatacatctggcgcctctgctcttacgcgagtccaaaatatgtgttatggattctggcatatgttataggtgctggtggtacaattagaaaattttctcctgcttttggcaagctgaagtctacagaacaacagctagagggggaatatcgtcaactccattcacgattgagaacccatgctgagagtgtggcgttttatggtggtgagaacagagaagcatcacatattaagcagcggttccgggcacttgttaaacacttgaatgttgttcttcatgaaaactggtggtttggcatgattcaagattttcttctgaagtatcttggcgccactgtgggagttatcctaattattgaacctttctttgcggggaatcttaaacccgaatcatccaccttaggacgggcagagatgttgagcaatctccgataccacaccagcgtgataatatcactatttcaatctcttggaaccatttctattagttcaaggcgcttaaatattctcagtggctatgctaatcgtattcatgaattactggatgtctcgcgtgagctatctggtggccgtgatagattgattactcaaaattcttctgatggaaattatattagcgaggcaaattatatagagttttcagatgttaaggtggtgacaccttctgggaatgtcttggttgataatttgaaccttcatttggagtcgggctctaatctgttgatcactggtcccaatggtagtggaaaaagctcccttttccgtgttcttggtggtctgtggccaatggtatctggtcatattgtcaaacctggtgttggttccaatctcaacaaggaaatattttatgtgccccagagaccatatacagctgttggaacgcttcgcgaccagttaatctatccactcacagcagaccaagagactgaaccacttagctatggtggcatggtggatcttctaaagaatgttgatctggaatacttgctagaacgctatcctcttgataaggaagttaactggggtgacgaattgtctcttggtgagcagcaaagattaggaatggctagactgttctatcataagccaaagtttgctatcctggatgaatgcactagtgctgttacaactgatatggaagagcgcttctgcaaaagggttcgagcaatgggcacatcttgcataacaatatctcaccgtccagcattagttgcgtttcatgaaattgttttatccttagatggtgaaggagggtgggatattcaggacaacagaaatggttccttctctcccgaagttgagtttgatgtgctgaaggcatcagaaagtgatcgcaagtctgatgcacttaccgttcaaagggcttttatcaccagcacaaagggaaatgcgtcaatgaagcccaagaaacattcttattcaacagaggtcatagcatcttcccccagtatggagatagaacatacagtacaatcatctattgtcacacaattgcaatgctctccaagacctttgcctgtcagagttgctgcaatgtctcaaatactggttccaaagctatttgataagcaaggagggcagctgcttgcagtggtacttcttgtattctcccgcacttggatttcagaccgtatagcttcattgaatggaacaagtgtcaagtatgtcttggagcaggacaaagctgccttcattcgtttggctggcactagtgtgctgcaaagtgcagcaaattccatcgtgtcaccctcactgaggaaccttacttcaagaatcgcccttggatggcggattcgcatgaccaatcatttgcttcaatattatttgaaaagaaatgctttttacaaggtatgagtatggatgcagatcaaagaatgacacatgatgtagagaagttgaccaatgaccttgctggcttgcttactggtatggtgaagccattagttgatattatttggtttacatggagaatgaagcttttgtctgggcgaagaggggttgctatactgtatgcttacatgttcctaggtcttggttttctaagagctgtgtcccctgactttggggatcttgcaaaccaagaacaagaacttgaaggcacgttcaggttcatgcactcaagattgcggacacatgctgagtcaatagctttctttggtggtggatcaagggagaaagctatgattgacgctaaattcatgacattgctcaaccactcgaaggttctattgagaaagaagtggctttatggtatttttgatgattttgtgacgaaacagcttcctcataacgtgacatgggggctgagtatgttatatgctttggagcacaagggagaccgagctttgacttcaactcaaggagagttggcacatgctctgaggttcttggcatctgtggtgtcacaaagcttcatagcgtttggtgatattcttgagttacacaagaagttccttgaactctctggtggtattaacaggatatttgagcttgaggagcttctacaggcatcacaaagcaatcctgtcatgccttctgatgccacaaatgccggttccgaagaaataatttccttccgtggcgtgaacattgtgacaccatcgcaaaagctattggctagccaactgtcttgtgatgtatctcaagggaaaagccttcttgtgactggtccaaatggtagcggaaagagttccatctttagggtgcttcgaggcttgtggcccattgcttctggtagtcttagcaagccatctgaaggaatttttaatgttcctcaacgtccatatacttgtcttggaaccttgagggatcagatcatataccctctctctcacgaggaggcaaagttgaagatgctctcaggcgaaacaagtgacaagtctacagcttccgagctgttggatgatcacctgaggacgattctagagaatgttcgcttgctgtatcttctggagagagaaggttgggatgctaccactaactgggaagatactctatccttgggagagcagcagaggctggggatggctcgtctgttctttcactgtcccaagtatggcatcctcgacgagtgcaccaatgccacaagcgtggacgttgaggagcatctgtacaggctagcaaccaacatgggcataacagtcatcacatcctcacaaaggcctgctctgattcccttccattcgttggaactgaaactcattgacggcgaaggaaagtgggagctatgttccatccaccaataaccgattgccatcaaccagtttatttatgttcaccggagtagggtatttacaagttgcaacgcacagaggaaaaaaaactcgtccactcgggtgtagagtgtgtgacggagtcttttttttttttggtttcccttttcttttctttttctctcccctttgatggaaatcttgcgatacggaaagggagggaggaaggaaatatacggcaggaaaggaaagtattaggagaggttatagatgcaggcttcgtcatttgggatagcatagtacatgttcctggcatgatatgccagcctgattgatttttatacgagatacagaataagttaaaataaaaatggatatggcacaaagtgtgcccttgtaaattaaatgggaaactaatctataggaaattcatcctctctgtgtcgcccttgcatcgaacgtatcccaatccatatgtaatggcctaatgggaagataccgtatgcaatcactcatatttgcgagaaaaggaatcggcaattaaaatactacacattctgtgaggttgtggtgtttggaattctagtttatgctattttagtggtaattatctacaatgttctagaagcaagtcacttttatgatgcgcccgctaacaaggcaagggtattttatagttagaatctaattgacggataccgtacgacaccctaactaaatttaatactcataaaaaataaatttaatatcaaagtactcataaaaataaatttaatatcaaa

SEQ ID NO: 27803 - DNA, 3490 bp, Zea Mays
aacagacccgcagtgcgttcgccccttacctttttcttgtccctttcacggtttcaccccgcgttcgctctctctcccgtggcgacgactgggcggccgccgcagccgccctagcccggtgcggctcttcgtcgggtccttcgccggcgacgggcacctaccaggatgaagacgaggatagtgtactccagggagtttctgctgtcgcttggcgagttggagcattgcaagaagctgccccctgactttgatgcagcgctgcttagtgagctgcaggagctgtcagcgggtgtgcttgagagaaacaagggctactacaacacatcccagggacggccagatgggtcggtgggatatacttactcttctcgtggtgggaacactggagggaggtgggatactcgctcatctggatcaagtgatcgggatggggaacctgatcgtgagtctcagacacaggcagggcgtggtgcaaaccagtacagacgcaattggcagaacacggagcatgatggcctacttggccgtggtggtttccctaggccatcaggatatactgggcagttgtcatcaaaggatcatggcaatgcgcctcagctaaacaggacatcagaacgctaccagccaccacgtccttacaaggctgctcctttttcacggaaagacattgactcgattaatgatgagacattcgggtcttctgaattatcaaatgaggatagagcagaagaagaaaggaagcggagggcatcttttgagttgatgagaaaagagcaacataaagcagtgctaggaaagaagagtggtcctgatatcctgaaggagaatcccagtgatgatatattttcaaagttacagacatctactgcaaaggcaaatgccaaaactaaaaacgagaagttagatggttctgtagtatcctcatatcaggaagataccactaaaccatcttcagttctactagctcctgcagccaggccgcttgtcccgccgggttttgcaaatgcattcgctgacaagaagcttcagtcacagtcgtctaacatcacacatgagccgaagctagaggatgaccagtcagcaacagggttcacatctgaaagtaaagagaagggagtttctggtaacgatgctactatgggtccaaagcacacgcttccacctggtagtgttacctcttcagctgaattggcttctagcgttctgaaagggagcgaggattgggatgctgatgtaatggataagtattctattggaaaagaaggcaaatctaaaaatattgatccagttaggaaggatgattcagtagcaatcttagaacagttctttggcaatgttttatcgaaaagcggcagcaacctaccaacttatgttgagaaccagccattgaaaactgatgatgacatgatcacttctgtgccagaatcatccaaatttgctcattggtttcttgatgaagacttgaaacctgcagaagacttatcttcaaagagcctgctctccatgattgtcaaaaatgaaaatccaggtctagaaaatttaaaccatactcctttatctgatgctgctgcccagaatttatccccaagagcacctattgataaacttgattctgcatcagagcttatctcatttacatcctctacgcctgccaatggagttcttgaacaatgcatccattctgatgttccagaggcagttcctattatgacatgtgaggatcttgagcagacgatgttagcacaggttagcaatagcagctcaactcagataaatgctacaaaggagcaactgactgttatggatgaaccagttgccatgcagaaagtaactgtagataatcatgcatcacaacatcttctttcattgttgcaaaaaggaacagataataagggagcaccttccctgggtttccagagagaatcaactgatgaacctctgagtgttgacacaaatttaatggcaaatggtggaatatctggaagtgatccggttaacagtgttgaaaatgttcctacttctgggaaggacttgacattggaagcgttattcggggctgcatttatgaatgagctccactcgaaagatgcaccagtttctattcgaggagccacaactggtggtcctactgagtttgcagagatgggtaaaactctgttgtcatctagccatgaaggatactaccctgttgaacagaccgtacacttcaacaatactaaagatgctgctgtccgtagagaaccaggtattgagcattcagcagtacctggtctaagtcaggggagtgctagttttgacaagaaaggaatggaaattcatctgcctgaagaagataatttgtttaccatgagtgattctctgcttggtcaaaattctgatattttggcatcagtaggatccagcagggttgaagggctattgcctgaaaaggcacttgataacctcagctataggtttcaaagtcttgtgcctggtgatgcagaacacattcaagtatatggtcctgatgcacttggatctcatcctcgtgattctcagaatatgtatcatcttctacagggtaggcctcctatgatagcacctcaccctatgatggatcacattgttaataggaaacagccagctccatttgatatggcacagtcgatacaccatgattctcaccgttctttcccatctaatgtgaatcatatgcaacataatcttcatgggccaggggtccctcacttggaccctgctggacatattatgcgacaacacatgtccatgcctggaagatttcctccagaaggcttgccaagaggtgtccctccatctcagcctgtgcatcacatggctggttatagacctgaaatgggtaatgtaaataatttccatatgcaccctcgccagcccaactatggagaatttggattgatgatgccaggtccagaggtgaggggcaatcatccagaggcgttcgaaaggttgatccagatggagatgtcagccagatcgaagcaacagcaggtgcaccaccctgcaatggccgctggccgtgtgcctagtgggatgtacgggcacgagcttgatgcgaaattgagatacagatgatggatgcctggatgcttcactccgtacagaggacctggagggttgtagcatgtacatctgaacgggtgatggaacggagtgggtctaagatctgtaggagcggaagtctaccgggaaaaggggttatggtgtgctgaatggaagacgtggcgtcgacgtcttagcagccacatgtgtaatgacgttttctgtctactgtttctgacgactatgcagtttccattttgtataagctctgttatgcaaaaggaaaaaaaaagaagaaaaaaaactgagtcagattaacagattggcgacagtgtccgcttgaccctatatcttcaacttgtttgaaaggaaatgaccacgcgtcatgccgagacgtttgtagctgatagcactgtttgagacgttttgc

SEQ ID NO: 27804 - DNA, 2349 bp, Zea Mays
tgatacatttcgcccaacaacatgtgagagcgagcgagaggtattattttgagggagggagttccctttctctgctctggcctccatgcatataacttgctcagcaggcctagttctcgcagtcggatcctcatactgcaagaaccctctctctctctctctctctctctctctctctctctctctctctctctctctctctctctctctctctctctctcatctttctctctcaagacacacaaaaggaagaagggagcctccaagcagacccctgctgtatagctgctgcagcatgcgcgaatcctaactgaggactaggccaacaatacatcgcaatgaagtacatgaagctcggttcaaaacctgatacgttctataccgaagaagcagtcaggtcagtcgtatcagacatacccgccgatctcattatccatgtaaataacaccaagtatcagctacacaagttcccactgctcctcaagtgcggcctcctgcagcgcctctgctccgacaccgacgacggcgatgaggagccggtgcccgtggcgctgcacgacatccctggcggcgagcaggcctttgagctgtgcgccaagttctgctacggcatctccatcagcatcagcgccgggaacctggtgcccgcgatgctggcggcgcgcttcctccggatgacggaggccgtcgccaagggcaacctggtggccaagctcgagaccttcttcgactcctgcgtcctgcagggctggaaggactcggtcgccgcgctgcaggccgcgtggcggatctccggctggaacgagagccgcatcgtacagccctgcatcgactccatcgtcgagaagatcctcctgccaccgtccaaggtcacgtggtcctacacgtacacgaggccagggtacaacagcacgaggaaaccccaccagtccgtccccaaggactggtggacggaggacatctccgacctggacatcgaggtcttccgctccgtcatctccaccgtgcgcgcgtcgcggctgctcccaccgccgctcatcggcgaggcgctgcacgtctacgcgtgcaagcacctcgtcgacccgctccacgttgccagcgacgcaggactgaccgccaacggcgtcctccaccagccgccgcagagctcagacgacggcgaggagaagctggtggccatgcagcgccgcgtgctcgagtccatcgtcaccatggtcccgggcgagccggggtcggtcaccggccgcttcctactaaggctgctgcgggtggccaactacgtcagcgcgtcgtcgtccacgcgcgcgcagctgatccggcaggccggctcccagctcgacgaggccagggcggcggacctgctcatcccgctgccatcggacccgcacgcgtacgacgtcggcacggcggaggccgtgctcgagcacttcctggcccagttccagcggcccgcgccgaccgacgagcggcgtcggatgagcgccgccatggagaaggtcgccaggatcttcgacgagtacctgcggaccatcgcgctggaccgcagcttccctgtcggcaagttcgttgacctcgtcgaatgcttgccggacatcgcccgcagtgaccacgacggcctctactacgccatcgacatctatctcaaggagcacccggagctgagcaaggcggataagaagcggttgtgccggctgatagactgcaggaagctgtcgccagacgtgcgggcgcaggcgatagccaacgaccggatgccactgcgcaccattgtacagcttctcttcgtcgagcaggagcggaccatcggtgcagccgccggcagccatgctgcttccggtggcgccgcagatcgggcctccgtcggtgttatctcccagctcgcggcgggaaccaaagatgaagaaccagcctcgtctgctggccacaagtcagacgtgcacagaccacgccgggaccatgcccgggtagccgatggagcctctgccatggcgaggtcgctgtcggcgtcaaccaagactccaccggcagcgaggaaggagaggacgccggaggagacggggagcaggatgaggaacaagcagtgaagcccagtgcacaatttgttcatacttgtgattcttgattatattttttttatttcagtgcatcccatttttggtgggagatgtaagaggtagatttttgtaattaaaatggataaggagttaataagtggctacgtgcagtcatgctcatataatctagggtagctcaccgatgaacaaaggttcgtgttcatcacattcttcctccggcagaacttatgtttgcccatgcatcggcagcctacgaaaaatcagccaatttaac

SEQ ID NO: 27805 - DNA, 2833 bp, Zea Mays
cgctgtagttgggaagagggctttccctctttctctctcctcgtcatccccagcgacgaaaagcgtctcatcgcctttctctctcctctctccggaccggagcctactctctccactagagagcgcgggacctagcacgagtagagggagaagttgagggggaggtcgtcgccgccgccgccgccgccgccgccgccgccgccgccgcgaggtcaccgtcgtcgccgccgccgctgcgatggctcgcctgttccgcgagtctcgccgcgactcgtcccactcctcctcgtccaacggcttcctccctccggcggcggcttccagcccctcttccgcctccgcgatcccctcgccattcccggacctcggggtcgccctctccgccgcagacctccgggaggccgcctacgaggtgctggtcgcggcctcccgcaccacgggcgggaagcccctcacctatatcccccagtcctcgtcggtggccacggggccgccggtgtccccggcctcctccgcgtcctcggcctcatccgcctcgctccagcgctccctcacctctgccgccgccagcaagatgaagaaggcgctcgggctccggtcctccgcctcctccaagggtgtcggcagccccgggagtggcgggaaggcggcgcccccgcggaggcccgccacggttggggagctcatgcgggtgcagatgcgcatctccgagcccgccgacgccaggatccgcagggggctcctccgcatcgccgccagccagagaatggaagaagcagattcaaaacggtcatcaagaaaccctactccagttctttctatccttgcgaaggacattggtgacctagctacaaaggagaaaaatatctacagtccaatactgaagacatggcatccactcgcttcaggtgttgccgttgcaacccttcattcttgttatggaaatgagctgaagcagtttgtagctgggcttacagagctgacccctgatacagttcaagtacttaaatcggcagataaattagagaaggaccttgttaatatcgctgtagaagattctgtggatagtgatgatggaggcaagtcacttatcagagagatgccgccatatgaagctgaaaatgcaattgctaatctggtgaaagtgtggataaaagatagagtagacagactcaagggatgggttgaccggaatttgaagcaagagacctggaatccaggtgccaacagggataattttgctccctcttctgtggagatgcttcgggttattggtgaaacattggatgcatttttccaattgcctataccaatgcatccagctcttcttcctgatctgacagctgggctcgacagaagcctacaactttatgttgctaaagcaaaatctggctgtggaacacggaattcttttatgccccaactacctccactcacacgatgcgaggttggctccaagttattattcaagaaaaaagagaagccacaaaatctgcaggttcgagtatcacaaaatggagcagcaaatggaaatgatcccttgggccttcctcaactctgtgttcgcctgaatacacttcagtacatccgtggtgagcttgagaacatagagaagaagataaaaacaagcttgcgaaatgtcgagtcagctcaggcagatgtcactgatggattggacatcaagttcgagctttgtcaggcagcctgtctagagggcattcagcagatttgtgagacaactgcatataaggtgatgttctatgacttgggccatgttctctgggacaccctttatgttggtgatactgcatcaaacagggtggaggtactgttgagggaacttgaccctgtccttgagacgatatctggtatggtgcacaacaaagtgcggaaccgtgctattactgcactgatgaaagcaacttttgatggtttcttgctggtgcttcttgctggtgggcctttgcgtgctttcacccgccaagactctcagataatagaagatgacttcagggccctcagagatctgtatttagcagacggggatggtttgccagaggaattagttgacaaagcatcctcccaggtcaagaatgtcctacccctcttccgagcagactctgaaagtctcattgagcgattcagacgcatgatggttgaatctaatcggtctgcgtccaagaacaggttaccattgcctccaacaacggggcattggagtccaaatgagcctaacacagttctgcgagttctgtgctaccggagtgatgagacagctacaaagttcctcaagaaaacttacaacctaccgaagaagatatgacttgtgggatagatcacaaaccacatgtacattttcctgtcagtataaaaaggtttctctatgcctgtcacaatctctggctgaggaccgaggaaatacccactaaactttccacagcaaaggcgcctcctcaagtgattgtcaacaagaaggtttattctgtggtgctggagagatgtgactgggtgttttcggtggttcgtatcatggataggtttacttacagcttgatttgttcattatattatatatgtttgcctaatctagttcttttgctgaccttgcgctcatgtaatttgattcattctagtttgcgacagctatacccagcgtgtgaataagttgtgtactcgcgtgatactgtctggtgcctttgatgtgacaatatgaggagcatttgtatatttttactgcatcgtgcactccccactactttggtagttttctgtcatatccttgattccttgttgggttgaacgttctttggttatgcaactatttcaatttgca

SEQ ID NO: 27806 - DNA, 2309 bp, Zea Mays
tattatcggacgaggagtaaccatccaatcagacaacacttcatcgacgcaaggacgcatgacatcgggcaattttaccgaaccatctctctcttgtcttcctcccttgcttttagccaagctacgctagcgtctgaagacgaaggaagctacagcggccgaggtccccgtttctgcgcccaccgaggcgtcgcgcatgcggccacccgcacccaggcgctggcacgggggagtgaggtgtggaggtcgagcaatggcgggcagccttcgccggcccgtggatctgtaggcgcggcgcggggggggggtgttggctggtgcgcgatgggatctgggagcagcaaggccaccacctcctcctcctcgcccacggcggcggaggcgggcggcgaggttaagaggccgaatgggagcgggaaggggaggagggggaggagcctgctgccactgccgagctcctcctgcttccgtggctccacgacgccgtgcgaaggcgacgctgccgcagcagcggtggacttcgagggaggggagactgcaagcctgacttcactcactcacactgtaaagtctcatgaagatgttcttgcaatgcctaaatctcatcccagtgaaggggaagcaccaccttcatcagatagcgaaagagatcaagatgatgatgtgctacagaatgctgccactagcacatcaacagcggccaatcaattgccaaatccttctaggaggtcaaggccacgttttggtgtcaactttggcttgagtagagcggtcagcttgggttcatcagtagcctgctctattctgtcatctggcctcccgccgtctgctaatccaggtgaaggtcggggagatgtgcatgactcttctgagacaggcatctcacagcagggtagtgcaccgacttctgggattgattcaactctggatatgcttagagatagtgtcacggcacaagctagagcagctcatcaggctaggagaaatctgatagaatctgaagatgctagcttcaggagctcctacagaaggatggggtctcatgaaccttttgaaggcagtgtccggtttagccgaacattaagtgttgggcggcttcgggacagagttctcaggcggcctccattctcagatgggctattcaccccttcacttctttatgatagggcagtatggccgtctggaaatgctagtgctaggcaagattcagcagtaatgcaaaggactaattcagacaggagttcagaaccacggtctgatccttcaaccagcgatatgtacaactcgagctctgagaggcaggctagcaacggcgatctactggagcgcagatcagcttttcttgagaggaggaggaggataagatctcaggtcagagctctacaaaggttgggcagcaggtttgaaaatttatctggtcatgagagatcctgcatactatctggtcagcatagaacaggaaattgcaactgcagaacaggtagtcgacaaggcaatcctgatgaagaaactagcacaagggctagcatatcgagaattgttatgttagcagaagcactttttgaggttctggatgaaattcaccaccaatctgccgcattatcgtcatcaagaccatcattttcttcaattggatccgttcctgctccaagggagattgttgagcgtcttccttcaaaagtgtataggaaaccattgaaataccagagcgaggaagcagcacaatgctatatttgccttgttgaatatgaagagggagattgcctccgtatacttccatgccatcatgaattccatctaacatgtgtagacaaatggctaaaggagattcacagggtttgcccactttgtcgtggcgatgtttgcagatctgatgcacccattggaaagaccagctgattctgtctcttgagaatggagcttcttacagaaaattggagatcttggcatggttctcatccaattccgatagaaccgccaaacttctgcagctgttattttcatttccccctctcttaatggtcagtacagcatcgcagtcatcctattatgaaactgatgacgacatgccatggtgaatttaggattcttgtgtggtggggcgagtttgttgataatggattattggcttccgtttgggcgattgatgtcgggtgcagccattctggccaactttggttccacgtgtttcctactatttgaacaggggactaaaatcttcaaagttaccgtccttttctaagacgattaggtcttatataactaggtgagtgcccgtgcgttgcgacggaaccatataataacacgat

SEQ ID NO: 27807 - DNA, 2144 bp, Zea Mays
atcgattacagcactagcccccccgccggccttaatgcccgcgcgccatcacttgctggggggagctctgccgagacacgcacgctgctggagataggcatccagacacggcaccaccagtccaccaccaccaccaccaccaccgtgacgtgagtgcccgagcgcgcggccgccatcaggctcccccgtcgtcctcgccgggcggctaggtcagagccgggagaggcgggggccggcggcgctaggctaggctaggctaggcagcggcgtacgtgcgtggccgccgcgcgatcggcatgggcgacggcgaggcggcggtgccgagcaggttccgcacggtctgcgtcttctgcggcagcaacgccggccgccgcaaggtgtacgccgacgccgccctcgagctcggccacgagctggtgcggaggggcatcaacctcgtctatggcggcggcagcatcggtctgatgggcgtgattgctcggacggttcgtcacggcggctgccatgtcctcggggtgattcctaaagcgctcatgcctattgaggtaagtacatgtggattctcctcgctccaagatctgttcatgcacgcacatgatttgtcgctgggttaaattcaagcatgtcccatattcatgcataattcagaaaagcttcacctacaactagtcaactacgatggggattcagtgaacgactgctgagcttcttgtctgtccaccagtcgttcggttttgtcatgtcacccttgttggtgaaagattttggcaagctaggactgctagtattgattttctctctctctctttctcttcctactagcagaaggttcctgtctagctagttatatatatagactttactactttaggtgtgacaatttggagtctcggttcagctgccgtctgaattcagtactactacaacacacgtgccaggtagactctgtcaagtagaggatgcttttctagtcctttttttcctttgtatgtataactagggttctgtactcctgcactacactagtacagagtggttccctattcgaggcgagtggcgtggtggtgttttcacctctctttttgccctcccttttccatcgttaatcctcctgttgctgtcctctttgttcgtttgtgtgtgtgttgtctggggctggctctgtcaagtgtcaggaaccggaacagcgtgtgtgtgtgtccaagccactgagacagaaatgcagatctcacagtaatgtatacgcttggttggacacgacggagatttacagtggcattttttacacggctgtcttttacgcttgtggcagatatcaggtgaaagcgtgggagaggtgagggtcgtggacgacatgcaccagaggaaagccgagatggctcgtcagtcccaagccttcatcgctctcccaggggggtacgggacgatggaggagctgctggagatgatcacctggtgccagctcgggatccatgacaaaccagttgggttgctgaacgtggacggctactacgaccccctgctcgccctgttcgagaaaggcgccgccgagggtttcatcagcaccgactgcagccagatattcgtctcggcgccaaccgcgagcgagctgctcacaaagatggagcaatacacgcgggtgcaccaggaggtagccccagcgacgagctgggagatctcggagctcggctacggcagaggaggagacgccggcgccgccacgccgccagcagcagcagcaggaggagcagaagagggaaaaggcggctcgtagcacccacatccatctcctgaagcgttaccttcctccacctactgcttgctgatgtgatgacgcgtctgttacggtttcctggcaaatttgtttcgtcaaagtcgacctctccaaagtccaaaacccggttgaaccaggtgccgggtcgggacgtactggggagacgacgatgatatctctgtgttgggtgcttggattgtgtaagcttgctgctgctggtactattcttgttttctttactttttccccggtgtgtggtgcttgtggaaatggaatctgtgctggtgcattgcagtgcagctaccctaccccgtccccggccccggggacgcacgcgacgacgtcacacacaggtgcgcccggccactga

SEQ ID NO: 27808 - DNA, 4653 bp, Zea Mays
tgttttccttaaacaaaaccttatctggtcgtgcgcactgcgtgatgccatcgcgagcgatctttttcaccgggacggacagctaaagtagctgtggttgtgggatatggaagccgaagtaagcgctccagccgatcttaaggcgcctgataagacgacggtacacggtgatgacaaagaaaatataccgaatggtaatgcaaatttgcaagtgaaggaagccgacaatgatgaagacgatggaacaagatctgatgggtttgagctgatagatgtgaagcaaaacttcgattcagcaagagtggaggaagagatggccgctccaagaagtactacagtcgatacatctcctgttacagaagaaagtgaaacacaagaagacaaaacaacagcacatgaagaacaatcagttgcaacaaacacaagacatctagagtcctcaatgttgaaccaacaaacagaacaattggaaaagctgacaatgcgtattgaggagcttgaatctgaaaatgacaaactggtaaaggacttgacagaagcagaaaataagcagagcctgcactacagttgtctacaagaagctcaatgctctcttgcaatgaaagataaggagctggctgaagtaacagagtcgctgaaagatctgggttctgagcttggaacctcaaaaaagaggattcaagaaattgaagctgaattggattcatcagcagataagctttgtaaacttgaagagttgaaggatgaaagaagcttgcatgctgcacaggaggcgaagagggcctcagaacttgataagatgctagaactggcacaatcaaacatgaaagaaatggaaaaacatattggcagtcttcaagaagaagtgaagggttatcaagacaaggccgctgaccatcagcaaatagaagaatcactgagaaacacaatctcagaactcaaggtggtacaagaggcattggagctgtcaaagtcacaagtggaaaatttgaaacagaagcttgcctcacaggacactgatttcagtaaactaactgaagagttgaatctccattgttcatctgaagaatcccttaaagagaagtctcttaaactagagactgaacttactactgtacttgaagaactacaagcaaagggtgggcttgacaaattgaaggatgaaaataaaactctccaagggtcacttgttgatcttaactcaaaactttctgagaaagattcaatactgcatcaggctgaagatgagctttcaaaagcacagttggtcctcttagaagcattgtcacaaaaagaagagttggagctgaatctgaactctctcagtgagcagcatggcaaatccaaagcttttggagaaaatgcaaaccagaagattctcgatcttgaagcacaaatacaggcaatgcatgcagctgaacaggcactcaagtttgagctaaaagaagccgaggcaagtgtccaagctgctgagaagaaaggctcagaccttgagcaacaactcagtgagattgagaataaatttgttaaatcaagtgaagaaatagagttgctgaaagagcgtattcaacaagaagctgctgtatcagcagaaagaggaatgcagcttcaagaaactgtgaccagtgtagagggatacaaagaaaaaattattgagctacaatcctccctaggttcctcagtgtctaaaaatcagctacttgaacaagaagtcatggagctgactgataaatgttcagagcatcaagaacaagcgcattcagttcggcaaagaagtctggagctggaagatttgcttcacacatcaaagactcatgctgaaggtgtatactcacggacacaggagctggagcaggagctgaataacacatatgaaatgttcaagggggttgaagaagaactcgagcagtacagaagcaaggcttcacagctctctgatgatctggaagcttatcagacaaaagcagctagtcttgaagccgtggtggaagcagcaagcgagaaagaaaaggaatttatggagtcattgagccaaataactgaagaaaagaagaaaactgaatcaaggaatgcggaaattgaagctcaattgcaggaagctcttgaggcagtaggacagaaagaggctgagtcgagaaacttgaatgaaaagctggttgcacttgagtccgaaattgaaagttcgatgcatgtaaatgaagcgttgaaacaggaaatcaatgctaagctggtaatggtggatgagctgcaggagaagtgtagttttataagttctgagaaagaagaagttgcagagaagctgtctattcatgaggagaagttagaacatttgacagaagaacactcaagaggcttggagctcctttctgtagctgaatctcggaataaagaaactgagagtcaactgcgtgaagttcttgaaaagctagcacaaaaagaagctgaagttacagacttgacagagaagctggctttgctcgaagctgagaatgaaaagatgacttgtttgaacgaggcgttaaaagaagtggatgctaagctggtcatgtttgatgagctacaggaacggtttagttctactcttgctgagaaggaagaagctgcagagaagctagctgttcatgagaggacaatctcacaactgacagaggtacacacaagaaccttggagctccattctgtagctgaatcaaagaatgaagaaattggagctcagttccttgaggctcttgaaacaatatcacagaaagaaggtgaagttaaagaatcgtcttcacagaagataaagatattggaggaacaacttgcagagacacatagcaaggtcgagcatttccttacagagaaggaaagcttggttcaagaaactagtagtctgaataaggagtttgaggtacatcagaacaagttgaacgacttacaacttgcacttgctgctgcactagcagaaaaggaggcggcatttgaagagattcattcactgtgtaaaacactcgatggaatgatcgagcacaaagcagaactagaaatacaggtatcttctactatacaagagcacgaagaactgaagagcaagtaccaaaatacaatggaagagaagcagatgttgagtgataaatatgaaacagcaaagaaagagcttgaggatgcaatagccaagttggaggaggaaatgaatgtagacaagtcagaaaaagagtctcacatctcaaagctggagcgacagattacattatcagagataaaatacatggaggagataaagactatgcaagtggaaacaactgaaaagaatgaagcactaacagccaagatgcaggaacacacagacttacaacatgagaaacacgaattggaacaacagttgctggaagttaggaaggaactggatggtgcttaccataccatagtaaatcaggaagaacaagcttctttgagagagataaagtgggacacttttaggatttattcagaggatcgtctggaagctgagcagcagcgtgctgaggagctggaactacaagtagcagctcttaaacaacagctccaagaagctgaggtccattataagcaaaaggaagaacaagtttctttaagggaggttcaatgggaaggggatcaaaatcattcactgaatgagctgaaatctcagcgtcagtatgccacggacttggagaaacaaatcgaagatcttactcagaagttaagatcagccgatgcacactacaaacagaaggccacagaagagagagataaacttgccgagatcaccacagagttcagcaagttgacacataaagtaagcaagagtgtcgaattggagaagaaggtgcaggaccttgagcagaagctgcagctagcttattccaagtctgacgaacaggcaacggatgtcttggagtcgagatcccgtgagtttagcctggactcgttatcaagtttggtcaaacagcaggacagaactcaggctgccgacaaggcctcgccgagcccgaccctgcaagaagtacaagaaccttctggcaccatggctttcaagttcatcctgggagtcgccctgctgtccgtactcgccggcgtgtttctcgggaagcggtactagcgctcagtctgtggaactctgttggcgcccatcatcagctcatggaaaacccccgctgttaatattgctcccagcgaaattcggttatcagtttgtagctggaaggggggcgtagccagcagaagtttgagaggattgttggccttgatggtgatggttcgacgactttctgggaggaagttggagaccttggaagcccttttgttctcttgttgttgattttcgtcttcattttcagtttttgggtaaagtggggcaaggaatttgatttttgttcattcctaccctttgcgtgcaaaaggccaagtgcacgcaactggttctgcggacagctagttttccgtgtacatttcttctctgtaaagaccaggagtccatggacgcaaaacatgaagcctctgcttgctgtatatgctcgtgtggagagtgcatgtttcgttacctgtgccttttgatgtacacctgaattgcttgaacgagaaatgtcatattattatcagatggtttgaaggacgtgtacacagtggttggattcagatcctctaattttg

SEQ ID NO: 27809 - DNA, 932 bp, Zea Mays
ggctgtggggaggaggagctgaggcgtcggcctgggggaggccaaggggcgggagcggaagggacatctgactctgtcacagtttaacaagtgcatgtcctgcagcatgggaaaccagaagagcgttctacaataattacacaactcgctggacagatagtgaaaatgagccagcagaaatttgcttctaatgttgttgaaaagtgtcttacttttggcaatgatgaaagaccagttcgcaaactatgtggtgcagaaggttctggagatatgtgatgaccagaaccgtgaattgattctttcccgtatcaaggtccacttgaatgcactgaaaagatacacctatgggaagcatatcgtggcacgtgttgagaagcttattgctgcaggagaacggcgcattggtgccccatcctcttgctgagatggcaataaagctatatacaggtcgcagaataacacctgtacagacagacagggatagcgaggcctagctttttaccattaccagtagtcggtaatattgagcgacggagaggttaaaaaaggctcccaaatcctttgatgtaaataaaggatagccgctggaaataaataaaaagaatgagaaaagatgaagagattttgcttgtccttgagggaagagttgtatatttgtgtggtttattttcccctcttgaagcagatggataaatgttttaggatcatagatgatgggaagcaagggcagctgtagattatcctttctttttttccttgggtttcattagtcaatgtataatgtattaatgttcatggtgatgctaatctctgtaaagcctgccttgagtttactgacattttcctgaaatgaaattaaatgcatgtttcctggtacttgtgaaatgcctgcgtctaggcagctcatcaaatatcagttgtttcccaccact

SEQ ID NO: 27810 - DNA, 2459 bp, Zea Mays
ggaaaaaattgctgcgtgcgccccgccgcctacacacgcctagcccgctccccaagaaagagcccccgcacacaggctgggaggggagcgaaagcgaaacgtattaaactcgcgtacatcatcaaccgcatgcgctgatgcgcactgccactgccccggagaaattcaaatcccaagccccacaagcaaattaccccagcatcaaatcagcggccggccggccggcagctctcggtcgatccactgcggtttccagtcccgaataatcccaattcccaatcgattcgaagcttccttccttcgaggagagggggaggtggaaggcgcgggggaagctctgcttagggttcggaggtggccggcgccgccgcggggcggggacggcagggggatggatccggagcagacgttcctgcgggtgcacgcgcgcttatcggggacgctttcccagctgctcacgccgcggatccgcctcgtcctcgagtacctctacctcgccggcgccgtcgcgctcttctgcctgctcgtcgtcatgcacacgaacttcgtgcagcagcctggttgctcaagtgaattttctggaattgaatttggagaagcacaacttgtccaaatcaagattatcagtgggggattatggtccagcagaggtgcttcttacatcatggatctccagaacctgggacgttcagctgagaaaattttagaggttaatggtgataagttcaacattttggcatctaaattttggtcaacctgggttggccctggagctaggaggagcttaccagatttgaaggcagccggagagggttctgtacaccaccctttatctgctaaggagtcatttaaagcagcagtgacatttttgttcagaaaatggtaccttcgtgctgtttcattctggaagaacataaagcaactttcagaaaataccctccagttaatggtcagatcaaattggaacgatttcctacatattattaaggatcttcaactaccaagcatggatcatcttatttcgacaatagtgcaatggtttgagaggagaagtaaagcatttgagcctacttatttatatggcgtggaaaagggttatttcttgctttctgaaggtgctaaaactcgtcatggtgtccgaacaatcaatatcacaatttctgctcgaaatccttgctttggaaacaggtggcagcaacttttgataaacagcattgttggatatgatactatacttacaaacagcttggtgaattctcctggtcatggctatttatacaactttcagacgaaggagctctatgatcttagttatgggcatgaaccaccagaaggtcctacaagatttggagattactttgtgacaaaatgtggtgtccttctaatgtcactctttgtctttttcacaaccaccatgtctgtttcatttactttgagagaaacacaatcccgcatgcttagattcacagtgcagcttcaacaccatgcacgccaccacctgccaacctttcagttgatattcgtgcatgtcatcgaatcattggtttttgtgccgattatgattgggattctcttttttctatttgagttctatgatgatcaattgcttgcgtttcttgttttgactcttgtatggttatgcgagctattcacgatgatcagtgtgcggacatccatatcgatgcagttctttccacgcttcttcttgctgtattttttggttttccatatctacttcttctcatatacctatggcttctcatatctggctttctctgctacggcagcattcatgcagcacctgattttatatttttggaaccgttttgaggtgccagctctccagagattcatgcgaagtcgagcacacattcaccagcaaacagagatgttcgtgatcatggtcaagattacaccgatccacctcgaaatggaaatgatcaggtgacatagaatcacggggatgaaagtgggccaattactgaactcgagtgcttgggcggcagtagtctctttctaatatgatataatgccagcacctcccgtcaaaaggataatgacgaatattggtggcaactatacagactggtgtcgctggagatgccatgttagtgttatctgtttctcacttttttagttagtaggtaagggtgaaggttgtatctatattcattacatgtgcacattccctaccgtctgaatgggagcgcccgtcccagtcctgtacagaaatgtcaactcacagcagattgtgcacattctttttgtactcccatgggcgggtgctggcctggaacatgcagtgtgtgcaccactgtcactgaattggacagttaatggtttggatacatcgttgcatgtactgttccaacttccaaattctgaattctgtgcttgcagattagttcctgaaaatcatgtttttcagtgttccttggagttttgaacaccgatgtcca

SEQ ID NO: 27811 - DNA, 4844 bp, Zea Mays
cccctacaccacaccacaagtccacaggccacaccgaatcgatctgcaccaacaccaaccgaacacatacatgcacaccaaaagcagtcgcagcatccgatattccgatcccggcaaaaacaattctcccagaaagagattatttcgccccctcaccaatcctgctcccgaaattcctaatcttttaatccgcgtttttcctccgtccgtcccccggcttgcagcagtaatgaagcggaggaggaaaaggagaaaacgaaaaagcgcagggaaaacaacacaccagcacccgcagagagcaggcacacatcaactcatcaagctgagcgatgcgtgtgattgcgagcatgtgagcaggcaggcgggcagggcgaaaatccgaggaggaaaagtccgcgagaatctccggactggcctccccacacatcgtcaaaaatccaatcttgacgcctccctggtcgagccgagactgttccaaagtttctgcctctgtgatgcgtgcgggattgttgccagttggttggttgccgctgctaatgaggcccgcccgcccgatccccgtggtcgccgtctccggttaatcccgcttcagttcttgtaccggttcttggagagagatttttttccgcctctccccccctgtggattgcgccgtgtgtgtttgtctggatcgtgatgggggcgtgggccgattcgccaccaccacaagcacgactcctcttttttattgcctccgcactgggatttgctttcgcgttgttgcagtagctatttccgcgaatcgtcttctagggctccgtgtgttctcgcgcactttaccctctgttttccccattcacccgcaccgaatccacccccttcccggtcgcgtccggccgtcgattgaggccgtgccgccgccgattacgccgcaaaatcgcgtcttgggtttggtgcatgaagaagtggggttgatttcgaggggaggtttttctcctgcttggctgccgtcgggaaggctccggccggccagtcatgtctcaaatccaaagcttctcgaggaacaactgtgcgctcctcgcggtgctgtgtgggaagtatgctgagaaccgcacaccagcagcgaggtctgggctggaggcgaagcggccgcggccggcttacccgttcccggagctcagctcggctgggcgattggaggtccacaccctgttcaatcctacaccagagcagttcctcgaggcgcagcgggtggtgcaacctaacttcttgtacatccagggccagcagctcgaggatgagaaggagattggctcacttgtatggggggacgccgatgtctctgatccgcaggcatttagcactcttatcagcccaccattcccaacaatagtatatctggaagttcctattggtgaaaaacttgctcaagcagttcactcaaaggggatcccatatgtaatatactggagaaattcattctcgtcttatgcagcatctcattttcgccatgcgttgatgtcagcaattcaaagttcagtgagccatacttgggatgcttttcagcttgctcatgcatccttccgtctatattgtgtaagaaacaatcatgtgcaaagtgttaagcttggtccgcgtctccttggggatgctccaaaaataaatataagcccacctgagacagaaatggttgatgaagaaggttcatctgaagtgaccccggctataaaaatatatgatgaagaaatcaacatgaaattactcttatgtggagtgccatgcaccttggatccttgtttattgggctctttagaggacggtctgaatgcacttctgaatattgaagtatgaatgaaagattctagctatgcagtacctttctatctgaactactttttatataataaactcgttgttttgaaaatcattggtcactagaaatgattaaaaacattttgttttttagtgtatgtaatagtaattcagacatatggcaatgttacatctatgctctgaatcatggatgttctctgtgaggatcatagaacaaaattgaactagatgtgcagcacacttgcatatagagaaatactagatcagcagcgatggtgatatccttaaaatcctaggatatcatcaacgatatccgttgtttcattactttgtctatttctattaatcacgccacatttctagatagcttattatcgtggggcgataattgtatgcctcccatggaggctggtgccctcgacatccaggtcgttgcctgcgatcgctttgatttgttttaatggaagtcttcatgcttgtatggtacatgaaagcaagaaattatgctgctatagtgtagacactattagctactttattctgcatcagaagtattgacatttggtgagaagtttcgtactgaatgactggaacttcagttcccgttagtctcagtctgtcctgggacctttttgcttgagcttctgggcagcttctcagcgtgaaaagccagaagctctaacaaacaactagttttttgatttagcgtccggaaagccaaaatctcaaaaatgctgagttcatatgtgaagctgaaaagactttttttggggctttcggtagcttcctgagtttaggaagctaataacatcataaaaaatctatcattggcttcttaggaccaaaaccccaataccaacttttcagagaagctccaaaagctgcagctcaaacaaataggcccttaggttgttcgggccgacaaaaatggatagtccagacatccacgccccctcccttcccttgtgtgcacacaaaaactgctctctagcatggggtgtgattaaacctgtgagctggctatccttttgtctcgtttaaagaatgctgacacataaagcaacggtgcaaatgtttaatgattgattatttaagttattacaaactttatgaccttctattttcctatactggaattgctataaaagagctcatgtttttttgacagattcgtgggagcaaactgcagaatcgaatcagctgcatctctaccacgtgggatggttactatgcgctgtgatatcagtacttgcagttcttcccatgtgtcactcctcgtttctggtagcgcacaaacttgttttgatgaccagcttctagagagccacatcaagaatgaaattattgagaagagccagttagtccgtgctctatcaaatagtgaggacaagttaccatcaagcgagcctttaacttccatgtccacggcttgtggggcttctacctttgaagtttggatgtcccttcctaagtgggcagcacagcatctagcgccagatatatcatacaggagcttggttgcacttggtattggttgtataaatggtactcctgttgcttcatttgagaggcgggatgcagaccgtctattattcttttgcacaagtcagtgcaaagatttggctaatgaaaatggtccatattttcatcttccaagatggtcagcctcccttaccaaggacagaacaaaggtgggttcagaatcaaaacaaaatctgttgggtgcaaatggagttttggaagacaagaagcatatgatggaagggccttcctcatggtcagccgtcaaggctaaattaaagcctgcaactatgaggcccattcctcactctcgaaagcaacaaatgcatccatttatgggttttcctgaaacttcccttcacgaaactagtattgtgaagccaagcttgccagctgcaccaactgtgaagcacaattcagtttcttctgccacaaccacgcacagaaaatcaacatcagggccgtctcatactccctcagtcattcagttaaatcctctgccaatgaagaaacacggatgtgataggttgcctatccaagtgtgctctgaggaggattttttgaaggatgtcatgcagtttttaatccagaggggccacaatcgacttgtacctcacggaggactagctgaatttcctgatgcaatccttaacgccaagcgccttgatctttataacctgtacaaagaggtggtgtctagaggtggattttatgtgggtaatggcataaactggaagggtcaagttttttcaaagatgcgtaaccataccgcaacaaacagaatgactgtatgacatttatttcagttttctgatacgatttctggtcctgctaaatgcgatgttctaattctgtgcacttctctgtatatatttagggtgtaggtaacacgttgaaaagacattacgagacatacttgttggaatatgagttggcacatgatgacgtggatggcgaatgctgcttactttgtcacagtagcgcacctggagattgggtgaactgcggtttatgtggtgaatgggctcactttggttgcgacagacgacaaggactaggcactttcaaggattacgctaagacagatggtttggaatacatctgcccccactgtagcttagcaaactacaagaagaagccaccaccaccaaaagcagctaacggtttttcaaatacagcatctgtaccacgaaatgcttaattttcttgttttttttttcttttcctttggtcccatgtttatgggaagaatcattagagtagataataggctgatggaaagatgggcaaggccttccaggtatgtagtagtattcgaatgtatcatctcgttaatttagtggttattatgaggcttatataacatgtaacaactgataacacagacaagctcctacagtagttggttagatgctggtgtaagcttcttgtttatattaatctcaattgtgtttttagtttcccttgtctggatcaatcaaacatttgatgcaacagcacggaagtgtgag

SEQ ID NO: 27812 - DNA, 2639 bp, Zea Mays
tccaaacccaagcaaagccgacccgccccaaatcattcgtctccctccccttcgttggttcgtttgattgattggggagcaacaactcccaccacccgcaaccgcagcaatctcccctcgccaactccgtctcggccgcaacccattcgccattgccgaggaggaggaagcccggtcgtctattctggatctcggatggcgtcggccaagtcgtcgcggtcgcggcccgcgggccactcgggggtgttcccggtgggcagcgccgccgcggtggggagcgggggcggcggtggcgacggcggggtgcagctcgccgacaagctcaagatcttcaaaaccgacaacttcgatcccgacgcctacgtgcagtccaagtgccagaccatgaacgagaaggaaataagacatttgtgttcttatctccaagacctaaagaaggcttcagctgaagaaatgcgtagaagtgtttacgcaaattatgctgcattcatcagaacatctaaggagatatcagaccttgaaggggaactgttgtcaattagaaatctgcttaatacacaggcagctttaattcacggtctatctgaaggagttcagatagattcattaacttcaggccctgaaggttctgcagaagacgacatatccaaggttgaagatcaggagccttcagaaattcagaaatggtctgcagattttcctgacatgcttgacgttttgctagctgagcgaagagtggatgaagcactggatgcactggatgaagcagaacgggttgctgttgatgcaaaacgaaaacagactctaactgcagctgaagtttcggctttgaaaagatctatctctgataatcggcagaggctggcagatcagcttgctgaagctgcttgtcagtcttctactcgtggtattgagcttcgagctgcagcttctgccctcaaaagacttggtgatggcccccgagctcacagcctcttactgagtgcacataatcaaaggcttcaatgcaatatgcaaactatacatccatctagtacttcatatggtggggcatacactgcggcacttgcccaacaggttatgtcctttgcgctcctggtgaagaggcatgtgttgtcctcttgtgcagctgctggaggcttgagggcagctgcagaatgtgttcagatatcacttggccattgttttttgctggaagctcgtggtctgtctgtttcctctgttctcctcaaacaattcaagcccagtttagtgcaagcattagatgctaacttgaggagaattgaggagagtactgctgcactagcagcagctgataactggatactcacatatcccctaactggtattcgtccattaactagatcgtctgctgctaatttggcacttcagccaaagctctctagtagcgcacaccgtttcaattcaatggttcaggatttctttgaggacattgcaccactacttagcttgcaattgggtggttcatcaatggatgggatcacacaaattttcaattcatatgtaaacttgcttataagtgctttacctggttctatggatgatgaagctaacttagatggtttaggtaataagattgttagaatggcagagactgaagagcagcagttagctttattagctaatgcatctttactagctgaggagttgctacctagagcagctatgaagttatcgtcaataaaccagtctatggatgatttgcataaaagaggaacagataaacaaaaccgtgtgcctgagcaacgtgagtggaaaagaaaactacaacgaatggtggacaggttgagagataatttttgcaggcagcatgctcttgaacttatatttacagatgaaggtgatactcatctcagtgcagaaatgtatatcagtatggacaatactgttgaagaaccagaatgggttccgtctccaattttccaggaactgtatgtaaagttaaacaggatggcaagcattgccgcagaaatgtttgttggtagagaaagatttgctactttactgatgatgcgcctcactgagacagtcatactgtggctctcagaagaccaggccttttgggaagagattgaacaaggagcaaagcctttaggccccctaggtctgcaacagttctacctggacatgcaatttgtcatcatatttgggcaaggtcgttttctctctagacatgtacatcaagtcattttggatgtcattgatagagcaatggctgcattttctgctactggaatgaaccctgatagtgtccttccgggcgacgattggttcatggatgtctcccaagaagttgtcagcatgatcagtggaaggggtagagttgctaatggtgacagggaagtaaacagcccaacggcctcagtttcagcgcactccatttcttcgttcaaatcccatggcagctcctagtttgcaaaacttttgtgatagtatagtatagatggataattgtttgacctaggaaaataaatcttttttagtaattttgttttagggtgtgtttggttgaggagtggttccattccattttttggttgttcggttttcaataaaaataatagcggagtggctcttgtatctttatatgaaaatttactataaatagttggaacgct

SEQ ID NO: 27813 - DNA, 2163 bp, Zea Mays
ctcccagtcgcccttcaacttgccagccgatcccttcgcgtttgtctccgcggttccgacgctccgcactccgctcccctctcccaagcaaacacagccgagtccacgcacgcctcccatcattcctcaaccgcctcgccggagcaaggggagtagcggaggatggagattgaccaggcggtgcgcgggtgcagcgaccgccgcatgcgcaccaagtacagcaacgccgtctacgtcgtccagcgggccttcgcgctctacccatttgaggaagttgccttcagctttaatggtgggaaggattcaactgtgctcctgcatttgattcgagctggttactacctttacaagaaggactctggtgatgtagcccaaacagatgctgttaaaaactgtccactgcgtactatctatttcgaaagcccttgtgctttccctgaaatcaattcattcacttatgagattgtctcaacgtaagagttgtctaagatgtgtctaactttacccttagtctatccgctatttaaggaagggcaggcctggtgcggtggcgagctgtctcactgaatcatcagttatgggttacctctggaaaccatccattcagatttcaagtctggtctagaaggccttctgaaggagaagcccaccaaagcaattttcattggcacaagaattggtgatccaaatgcggttggtcaagaacagttctctcctagttcacctggctggcctccttttatgagggtgaatccaatcttggattggtcatacagggatgtttggtcttttctaataacatgtaaggtcaaatactgcagcctttatgatcaagggtatacttccattgggagcatacacgatactgttccaaatgcactccttagtgattcatcatctgagaaaagttttagaccagcatacatgctaactgatggaaggcttgaaagagctggtagaacaaaaaagattaatcctaaagtagaaatgaattctgctgcaagcaatggcatcaacgatactgagggaggacggatgatctcacgggcggcatcaatcattgtagtcggtgatgaaattttgtttggtacaactgaggataacttaggagcagccttgtgcaagaagcttcatgcaattggctggcgggtttctcatgtagcagttgttcgcaatgagattgattctgttgctgaagaagttgaacgttgtaaatctactgatgacatggtgtttatttttggtggactcgggccgctacattcagacgtttctttggctggtgtcgcgaaagcatttggagttcgtctggctcctgatgaagaatttgaagattaccttagtcaactcatgggaaacaattacactggtgaccgaaatgagatggcacagttgccagaaggtattacagaattactgcatcacaaaacgctaccattgccattgatcaaatgtagaaatgtcattgctcttgctgcaaccaatatggatgaactagacaccgagtgggattgtcttctaggtacccaggagagtggtctaatgccatcaaaaccttttgtgtcaaagcatctcagcactacactttcagatgttcaaattgcttcagtccttgcaaaactgtgcttagagttttctgatgtttacatagggtgtcatcggatatcaagagctggtcctttggttgtgaatcttactggaaaggataaccagagggtagatgcggctgccgagaagctgacaagcagctttgaaggacaattttcccaacttaacagttgcaaataagctgtcagagacacccctctatttttgccaaattctttccgcctgaagctctgagattgtgcaggactgatgatggtgctcaactgctctaaaccgacgaccaaaataaaccacggagctggtactactttgaagctacaaattttatttagggaacataggaattttgtactaggaattggtaactgggttctagcataatgtagctttgcagctaatattttgacattattatacgttccaaattatttcatttatactataatttatagcataactttactgctcgatcatgatgtcttcagttgtttgacctttttgctacttgttcgagcatagctttgcagtgcttggtgatgcaaacattgatgctga

SEQ ID NO: 27814 - DNA, 1654 bp, Zea Mays
cggcacgcccgcacgggaaccgggcagcacggcttgctaaacacgcagaaaagaaaagccgttctccctccgtttccccaaaccccaaggtccccaaccatggcagccgccgccgattctgcctccgaccaaaaccctaaggacgccgagcggcacgtgctcaccgccgaatccgacgccgatttctccgaggaggactacgacgaggatggggaggaggaatacgaggaggaggaggagctggacgggccggcggcggcggcggcggagcgggagcggatgcagtccgtgttacggaggctgtcatccgaccccgtgggcatccgcgtccacgacgtgatcatcaagggcaacaccaagacgcaggacgagctcatcgaggcggaggtcgccgagctgctccgcgccgcccccaccgtgcaggacctgctccgcgccgccagtgtcgccactgcgcggctgcacgatctcgacatcttcgacgccgtcaagatcacgctcgacgccgggccgcccgagctgcctggcaccaccaacgtcgtcatcgaggtcgtcgaggtggccaaccccctcactggcaccgccggcgtctattcgaagcccgaagcaagatcttggtcgctggaagggtcacttaagttgaagaacttgtttggctatggtgacatctgggatgcatcaggatcctttggttgggaccaaacaacagaggttggtgttggagtctgcctaccgaggtttaaatcaataccaacaccattgatggctcgggcatctttgtcatcacaagattggctgaagttttcatcatacaaggagcgcctacttggcctttcatttggtttgctgtcaacaaggaaccatgacttgtcatacaaccttgcgtggcgtaccttaactgatccatcacgtgtctcatcaaaggccataaggaggcagttagggcataaccttctttctgcattgaagtacacatacaagattgataagagggattcacatcttaggccaacgaaaggatatgcgtttcagtcaacttctcaagttggtggtctatggaatagcaaaggattgagatatttccggcaggagttcgatgtacgtggtgctgtgcctttgggattttatagtgctgctctcaacgttggtgtaggagcgggtgtcattttaccgcttgcagggggattcatgaattcgacttcatcagtgccagagaggttttatcttggagatattcagagacgctggaatccatggccacgcattccttactgctggaaaccttgcgaaactgtcggagggtgagtacaagaacttttcggcttctgaatttcggcaaacgttccggagctctgctggcgttgggattattttgcctaccaaacttttccgggtagaggtgaactattgccgcatcctaaagcaagctgagcatgacagcgcgaagactggaatccagttcagcttttcctcgcccatgagatgggtttattatttgctgtttttgacctcacgagggatttgtcctcgcacaactcaaataccgatgctgtggctacacaatggtggatagaataatattttggcccataatgttgtataattcataccacatcagctttccgtgtcattcgctcgtttattcgcgtgtgtt

SEQ ID NO: 27815 - DNA, 1743 bp, Zea Mays
cccgtccgttctcacttcaggccccctcgtccgttcgatcgactcctcggaaagagggcgctcatgtggttgcgtattccgcgctgggacacgtatggcaggcgtgcgcttcctacgggtcgtcctcaacctctcgtccggccgtgttgacctgaccgaataaccacccgtctgccgctgtgccgcaccccgcacgagacccgtccttgaggggcacgtcctagatcggtggcgcctgcctctcgccgccgatacggtgcctctcgcggtctcgctccccctcgcagtaatccggcttctttctatgttccgatgtcttgctggttggatgaggagggtacgacgctctgtggagagatctaatcgcgctggtaaactggggcgatcggtgtgggggaatcggatagcgtggatgggatttgggattggaagagaagctggaggatgccttttttcccctgtccccaagctttctgtggatgacggtgataatcgtggacgagctaagctcattgagtgtctggctgatgtgggattgggtggcatatgctggattgctaactgttccatctggtgcaccaagaattggactgcactggggttgggattgggattgggatgggattgctttgcctttgattgtgtatatgcttattatgtgctcatccgctgtggctttggccggaactttgcagacatgcagagccagatagtgtgccacgggtgcaggacccttctgttctacccaagaggtgctccgagcgtgtgttgtgcggtatgccatgtggtcaccaatgtgccgcctccagcaatggagatggctcgacttatatgtggtggctgccagacattattgatgtatgctcgcagtgcaacaactgtaagatgctcatgttgtgacacagtcaatcttgtcagaccagtgagtagcatagctcatgtgaactgtggccagtgccaaacagtgttgatgtatccatacggagcaccgtctgtcaaatgtgctgtttgcaacttcattacaaatgttggcggggtgactcccatgatacctttgccaccaccagcactaactgcatcaagtggaacttcatatatcatcccgtcaatttccgtgccgacgaatcaaccgcggaatgtaactgttgtcgttgaaaacccaatgacagtagatgacaagggaaaattggtgagcaatgttgtagtaggggttacgagcggcgggaaaaagtgacggcatatcacaacccgtatagctttgtccaaactatctaaaaagggtttaagaatacataccttgtatcatactgctgtttggcgatcggctgctcgacggaggaatccccctccctggagagcgtagtggcaaggcagcgctgctttcgccactgcgatcgtgctagaacgagccaaaaaaaaaaacgaagtgcgggtgtgcatactcagagtatatctgtagcttgttaccccttgattcttttgtatgtaatatgggctctgcctgactttcactgtgtgatcaaatttccaagcccgtgggcgctgttgctgcgtgccttgttattagtgaataacaaacattgcaaatggctcttgaaatacagtgtgtgtgtgttttaatctctctgcatttatgttaatcagcaggtgccaccatttgctgttccagactgataatgcagagtttgtatccacgttctttggagaaaacatttgaggctcatacgctgtttcatgtcccat

SEQ ID NO: 27816 - DNA, 3828 bp, Zea Mays
gtactacgattctcacacgaggatccatcttatttggccctttttttgtaacggtcgtagacaattatgagaaactcaaactacgtgaccaggcaggtagctgcaataatgaaaaagtaaattaaagatttaataggtttgtttatgttatattccgtccgtacttacttagaaggcgccactacctttgatacagagaccaagaaatggtttaattcctgttatttttcaatgacctgacgtttcctgataaagaacaagtatgagttggcgtactaatactggtgaggggaaaaaagtaaacatgcatgcatgtgaatccaaccgataaagagctgagaagcccgcaagtgcagtaaatgccacattgttacatgtcatcaaaataagagccgagagaggtgcactttgtactctagaacatctgcaaaatacagttacaccttttatattatgacacaggaagtaatactaacacacagatacagttaccaggtttgttcttctcttgagagcattataatgggacagggcaaatgcagtcgttattgcattgacaaccatgaaatgcaattcaggaagtctggaaggataaacagctaactagttatttttttaaaacaaagtagcaagagtgctgcctatatttatattaaggaaaaggagtaaaagcacacgagagagcgacaaatggaaagaattaaaaaggctaacaatgtatcttcctagactagacctctaagctaccagcatgagctacatagtaaatatggattccgctcttgtgatttgaaggggcataatatagatatcaaaaggctgtttgggggcatctattacctaatgcagaatcttgggctctaactaatgagcctgagagtgcttcattgatttaatcgccactacttatgttaggatctagcaagtgcagcagcgctgctcctaacttactgcctttaacaagctggcactacatatagtgccgatttcattgagtagataacgttaaagtctttagtatgtattcaagaattattcatcagatttcaaacagccattgaccattgcataagggattggtttcacctaatgacaataccattgcgtagccacaaccaaagatccttcgcatcagatcaccgaaatggtcgaagaaatgataccttggagatcggggatggattgggagtggcggaaaaggagcagcagcgcgtcgtcggccgcggaggcggtggagcgaaggaatccgagcaggctgcggagcccacgcgcgcggaggaaggagaagtccgccttggcgtcgcgcaaccctgagtgcagcgccagcgtcacctcccggtacaaacgtcgccgcgccagcgcatctgccagctcccggccactgccacttcctcctcccccatcagtggcagacgaagaagacccatcctgtcctgccggctccgcctccttccgactcatccccgtcgcctccgaccgccggcgacgtcgcccccctcccctcctcttcgttctccgtctttcccgttttacccctggctaatggggagaaaccgacggcttgtaatttcagagcccacggcccatcaaggcccagaaaagcccaacgcgatcacacgagtgggactggggagtagtgaggcgagagcttctccccgcgccgccgccaaaaccctcaaaacccgagacgccggcggtgaagaggagagggcggaggcggagatggcgacgcggatgaaggacgtggcgcggaggtcgaccaagaagtacgtggaggaggcgctgtaccggcgtctgttccggaaggggtcgacgccgcaggcggttcgagaggaggtggatggcttcctcgacagccggaagcgggcgttcaagtgggaggtgggcgtttgcgtccgccggatgcggcggaacgcgctctaccgcccgtcgctcaagctttctgaagttatggcgagaagaggcatgaatcctactgttagtgatcaagcaatccgcctggatctcattgccaaatcgagaggcatcgctgctgccgagaagtactttttggacctcccagaaacatccaagactcatcttacatatggcgctcttctcaattcttactgcaaagagttgatgactgagaaggccgagtcccttatggagaaaatgaaggagctcaactttgctttcactgccatgtccttcaacagcttaatgacgatgtacaccaaagtcaaccaagctgagaaggtccccagtatcattcaggacatgaaggcagatgacgtattgccagatgtctttacttataatgtttggatgagggcgcttgcagctctcaaggacataccaggggttgagagggtgattgaagagatgaaacgggatggccgtgttgctcctgattggacaacatacagcaacctggcttccatatatgttgaggctggaatgtttgagaaggcagaggctgctcttaaggagcttgagaagcggaacaccagcaatgacatcgaagcctaccagttccttattacattgtatgggcgtacacagaacttagtggaagttcaccgtgtctggcgatcgctgaagcgggataaccctagaatggcaaacatgagctaccttaacatgattcaggttttggccaacttgaaggacctgtctgctgccgaagcctgttttaaggagtgggaagcccgacacatccatccacccaagaccaacacaaagggctcgggggcagataatacacctggtgcagatccaaaatctccaagtaacccgcctaataatcagtctggcaccaaggaaaccggggacgagacagcagaggacctccagccgaagcatccaaaatatgacatccgggtagcaaacgctatgatcaaggcgtacattaccgagggcatgcttgacaaagctgtcgccatgaagaagcgtgccaagatgcgcggcggaaggctgaacgccaagacatgggagatcttcatggagcattacctcaagacgggggatctcaagatggcccattggtgcgcggaccgcgcgatgaagaaggggcacagcagcggcaggatttgggtgccgccgcccgccgtgacggagaccctgatgagctacttcgaggagaacaaggacgtcgatggggccgagcggtacgtgggggctctgaagaaggtgcagaaggatctgggcgcaccggtgttcgagccgctggtgcggacgtacgctgccgccgggaagaagttccccgggatgcggcagcggctgaagatcgagaacgtggaggtcggggaggggacggcccagctgcttgactctatctgcgccgatcaatagcccaagcacgtcctagaggcggtggcagcgttggtggcggctgctatgcgatgggggcaccacctccgttgatgtattgtctggtgcgggactgcgagtgacctctgaggcgggggcggagaataactggatctacctaacgtcggaatggagacctgcaggtccatttgaaattaaacagaaggttggtaagagtgtgatggtgctcattttgcgttttagaggatccatacttgcatgtagccaaagaaactattttagtaccttttttccttgtactttttttttgtcttattgctttgcctggagctacttgaaatgctccacagttatgtcctctttttaactgagatgtcgttggcctgaacaaaggatgcttgacgcttcgaagtcacacgcaatgataaattcagtttgcagcatcgcgatgcatttggacgctcattttactccttgaaagctgatactaagtgtcacgcgatacctattacgata

SEQ ID NO: 27817 - DNA, 3551 bp, Zea Mays
acgatatattctccccactggccgcgggccgcacccggggctcgggcgttcggcatccctccccgtcgtaactcagcagcgccgccgtcgccgtgcacgcaccagcgccacgactcggcgcttacccatcaaacattcaaaccccacgacgccgccggccacggccaccgctagggttttagcctcctccgatgccgccgcctcgccgcgcgcttgtcacatccctcctccgcctccgctccttctcctccattgcctatcctcatccctacccacccgcgcccctgcgacgccaccagttcgtcgccgaccccaccacctccacaaaccgtggtgtcgtcgggggcatcggcggcgtcggttccgggaacgggaacatcttggacccgacgcagctcctccgcgacgacccggtggcaatcaccgcttccctttgggtatcctccttccgcgccgccgcctccacctccggctcttgtacccccgcaccgccgcagccactcacccccttcctctcgcgcctggagctgtgggtgctcgcctaccagaaggcgtacgctgacgagaccggttcctatctgccgcgctcctccatcccggcctccacgctcgcctccctcctcacgctccgcaacgccgtactcgacggccgcttccgcttcggcaaccgcctcacccccatcctccagtccccgcgcgccgccaacgcgccggaccctgccaccctctccaagcgcaagctccgcgccctccttacaacccccggcccatcgcccttccaggaccgcgtcgtgcaggagctgctcctactcctgctcgagcccgtctacgaagccaggttctcgccaaagtccttcgccttccgcccaggtcgatccccgcatgccgcgattcgcaccatccgccgcagctttgctccgtacctctggtatatcaagggcgacctctccccactcctgcactcgcctgatcatgctctcgtggtcggtgcgcttatccgtgatgtgcgtgataaaaaagtggttgatttgatccgttcggccctgctcaccccggtggtgaccgcaagcgatgatgctgcagtgaagaagaagaagaccaagaggaaataccagaagaagaaggtgctgccagagggggagccgaagcctgatccttactggttgcagacgttttttgggtttgcaccagaggaagcacagacacagcctgattggggccattgtggggtgctgagcccgttgcttgccaatgtgtgcctggatgagtttgataagtggatggaagagaggattaaggagttttacaagccatccaagtccgatgttgtgggaggggatgatggtattgagcagggcaatacatcatggccagagtttgtccccacgactggccctgacaagacaaggaaggtggactacattcgatacggcgggcatttcttgattggtgtgagggggccaagagcggatgcggcggtgctccggaagcagctagttgagttttgtgatcagcgattcaggatcaaacttgataacgagagcctccctattgagcacatcacaaaaggagtcatgttccttgaccatgtgctgtgccgtcgagttgtgtacccaacactgcgttacactgctacaggaggcaagatcattagtgagaagggagttggtacactgctctcagtgacagctagtctgaagcagtgcatcaaacaattccggaagcttgagtttttgaaaggagaccgcgaacccgatccacaaccatgcttccgtatgttccacgccacacaatctcacacaaattcgcagatgaataagcttttactgacgatggcagagtggtatcgctacgctgataaccgcaagaaggttgtcaacttctgctcttacattataagggggtcactggcaaagttatatgctgccaagtacaagttgcggtcaagggcaaaggtctataagatcgcgtcaagaaatcttagtcggccattgaaggataagaaaggccagtcgccagagtatcacaatttgctgagaatgggcctagttgattcaattgatggtcttcagtatacaaggatgtcgatggttcctgatcctgattacacgccgttaccatttggatggcggccagatcatgagaagattttgctggagtacataaagctcacagatcaacagacattggaagagcagagaaactgcatcagggaggacgggcttataacaccacaggacaatatttcgatgcttgtatggggctacaagaaaaatgctgttttacttccttcaaaagtgagtgatgcccaaggatccacagaggaccttggttcagataccgatgaattggatgaaaaagagctaggaaatgagggtaaccaaagtttccaaaagcttgctgaaatgtcatgagttttggcaaactctgtagtgttcccaaggggtatttgactcgttgactggatggttggtttgtgactttgaaaacacaaaaccatctgctagttctttgctgactgctttgtgctggaacagtagttgcaaaatcaagggatgattctgagcctcctttgcttattacttgcgaaggacttgaatatgcagctataagcaggcctctaccaattatacgtgggcgagcactatttaaactgaagatatctcagttaccacgatcgtcctcctcgtcaccatcgcccctgccatccacgtcggcgccgccggaccagatgtcctcctcgtcgctaccccagccgtctgcctcgtcgtcgccgccccagccatctgcctcggctccactgcaatagccatatgccttggcgccactgccccagccgtcttcctcggcggcctgctcctcactgccttgtcgtgatcaagatgccccctagaaggatggttgggccgaggacgctcacggatcttggtggggccatgcagggtgtacctttcaactgtcaaagaatgaacacccacatgtgtactggttctggaggaacaaaaggatccaagaaagtgctagcacctaatgcagaagaccaagttggtagaataactaggtagaagacaaaggaactatccttagctgagaaagatctacatggttcaactacaaatacagaagagcacacattgatttttgccaattgtcctgcacaacatgatgacgagattcaaatctgtgatgaaggccaaacagatgccatgacagataaatggataaggggaaaaagtatgggcatgcaattggaacggataagccgaggcttaaacacagattccactggtcatcactgaaggcaagagacgtccagagttagaaaagatcaatgatctgcaaaaaggaatagatgatactaatgctctccttctctttagcctcaataagaagttggtcgattcattttagtgtggtccttgtatctcatattgctgttgtatggccctgattttgctgtccttttggtactgtccttagcactctacttgatgcttgtttgatgaaacatgatgctagttttgaaaattttgaagggcttggttcttgat

SEQ ID NO: 27818 - DNA, 1076 bp, Zea Mays
gtttttaccagggaattcgttcaaacttctttctaagctatggttattctaaggaaagatttgtatggtctctcatatctgcagttggaatattttgcttgggttccggtgctacaattgtgcatggagttcaaaatttatggaattctcatcctccagagaatattcactgggctgcattagtgattggtgggtccttcctaattgaaggtgcttcactgcttgttgctataaaggctgttaggaaaggtgcagaagcagagggaatgagtatctgggactatatctggcgtggtcatgatccaacttccgttgctgttatgactgaagatggtgctgctgttacaggccttgctattgctgcagcatctttggtagctgttcaaatgacaggaaatgctatgtatgatccaattggctcaatcattgttggcaatttactggggatggttgctatttttctcattcagaggaataggcatgctttaattggccgggccattgatgatcatgacatgcaacgagtccttgaatttctgaagtctgatccggttgtagatgctctttatgattgcaaaagtgaggtgattgggccaggtttttttagattcaaggctgaaattgatttcaatggagttgttctggtacaaaattatttggaaaggactggacgtgggagttgggcaaaacagttccgggaagctgcaatgtccaaggatgatacggaattgctaagggtcatggccaactacggggaggatgtagttgaagctctgggatatgaagtggatcggctggagtctgagatccaaaagcttgtgcctgggattaaacatgttgacatcgaggcacacaatcccgaaggacttgctcttagagcagaagttttgtagattacctgtgtacattgcatttgattaacactgttgctggtcgctgccagtttgatttgggtccaccaccattcgataagattgtcttccattggcaatgtaagaatcagatggctgttgttgcgtagcgaggcggtttttttatttggaagaagacgtggtcgcgcctgacatggaaggctt

SEQ ID NO: 27819 - DNA, 3392 bp, Zea Mays
gacccgcccatgtcccctcgatagcaccccctgttctttcccatctctccaactctccttgcccggctgccccacacctctgctcttccctctcgcctcccgccgttacagcttgcagctccagccccaacccccgtccctctctccctgagccgtcgccttcgccttcgctgcgaaatctagggtttacgccgcgcatcgggtaccgcgcacgcaccgaccgaccacccggcggtcggcgccgctacacgcgggctcgctctcaggtggttgagcgtggccggagaaggggaggggcgacactgctcgtgggtgggtcagccagtgtgccccacgaggaacggcaatcatgtcgcagacgaactgggaggcggataagatgctggatgtgtacatatatgactattttgtcaagagaaacctgcaggcaaccgcaaaggccttccaagcagaaggcaaggtctcatcagatccagttgctattgatgctcctggtggctttctctttgagtggtggtctgtattttgggatatattcatagcaagaacaaatgagaagcattcagatgttgcagcatcatatatcgagactcagctaattaaagcaagggaacaacaacaccagcagccacctcaacaacagcaacagcagcagcaaatacaaatgcaacaaatgctgttacatagagctgcacagcagcagcaacagcagcagcgtagagatggttctcttctcaatggtactgcaagtggattttctgggaatgatcctttaatccgacaaaatccagctaatgcgaattcgatggcagcaaaaatgtatgaagagaggttaaagctccctccccagcgggattctctggatgaggcgtcaataaagttgcagcaaagatatggagaaaatgtgggacaagtaattgatccgaaccaagcactattgaaagcagctgcagctggacaatcctctgggcaaattttgcatgggactgctagtggtttgtcaggtactccgcaacaagttcaggcaagaagcccacaacaaccacctacagcagaacagaatatcaggaccgagatcaatccagtgttgacaccaagagcagcaggcactgagggttcattgattggtatccaaggatctaatcaggctggaaacaatttaactctgaaaggctggccgctcacgggacttgatcattttcgctctggaattctgcagcagaagccatttatgcaatctccacagcaatttcagcagctccagtttctgaccccacagcagcagcagcagcttttgctgcacgctcagcaaaatctgtcgtcctcgatgtcaagcgatgttgataccaggagattaaggatgcttcttaacaacaggaatgtggtccttggacaggatgggcagacaaatagcggcggtgatgttatcccaaatattggttcgccagggcaaagtggtggatcgcgtaatgatatagatatactaataaagaagaaatttgctcttctacagcagcagcagcagcagcaaagtcatagccagcagcagcagcttcagcaacctgcgctctctggacagcaatctcaaagttcaaaccagcttctccatcagcatggaaaaccaggagttgggagcttgcctattgatggaaacttgccaaactcttttggatttcctgaacaaggatcaaagaagagaaagaaacctgtctcatcctctggtagagctaatagttcaggaacagcgaacactgctgggccatctcctagctctgcaccctcaacaccatctactcacacgccaggagatgcaatgtccattccacagctgcagtataatggtggcccttcaaaaccattgatgatgtttggctctgatggcactggaagcttgacttctccagcaaacccgctgggtgatgttgaacgtctgttggaagatggttccttggatgaaaatgtagaatcttttttatcgcaagatgacatggatcctcgagaaacaatgggacgctgcatggattctagtaaagcagggttgggttttactgaggttgcaaaagcccgtgcgagtacaaacaaagttgtttgttgccatttctcattggatgggaaacttcttgccaccggagggcatgataaaaaggtcgttttatggtttacagatgtgctaaaacgtaaatccgcattagaagagcactcttccctaattacagatgtccgattcagccctggcatgacccgccttgccacatcttcctttgacaaaaccgtgcgggtttgggacgctgacaatccagattattcgctacgcacttttacaggtcattcagcatctgtcatgtcacttgattttcatccgaacaaagaagacatcgtttgttcgtgtgatagtgatggtgaagtgcggtgttggagcataaataatggtagttgtgtgacctgcgttagggttttcaatggaggagctactcggttaagatttcaacctcgccagggtaaatatctggcagctgcctcagaaaagggaatatccatactggatgcggagacattacaagtttgtagaactcctttgcagggccacgtacagattattcagtcagtatgttgggatgccgcgggcaactatctggcgtctgtcagtgaagattctgtcagggtgtggtcatttacctcagggaactacatcgaatgcatacatgagctgatctgcagcgggaacaagttccattcgtgtgtttttcacccaaattacccgaatttgcttataatcggttgttatgagtccctagagctttgggacataagggagaagaacacggtgacaatcagcaacgctcatgacggcatggttgctgccctagccgcgtcaagtgcatcggggctggttgcatcagtgagtcatgatcagctcgttaagctctggaggtgacactgaacacagcaacgctcgtctgtgtcattctcatttccagtgtcgtggcaaaagcgaaagggcagctgatctgatctcctaggttgatttgcgactgtggcatgcgcaaactattcaaatagttgtcagtaatgtgcttcccttatttctttgtttgtttatccatgccgggtgatactatgttacaattttatctatttagagaactgctattataatttgacctcccacttaggcctatttggctactctagtatttattccaatccatgtgtattgaagtgggttagggtgtaaattagtttaatttatacacaattcaactcaatacatgtggatttagttgaatactagggattaatgtaaatactatagtatccaaataaagtaggcttatgttcatttcatcccctagtccacggggattgaaggagattggagtggactgatagtg

SEQ ID NO: 27820 - DNA, 159 bp, Zea Mays
cctgaaaataagaagccatatactgcgtcagctgtccgacctgctcctgcgctgctcgagcctgctcctgtggtgcccgagtctcctcctccagctgagcctctcgagcagacctggaggagcgagaactccctgccgaagacgatgccttcccttgac

SEQ ID NO: 27821 - DNA, 3236 bp, Zea Mays
gcgccctcatcctgttttgcttgcccgcatccccgtcagtcattttggtgaaaaccgaaaagcgcctcccctcctgctctgctcctgcctctctcgtcactcgtcattgcggccgggcactgggccactggcatcgtaacaactgccgatacgcccgagacagcgcgggcggagccagcgagagggaaggccatgaggtcgcagctcaacgcgtccttctcgccgccgccctcgctccggcgagctctcccctctgccacgccccgcgccctcaggttccacgcgttcccgtggcggttccgcgctcctcagcaccacggccgcggcgctggagctcgctgcgctaccaatctgcccgcgcccggcagccatggagtcggagtgctcgcctccgagaggagggccgacgatggcgacactaccgtgaaaaatgcagatgcgcctagcacttcaacggcgacgcagggaaacctcaacatggctgccattgttagcatagcattctgctttctacacagaattgtttctggacggatgcagtcgatgatgaatttgttcccttggatgtcaaacggcattgcaagcttgccatttgcttgcatatctgatcctaccagaaaacccatgcctcttaagctagatttgactcttccaccactgcctgatttcggatggaatttttcgcgactgtactatcggttcaattctcagcttgatcggaacattgccttgtctatcattaccttgctcatcacttgcttttcatttgtcattgttggaggattactgtttcataagttcaggaagcaacaacaatccctggaggactgcttttgggaagcttgggcatgtctatgttcatcatctacccatctaaggcaaaagacacgtgttgagcgtgtcattgggttctttcttgctatctggggtatattattctattctcgattattaagtgcaatgacagaacaatttagaaaccagatgcataaagtaagggaaggggcacaggtgcaggttattgaggatgatcatatcattatttgtggagtcaatagtcatctgatgtctatattgaaccaattgaataagtaccatgaatcatcaattcgcttaggtttagctacagcaaggaagcagaaaatccttcttctctccgatcttccaaggaagcagattgataaacttgcagatagcttggccaaagatttaaaccatattgatgtattcaccaagagttgtagtcttagcatgtcaacgtcatttgagagagcagcagcacacaaagcaaaatctataattatcttgccagcacagcatgaacgatatgaagtggatacagatgcatttgtctctctattggctctacaaccctgtaaacaaattgcacctgttcctatcattgtcgaggcttccaatgcaaccacttgtgaacttctgaaatcaatcactggcttaaatgtgcaacctgtggagatggttgcttctaagttatttgtgcagtgctctaggcaaaaggaccttctgaaaatctacaagcacttgcttaatcagcacaaaaatgttttcaaccttttcaggcggcctgaattagagggcatgaagtatatggatgtgagacgtaaaatccatgatgcagtcgtttgtggtatcttccggtctggaaaaattcattttcacccaagcgaggaagaactactgaaagaaacagacaaattgcttcttattgctcctgttcgtgggatgaaaagaccacaatatagagcattaagtgtacggaaagaaacacaaacattgagtcgtaactcagagccaagagagggtcaaggatcatttaatatggctactaccatggataatgaaacacggctaaataacattgtaaagcgccccttgaaatctctttctaagagcagtgattatatgcttggacccaaggaatgtgtacttattgttggttggcggccaaaagttaccgaaatgatacgggagtacgataattaccttggacctggtagtacagtggaaatcttgtcggaaacccctattaaagagaggagcagtatcatcaacccccttttgcagagccagcttaaaaatgttaaagttactcaccgggtggggtgtcctttgaactacgatactctgaaggaaacaataattaacgtacgagaatctgccaagtcagataaagaggttccactgtcaatagttgtgatatctgacagagactggtttgttggagatgctgcacaggctgataaacagttggcatacacccttcttcttgctgaaaacatttgccagaaacatggcgttatggttgagaatcttgtatcagaaatcgttgacatgggactaggaaaacaaatatctaaaataagaccatccctttcatttattggagcagaggaaataatgagtcgtgtgacagcacaagttgcggaaagtagtgagctgaatgaagtatggaaggatatcctgaacgctgaaggcgatgagatctatattaaggaaattgggctgtacatgaaggaaggagagaaaatatcattcttggagctctctgaaagagcagttttacgccgtgaagttgcgattggttacatcaaggacggcaagcagcatattaatcctatcaacaaatcggagccgctgtcccttgaaatgaatgattcgctcattgtgatatcggagtttgaaggtgaacaaccaattatgatgggcggagaaacttcaggatgaaattttcagctttatatctcttcacagaaactctaacaactcttgctaccatgaagagatgacatataacctgtttataatccttttctttttgtacaaagggaaagcaaaatatagtttaaaggccacaaatcaagttttgttcctcccatagccgtagaacttctttgatgcaaatattttactgcacagtttaaccgcagaatcttttctatttatctgtaaacatagtgaataacacaggcaacttgtatggtacagatgtctgaataaaggaaggatgaaggaaaattgattgactatgttccttgttgtttccttctgactaatgaatacaatgtttccatttttttagtcctgagctagacaaaatcagctaggtatggccttgctgttctctttgggagataaattcgtcgcctctagcatttggcacaagaaaagtttgttttacactttgcttcattaaccaagccactgcttcagccttt

SEQ ID NO: 27822 - DNA, 2311 bp, Zea Mays
aatcatagacaagctacttatacaatatatatatggtacgtccctttctactaccagtaccagctgctatactatactgctcccagttcttcctgccctgctgtgctggttcccaatcctcacactgattgtggccttccagttcttgtggtctctcaaccagcatctgatacccaattcctcgcacaaacctgccacacgcaatgtccaagaccgagagcaggaagctgtcggacgactatgaggtcgcggaggtcctcggccgaggcggattctcgatcgtgaggcggggagtgagcaagtcagaggggaaggcggctcaacaggtcgccataaagaccctgcgaaggctgggcccggccaccacgaccggcgggagcacgctgccgccgcagcaaggctcaaataagggcggcggcctggttccgacgtggaagcaggtgtcgtccatctccgacgcgctgctcaccaacgagatcctcgtgatgcggcggatcgtggaggccgtggcgccgcaccccaacgtcatcgcgctgcacgacgtgtacgaggacgcgcgcggcgtgcacctggtcctggagctctgctcgggcggcgagctgttcgaccggatcgtggggcgcgaccgccactactcggagttcgacgcggcgggcgtcgtccgccagatcgcgcgcgggctgcaggcgctccacggcgcgggcgtcgtgcaccgggacctcaagcccgagaactgcctcttcgccgacaggggcgaggcctccacgctcaagatcatggatttcggcctcagctccgtcgaggacttcagcgaccccgtcgtcaccctgttcggctcgatcgactacgtctcgccggaggccctctcgaggcaggatgtctcggctgccagcgacatgtggtctgttggggtgattctgtatatcctcttgtccggatgcccgccgttccatgcaccaactaatcgagagaagcagcagaggatactgcagggagagttcagtttccaggaccatacatggaagacaatctcttcatcagccaaagaactgatctccagtcttctctctgttgagccttacaagaggccaacagcaagtgacctgctggggcatccttgggtgataggggactgcgcgaagcaggacctcatggacgcggaggtcgtgacgaagctgcagaggttcaacgccagaaggaagctgcgggcggcggcgatcgccagcgtgctcagcagcaaggtggcgctgcggacgaagcggctgcggaacctgctgggacggcatgacctgagctccgaggagctcgacaacctgcgggctcactttgcacggatatgcgccgacggcgagaacgcgacgctggcggagttcgagcaggtgctgagggcgatgaggctggaggcgctggtcccgctggcgccgcgcgtgttcgacctgttcgacaacaaccgcgacggcacggtggacatgagggagatcctgtgcgggctgtccagcctccgcaactcccgcggcgacgacgcgctccggctctgcttccagatgtacgacgccgaccgctccgggtgcataagcaaggacgagctggcgtcgatgctgcgagtaagaagccccgtccgtccttctccttcatgcgctgcccgaggagtgccttccgggcgacatcacggagcccgggaagctggacgaggtgttcgacgagatggacgccaacggcgacggcaaggtgagcttcgaggagttcaaggcggccatgcagaaggacagcgccctccaggacgtcgtcctctcgtccctccggccgccgccgccgccatagctagacggggagagagattccaactcgttcaacttcattcccacgagaacgcaccattgattacagtaccgttcgaatcatttaatcagtctccggcatgtgccgttgtccgatccggccggctagctgttggaaactacgggtcgtgggaaagcctcgatggatcctgctagatatggctgtgctgttatgtgtttctggatcctgctagattagctggctgtgttgttatgggtggcggccacagatgttttttttacatatggctagtttagaagttacaaaatcgaaaggggttcgagaggctaaaatcacttccttattcaactttgaatggaggagattttagtccctccaattcacttcggtttttgtactcctaaactagcttttaaggtagaaaaataaacgtgtcaagagtggtgaaatcacatgtggcaaaaaagacacgacgctgtcaaattttgaaaggataaaaaaggataacggt

SEQ ID NO: 27823 - DNA, 2665 bp, Zea Mays
ttggtaatatgtatttagcttctcgaaccttaaatatatgttataaaaatatcagtgacaacctttacgaaacgaaggtagtagtttttgtacattttttagtaagacaaagtttaactttgatttttaaaagtcaaacattatttgaatttaaaacgtgtgtggaattgaaaaatcgatggctagctaatcaaattggtcaataaactagtcaacgtgatcaaactaaaaaaatgttgcactttattacttgagaaattttccagtagaaattttccagttgaaattttaaaagaataaatctaaataattaatgaagtgtttcttggcgcgcttaaacttctcgaaaatattgtgctttcggctttcgcgctctgtttatccgcgccaaaaaattcccccccccctaaagtgttggaaccaccctcccatgtttctcgatcacacctcctagaaatctcctccggttcttccacctccctgtagttctcgctctcctgccaccattctcttcgtgctcctgctccatatgccctcctttcagtctgctgcttgatgatccatcgcccagctgctggttgatccgtcgcccagctggtaacagatttcttcgtgggtgcagtagtaccataactgacccaccctctaatctttactccgacctacaagggaaagaagtaatgccaatgaaacacagaagactacaaagtctgaacttagaagctgagacacaggaaaacgtggaacaacatgaagatgtccaagatccacaaccagagctcaccattgggtttcctgagggagaagcgccaacaaggaataagtcattcaaaataatatggcaaaatggagttgttcgggaggtttttagaaatttccgaacagctgaattgtgggatctgaaaggaggaagagtactagttgaaactgacaagaatggcattcccaatcagtggtctgaatccattctctcgtcataccttggtgagcttgcacagaattcatcatttgcaccattacacattccgagatgggacaacaaattattcaaaggtccaaaggaacgcatcatcaaagatgttgagaaaaaatttatctatagtagtgagacaaaatggtctactcgagattggattcttaagacagtgaataaaaggtggagagactacaagtcagacttgaagaaacaatacttcaatccagataagaggtcttttgaccagattgaaaaggatgtccctgatggtgtgaatgaaaatcaatggagttttctgttaggcatatggtgcagtgaagcacatcagaaattatgccggacaaatgcggaatctggaaagaagcagaggcatccacacactagcggtaggaaaagccatgctagacttaagaaggagatggaagacaagaagaaaggaagcatcactaaaattgatctttgggacgagtctcataagaagaggaatgggaactatgtcaatcaaaatgtgcaaacacttatgggtaaggccttcgatgaattagagaacaggaggaaaggacaaggggacactttctactagtgattatgatgatgtgtttgagaatgtcataagaaaagacttgaacattcgtgggtactatgatgatacacattggagcaatgaaactgattcacatgttcaatcagaggagaacaaaatgattagaagggacctagagcttgctatttctgggtttaggaacattagagcattcctagaaaaaagtttccagaagaggaattgctaagcacaattctagctactggatctggaagcactacacaggttgatactaaagacaatgaaaatgtctcattgcaatatgataatgtagaacgatccagttatgagaaatcaccttcaccatacaatgaacagatttatactagagattataatattgccaaggtgggttgctctgatcattcagtaccaaatgacaacatagctttcagggaatcacaagttacaaggtctagtgacttgaaccaggaactcaacaatggatcactatctctagataaagaaatgtctgataaggaaactcaaagcaagcaacaacaacaaagcaaattgcaacagaagactgtcttgttgtactcaacaaggaaaagaaaactaggccaagtttttgctgttggtaatcttatatctagagatactactcatgaaattggaggaactgtacttggggatggatattatgctgttgcggttcattatcttaacaatgttgaagatgaaagattacctcgaccacacggagatcttaaaactttggaggatgctgtgggcatgtgtgttgcttggcctcgcacacatcttaaaagggtgaagccaactactgagaagcgcacttgaatggttagaagactgaagatgcaactaatgaatgagcaagtgttatagtggagagtagttctaggatcaaaagttctagttgtcaatctacttgtttaattgtgttaggaacctcattttattcactcttgtatgtctaatctacctcaagaccacttcgtttggattgaaaatacttatgtattgttgcttacacatgaagcatttaattgatctgttatatatatgaaccttgtgtcttgtatatatatgtgctcaaattgagtgtttgtgtataagcaaaa

SEQ ID NO: 27824 - DNA, 2131 bp, Zea Mays
accgcacccagaggaggcaaggagcccatccacatccacctggtcctgctctcaccacaccgccgcgccaatggcggctcgccggcagcaccgccgcggcttcccgctggtcccgctcctgctctccctcctggccgccgccgcgtacggccgcctcatctccgacggcggcccgtccgcgcagctcctctcggtgatccgcctctcggggtcctcgccggccgcgggggcggccgccaaggccgaggagaagtgcgagcagtcctacgggttcctcccctgcaccaccaccgtgctcgggaacctcttcctcgtgctgacgtacggctacctcatgtacaaggcggccacgtacctgtcggcggggagcgagctgctgctcgagatcatggggcccggcctcgtcggcggcctcctcctccccatcctcggcgccctccccgacgcgctcctcgtgctcgtatctggcctgtccgggagtaaagaggaggcacagagtcaggtactgatcggaatggggctgcttgctggttccaccgtcttcctcctcaccctgctttgggggacctgtgtcgttgttggcaaatgtgaccttgggccaaaccgtgaggcagttgatgtaacagacaccaagggcttcagcttgactggcactggtattacaaccgacgtgcagaccagctatgcagcgcggatcatggggctatctgttatccccttcatcatcgctcagttcccaaagatgttgaagacccaccacgggcagcgtctagctatgttgctggccctcattgtgtcattcttgctcgtgctttcctactgtctgtatcaggttttccagccttggattcagaggaggaagcttgcatacgcaaagcacaagcacgtgatctctgggatactgaggcacgcccagatgcagtcactcggccgtctgctaaacgatgatggcacgcccaatgacgacgtcatcagaaagtgcgttcccctgaacatcctgttgttgcataaccacggctgttccgcaagatcgacatggaccagagcgaatccctgtcccgtgctgagctgcacgccctcatcgtcggtatcaacttcgaggaggttgactttgacaggacggatgcggtggacaaggtcatggacgacttcgacacgtcccgcaacgatgtcgttgagcaggaggagtttgtgcaggggatgaagaaatggctcaacgaggccaagcgcagcgtgcccgtgggcggcgccttctccaccaagttcatcaatgaataccacgagaggacgaggcaggagcacaacgagctggttgacaggtccgatgaggcggtggagagcgtggagaaccccgggtggtgcatcgccaaggccgtggcgctgctgctgctgggcgccgccatcgcggccgcgttcgcggacccgctcgtggacgccgtccacaacttctccaacgccacgcacatcccgtccttcttcatctccttcatcgcccttccgctcgcgaccaactccagcgaggccgtctccgccatcatcttcgccagcaggaagaagcagcggacctgctccctcacattctccgaggtgtatggcggcgtgacgatgaacaacacgctgtgcctcggcgtgttcctggcgctcatctacttcaggaacctgacatgggacttctcgtcggaggtgctcatcatcctgctcgtctgcgtcgtcatggccctcttcaccagcttccggaccacgttcccgctctggacctgcctcgtcgcctacatgctctacccgttctcgctggtcctcgtctacatcctcgactacgtctttggctggtcataggctctcatcggcgcctcgagtgaacacgaccctgattggagcacctgggttttaacagccgccggtgtttctgcttgaccttgtaattttgactcatgtgaagctatctgtccagacttcttatatttctttgtgtatccaaagcacgcacgtacttcgtcaaacagcagctgcatgttttcagctcccttgtctgtacgtacatattgattttattttacctcaattgttagagttgtttgttataaagtttaaactaaaatttacaccaaaccggttaaaacacatatatagg

SEQ ID NO: 27825 - DNA, 3973 bp, Zea Mays
cccaagatgtggtttctattctatcgccgtcattgcgctctcctcccgttgtaaacccaaagaccttcgtcgcacggacccgtccttgctaattgctcactccatcggcgccgggtcatcctcgtggccccgtgccgcaccgcgaaaccaaaatctcgcaatcctaacctaccccagcgacctagcgccgtcgtcgctcgacctcccctcgccgcgccgggccccccagagggtctcaggccatagcgaggagccggggttccgctccgacccgaatccgagcctcccccaggacgcagcgggtctcgtttccgtactcgtagcaggaagtttcgcgcgagggattgattgtcgagctagagatgtacgggcagggagggagcttcaatccacactatcgccatggcccgcctccgccccagcagcaagctggggtaactgggtccttcccccagcaacctgtgccaccgcctcggccaccttacccacagcaccctggagtgcggcctccggctgggccgtaccagcatggcgtgctgccacatcagaaccagccatacccctttgcgcagcatggtcggatgcaccagatgccaatgcttccgccacagcagagaggttatgggtcgatgccaatgccagggtcgctgcctccgcaacaagctatgcatcaggcccctccacagtatccgcccctccctccacctccacctcggccgcctggctttgttcatgataattcatgcggcgcagaggcagaagcaaaagaaggtgcatctgaaggtggtcgttttgccaaaactctggaagcagctactcagctaattgtttctgatgactcagatatggacatggatggggatgaggactctccatcaaagcagccccttaccccagaaacttctttgcctgtgactgttgaatgtactggaaatgttaatgtgtcaaagttcagtgatgtttcaactgaggacaatgctaaaactgcggatgcaactgaggacaatgctaaaactgcgcatgcaactgaggacggtgggagcacattccaactgatacaaggttatggctccgatgacagtgcaaatgaggctgatgctggtcctggcagtgctaatacccttgtgacattgcctgaagataacctgcatggtcatttaagtgatagtaatactgagtttgattatcagaaacatgttaatgcaaaaggaaatgtgaatacccctcatggcactgagcaaaatggtaaggctgaaaattatcatctcaaggttgagagcaacccagtgaagcatggcacagatgtacttgggcatctggccaaagaagatacaagtggcagtgaaattgagggaggtcaaagtagtaaaaggcatgggaggatacaaaagaaacgaacccggagcatctcacctcagggtagaagtggtagtccagtgggggcaaacaagagcagtccatcccaaagttcttcacctggaaagcagagcaggccaccatttgctaagcgtctccattctgctgatgatggtaatgattcagaaggtagagttgttcagcaagagggcctgtcattgacatcaaaattggatagttcttctaatgatttaattggtaaagtgggagatgctgctgcggttggtgttgcccttgggcagcattgtcacagtgacaatttaatttctgagcattcacaactaatggctgctggtgctactcataagatgcaaatgccatgccccccatctgagtctctatcagacttaaatgtgtcttcatcagcaggtggcccaattcttacgaaccaacctgctgcaggtgtcccatatgtgtctgtagaaactaccaagagctccatgacatctaaacatctccagtctcatcctcagagtttgagtcctcctgaacacatgccatcctcaaatatgattcagctaccaggacagccatcatttgcaacatcagaattccctcaaatgcagttccaccataaagttgttgcaccagcaaatgaattcttgcagaaccagatgagaagctaccctccacaagatgtgtctcatcctagaccattcgatttccatcatcatactctcccaccagcagttccttctaaccagcagccttctaccattcctgttgagaatgctccagtacctcatcataacagatggccagagtattctggtggtgttggtctatcctattcatctcatcggcctccatatggtcagcatcaacctcctgggaatcttgattcaggaagtaacttggtttatccctctttccagagatatccatcaaatctaccagtcagtaacaatattggtcccttatctgatgccgatttgactaaatcgtctatcaaaccccactacaatccatttgcatctacctttgataaaacagatccaagtctagatattgggcctcctgtaagccctaatgcagttggttctgtttccacaacagcagaacacatgaatacactgtctccttttggtcgatccagagcacatgcccatggaaattctgcagaacctgtgcccaatagacaaaagttactccatcaggagtttgcttctggtgctccgtatgatccattagttgacagtattgaaccatcaagcagttcaatcaacaaggtagatcttcgtaaagagaagaactggagtgctgctgataggcgtgatgcatcgaaatttatgaacctagaagtggacagtgaaaatatgcatggactgggggttgttgctgagtcagaagttgagggacttggagaggtggcagcagatactgagacaggtgtggtggagaatgcaagtcctgagttcttgggtggtaaagattggaactcagatatccctgttgattttgacaatgaccaaacattggacaaaaataagaagggtaaagattccagatcaatgaagctttttaagagtgctattgcagattttgttaaggaagttcttaaaccatcatggaggcagggtaacatgagcaaagaggctttcaaaactattgtcaggaaaacagttgataaggtttccggttcagttcctagcagtcatattccaaaaacacctgccaagattaaacattatgtacaatcctcccaaaggaaggtgaccaaattagtaatggggtatgtcgacaagtatgtgaagccatagagtaatgtggcattgtgctgaatcagaactgtcatggttccagagtctgtgctgcattctactaaatgaggctgcaaatttggtaatctttctgatgaaacggttgttccacagtaaggtagtttgctctagttctgcaggaaatgctgtattttattggagtgacatgtctagatgtgcttccagtattgataatttgctgcctgatttcttgtaccctgtaagggtgcgatatttgtgcgaacatgctgctgaaagaactttgtttcttaatggtgattatgcatactgagagctgtaaggcttactgctgaatgaactttgtttctgaatggtgaatatgcatactgagagctaataatatcctgctctgctatcgttgaacgttgcctatgctaggagcttgtcgaaagctagtagacgcaacaagaaaaaggacagtattaccatcaaattgcctatggagtaatgaagactaccatcctttcgacgctggggcttagtatagacacttgtatccctgaaagaatatgttgtgccccagctcaaatttactagtatggtttcgaatctagtagtcagtatggtgtttttcagtagtttagccgttatatttagagtctgattccacaaattgacatagattttagcaaaactcacaaagtgcacgtacattgctgtcgtttctatttatgcttaagtatagaatataaaacataaagacatgtgtgttatgttggctaggtgagtgaatttgagtttggagctaagaactatggttctaatttctatttgcg

SEQ ID NO: 27826 - DNA, 2346 bp, Zea Mays
aacacccccttagatgcaacgctgatactgataccactaccacaggccgcagcgagggacgtcgccggcggcccccaccctgccggtcaattcgaactaatactccaatgcgttgctactttgctagtcaaaggacacgccccgccccccgcgacgcacacggcaccaggcacgccctccgtcaccgctcaggtgctcaccactgacgagccgccgcggcgtcatggccacagcagcgcccggtcccggctcccggtcgcggctcctcccccttgccctctcctccttcctcctcctcctcctcctcctcctcatcgcgccgggggccgccgcgcagccgtggcaatcctgcgggaacacggacaactactcagccaatagcacttaccagtccaacctcgcgagcctcgccaaggcgctccccgcgaacgcatcccggtcggcgacgctattcgcggagggcagcgccggcgccctccccgacgccgtctacgcgctcgcgctctgccgcggggacatcaacgccacggcctgcggcgcctgcgtcaccacggcgttccaggacgcgcagcagctgtgcgcctacaacaaggacgccgccgtgttctacgacgcctgctacctccgcttctccaacaaggacttcatcgccagcgccaccaacaacggcgatgccatagtcctcatgaactcgcagaacgtgagcccgcccgtgcgggccttcgacgccgccgtcgccgtgctcctcaacgccaccgccgactacgccgcggccaactcgtcacggcggttcgccacgggggaggagggcttcgacgcgaccgatcccaccatctacgggctcacgcagtgcacgccgaacatgtcgcccgccgagtgccggacctgcctccggagcataatttccgatatgccgcagtacctcagcggcaggcggggcgggaggattatcggcatgcgctgtaatttcagggagaagcagaaacagaacgggaattgttatagcaattgtattgcctatagttgctggcgtgctagctataactatggtttgtctctgtttcctgtggaggagaaggccagcaagagatcagacatcatcttattcagttaatcaatcagagattgaaagtattgattcacttcttctcgatatatcaatgctacgtgctgcaactgataactttgctgagagcaataggcttggtgaaggaggttttggtacagtctataagggtgtccttcctgacaaccaagaaattgcagtgaagaggctctcacagagctcagggcaaggaatacaagagctgaaaaatgagcttgttttggttgccaagcttcagcacaagaatcttgtcaggcttgttggtgtttgcttgcaagaatatgagaaactgcttgtgtatgaatacatgcccaacaaaagcatcgacaccattctttttgattctgagaaaagcaaggagctagattggggaaagagagttaagataatagatggaattgctcgagggttacagtatctccatgaagattctcagttgaagattattcaccgggaccttaaggcgagcaatgtccttttaaactctgattatactcctaagatatctgattttggcctagcaaggctatttggtggggatcaatcacgggaggtcacaaatcgagtcgtcggaacatatggatatatgtctccagagtatgccatgcgtggccactattctataaagtcagatgtcttcagcttcggcgtcttgatcctggaaatattaaccggaagaagcagcagtggttcctttaatatcgagcaatctgttgatctcttaagtcttgtctgggagcactggacaatgggaacaattgtggagatcatggatccatctctgagaggcaaagctcctgcagaacagatgctgaaaaatgtccatatcgggctactgtgtgttcaagataaccctgttgatagaccgaagatgtcaacagtaaacatcatgctcagcagtggcactatgcctctccagtctccattaaagccagcattcttcattcccaagagcggctactactcaactgttcattcagaatcatatcctatagcttcccgatccgtcgataatggcaagccaggggcgatatcaccaaacgaagtgtcaattacagagctggaaccaagatgaggccatagtagttggacatggttgtttgttgtagcatctaacacttgacgctagtggctaaggacttttttacccaggcacatgggtgacagtttagccttagaattgattgtcattagtgcttgagatcttttttcccttttgttcgaaccagaaatgagccggc

SEQ ID NO: 27827 - DNA, 1321 bp, Zea Mays
tcccgttcctattcccgggaggagacggtgtcgtctgtctctcgccgttctcgttcgtgccaatccaggcgaaacaaacggcgtgacgagagcggcagagcgtcagcgtccccccgcggccaccgtaccgcatcgtcgtcgtccccagccaacccaacccagcgcaccccaaacgaatccagccccacctcagccgcggcgcggacctcggaatctcagcgccggtgtgctcacggcaccgcagggcgcggcgtggccatggacatggacagggacagcgtggagtgcctctccctcccagacgctgccatggacgtggacaacgtcgacggccacccgcaccacggccatctcggtctcccgctccaccccgcccacctcccatcctctggtgccgggcgcgcgttccccaaggtgaatgccgggggcggcggagcgggcccggctgtagcgggagcggcgggcgcagcaggagcaggcggagggccgccggcgaccagcgtgcacgagctgctcgagtgccccgtctgcactaactccatgttcccgcccatccatcagtgtcaaaatggacatactttgtgttcgacatgcaaggccagggtgcacaaccggtgccctacatgcagacaagagcttggtgatatcaggtattccattgttttgggcagtacttctgcctgcacttcgaggcattccagctcggaatggctccagtctatatggctttcctccgattcatgggtgatgagaatgaagcaaggaactatacatatagcctagaggttggtggtaatgggaggaaaatggtatgggaaggtactcctagaagcatccgtgacagccaccgcaaggtccgtgacagccatgatggcctcatcatccagaggaatatggcgctgttcttctctggtggtgacaggaaggagctgaagctgagggtgactgggcggatctggaaagagcagacgaaccccgatggagcctgcattcctaacctttgcagctgagcaagggagacgattgaaaagaagaagaaaaaaaagaaagaaaatattgtgttatttggctggcttttttaaaaaattgtcatgctatgttttcattatagcctgctgttaaaatattgtaccagtatgtagggtgtaaaatgctcttgtaaagtaattgtgtatatcgaattcatttacaagttgtaccaccaatccctgtgttatgttgatgtgttgtttgagttccgttgtggatgtattgggctcaagaagtgcctaatgttcatgtttatttgatagactgaatgttacctttttttttctcgaac

SEQ ID NO: 27828 - DNA, 2037 bp, Zea Mays
tttagttttactgttgtgggaacctttgagagcagtacagttttcatcattaacttggtagtcagaatctgcacgtcagcacgtcatctccagattactcctttcgattagcttatgcttcaaagttcaaacctgagaacaagtagtacatccccattaggtgaccctattccttttcttcactcggtgtataatccccctttgctgcaatcaagcttctcaaacataataagcaaatagtctcttcacgtgattgccaaaattagtcaagacgggtgctctttgctgcgtggccgctaggccacatgggacgaagtctgaccctgcaagcagagatcgttctatggatcctactgagcctcgttggcgcataaactcgagcttctctcccccaacatcaaggagatgggactgtcgttattcatcagatggattgccccacagagttcatgatgctcctcatgatcacccaccttatgtttcatcattgtcatcccatagcaaaggaagcagaaatgcatttggcagtgatcagtacctcagtcaccatcattctgtgtctgatggagcactttcttattttgggagtccagctgacagccttcaggctccacgctggacgccctctcttcaaagatttgatcttggtgaattctctacccctgcaggaggatcaaggccagaaacttctgactatcctcagtcaagtgagaggccactgactgccacaagcagtttcagttctgcatccccattttcagaatcaagccagttagcttcatctagtaaacaaccagccccatatctacctcgcaaccatatgggcaggcggtctttcatgtctaaaccagtctacccacttgtcttccggaatcctgtctcagaatcagaagcgtgcaggatgcttgaggttggtaatgccgggcgagcgacaccaagtgatgacagccaagcttctcctctgtggcgtcgcagcttggcgagcccagatctcaagttccacaatgcaccgaatgaacttgggaagatggaaacctcacccgaaccgaacacaagctcaagaagggaagggttcagatggagcaacgccagcagttatgactttggatacgatggagatgccattgacatttcagatcatatcagcatcgagtcccagagatctcccacgagctcagcgaggttcctgaagtgtgggctgtgcgagagattcctgcaccagaaatcaccctggacctcgaacaggattgttcgaaacgccgacatgccagtggcagcagttctgccttgccgacatgtcttccacgcggattgcttggaggaaagcactgccaagacagaagtccatgaaccaccttgccccctgtgcgcgcgagccactgacgatgaagggcacgtgtcgttctcagaacctctgcatgttgccctccgatctgctcgcaggaaccttttgttgggcactggtgctggtgggaacagcggcatttctgaccctcctcgcactgatcgtggcttgaagaggaacaactctgcagtcatgcctaggcgcagcggcggcgcattgttccgcaatcgcttcaagaaacagttccccttcaaagcgaggatcgggaaggagctctttggcggtagggttctcaacaaggttggattgtctttgtcttcaggtcagcatgatgatcatcgacagcaagcgccaaagcatgaccggcccatgaagtagctagatcttagtggcacagagtataatatgttgtgtgccctcctgatattttatctatggcatctgttatcgaaacttggcatccatgcgcagcagtcgtccaagatgggggccctgtatggattatggaaggctgcttgcattgcgtgtaacagtagcaccttgccattgcatgtattttgcatgtagcacagtaagaatctatgccctgtgattgatatgttctgaatgttccgcttgatctgttcacattggctgcttgcattgcgtgttgacttgagcaattggaggaatagaattgatgaccattccca

SEQ ID NO: 27829 - DNA, 3901 bp, Zea Mays
atgcattactagccaaccaaatcggtcgctgagccaggccccaggcccaggcacgccgctcttctcggcagtaacggaagccgagtcctctcccaccccggggcgggactcgccacttcccattcctgtgcgcctgcctcgcctcgcctcgcgtcgcactacccacccccaccagccaccaccaccaccaccaccaccaccaaccaaatggagcgcgcacgccgccacgccagccgcgcgctgctgcgccgcctgctcgcggcggccgcggcctcgcccgccgcgtccccggccacgtcgtcccgcggcatctccaccctgtcgccgccgccgccagccgcggggaagcagcagcgccgctgctgccctccaccccgcggcgcgcaccagcacgcgcaggcgcgggcggtgtcggtgtcggcgctgcagccgagcgacaccttcccgcggcggcacaactccgcgacgcccgccgagcaggaggccatggcgtccgcgtgcggcttcggcggcgtcgacgcgctggtcgacgccacggtcccgcccgccatccgcgcgccgccgatgcggttccccggcaggttcgacgccgggttcaccgagtcgcagatgctggaccacatgcggcgcctggcgtccatgaacagggacttcaagtccttcatcgggatgggctactacggcacccacgtccccgcggtggtgctgcgcaacctcatggagaacccggcctggtacacccagtacaccccgtaccaggccgagatcgcgcagggccgcctcgagtcgctgctcaactaccagaccatggtcgccgacctcaccggcctccccatgtccaacgcctccctcctcgacgaggccaccgccgccgccgaggccatggccatgtgcagcgccatcctcaggggcaagaagaggactttcctcatcgcctccaactgccacccgcagaccatcgacgtgtgccgcacccgctccgacggcttcggcatccgggtcgtcgtcgccgacgccaaggacctggactacggcggcggcgacgtctgcggcgtgctcgtgcagtaccccggcacggagggcgaggtgctcgactacgccgagttcgtccgggacgcgcacgcccacggcgtcaaggtcgtcatggccaccgacctgctcgcgctcaccgcgctgcgcccgcccggcgagatcggcgccgacatcgccgtcggctccgcgcagcgcttcggcgtgcccatgggatacggcggcccgcacgccgcgttcctcgccacgtcgcaggagtacaagcgcctcatgcccggccgtatcatcggagttagcgtcgactccaccggcaggcccgcgctccgcatggcgatgcagacccgggaacagcacatccgtcgcgacaaggccaccagcaacatctgcactgcccaggccttgctcgccaacatggctgccatgtacgctgtctaccatggcccagcggggctgaaggcgatcgctgaccgggttcatggcctggctggcaccttcgcccacggcctcaagaagctcgggacagtgacggtgcaggacctgcccttcttcgacacggtcagggtcacgtgctccgatgcacgtgcaatcgccaaggaagctgtcaagaacgagatgaaccttcgggtcgtcgatgccaacacgatcactgtagcatttgatgagacctccaccctggaggatgttgacaagctgttcaaggtgttcaacaacggcaaatcagccagtttcacagccgaatccatcgcaccagaggtctcaagctcaattcctagcagccttgctcgcgagagcccctacctaacgcatccagtcttcaacatagcatgagcttcttcgttacctgcataagttgcagtccaaggatctctcgctatgccacagtatgatccctctgggttcttgcacaatgaagctaaacgctactgttgagatgatacctgttacatttcccaactttgcgaacctgcacccatttgcccccactgatcaggctgcagggtaccatgaaatgtttgacgacttgggcaacctgttatgcacgatcacaggttttgattctttctctttgcaaccaaatgctggtgctgcaggagagtatgctggattgatggttatccgtgcttaccacaactcaagaggagaccaccaccgcgatgtctgcatcattcctgtctcagcacacggcacgaaccctgcaagtgctgctatggttggaatgaagattgttgctgttggaactgatgccaagggtaacataaacatcgaggaattgaggaaagctgcagaagcaaacaaggacaacttggctgctctgatggttacctacccttcaactcacggagtctatgaagaaggcattgatgagatctgcaagatcattcatgaaaatggcggacaggtctacatggacggggctaacatgaatgctcaggttgggttaacaagccctggttttattggagctgatgtttgtcaccttaaccttcacaagacattttgcattccacatggtggaggcggtcccggcatgggtcctattggggttaagaagcatttggcaccatttttaccatctcacccagtgattcccactggtggctttcctctccctgagaaaacggaccctcttggcaccatttctgctgctccatggggatctgctttgattctgccaatttcctacacatatatagccatgatgggctcacaggggctcactgatgcttcgaagatcgcgatcttgaatgcaaactacatggcaaaacgtctagagaaacactacccagttctgttccgtggagtcaacggaactgttgcccatgaattcatcattgatctaagggcatttaagacgactgctggtatagagccggaggatgtggcaaagcgcttgatggactacgggttccacgcaccgaccatgtcatggcctgttcctggcacacttatgattgaaccaactgaaagtgagagcaaggccgaactggacaggttctgcgacgctcttatctccatcagggaagagattgcagagatagaaagcggcaaagcagatgtgcttaacaatgtcctgaagggcgctcctcacccaccgcaactcttgatgggtgacacatggagcaagccgtattccagggagtacgctgcgttccccgcggcatggctccggggcgccaagttctggccaacaactggtcgtgtggacaacgtctacggggaccgcaacctcatctgcacgctgcagcaggcgacccaggtggccgaggaagccgcggccgcaactgcaactgcgtaatctcgtccgagaaccacgataattgatcgcggcgtgcgaaacatcctcaagaaactataatgcatgcttcctgtaggagggaagcatcgtcatcttcctcgtcatcctttctgcagtgtatatactagctcatggcagcgcctgatcccccaccaccaccgcgcgcacacacaaagctgccaccttgtaattttgtacattacttcattgcttctctgttattcccatttaataaattaaaaggaatagctttttattgaatataatttgtttctcttttcggaacaggcaagtagtcaacacggaagttatgtctatacatatttgatatgtccataacaaaaataaataaatgaaggggcattgttcgaaataagactaagagctgatttggtggtcagagatccatgggaggaatctctttgctattcaaatttgaataataaggagattcatccacatggatcctctagatcaacaaatcagctataagagacaacaaattggattcaggttggattcaaattatacttaatattaggccataaattggctgacgctcaatttattgtgtat

SEQ ID NO: 27830 - DNA, 1255 bp, Zea Mays
tgaacaaccgagtggcatggcaccagccagctccacggaaaagcaactccagcaagcaagcaagctccctctctctctctcatcgcgtggtgtgtacagtacagtagtgccctgtgctcctgctgtcccgcagccgcagtgctggagctcaagcaccaaggcatccagccggcgcccacaggacactgctagccccattcaagaatcttccagctttcccaaacagaaccaaccttcggccatggcttcttcttgatctgtggtgcgcgtgggtctccgtctcccctaccggtgtcgcaatctgcagtattttttccccttcggtgctagggaaaagagagagaaaatctcacatcttttgactgcagacatactagtttgatgcaagattgtcttggctgcactgtcctagagcaagtttctgtcacaagtgagatatttctgcgggttccaaaaaggaagcaacgacgaattgaaccatctgcagcttcttccgttgcattgcctcgtactgcatacatctgcagcttcttccgttgaattgagccaacaatgggtagggggagaggcagagggaggaaacagctcaccaacggcaggactcacgcggacaagaggagcagcggcgaggaggtcgccgcgcctgcaaggaagaggagggggcggccccagaagcgtgtagccgctgagaagaccattgaggcagagatgaaaaaactggtggaggaggccgatgatggcgacgaggactacgtggtgggagcaggggatggtggtgccaagccgaagggctccagaacagagcatgcttccgcaggagccggtggcactggcaacaagaggaacagggtgcacaatgaagaagagggctctagtctccttgacatggacgagaacagctccagcactcggtccagcaatgacgagtccaccagatccaatggcttccgccagtctggaagccgccggaagagcaccccacggcgagcggcggaggcagggctatagtcagaagttggagttggaatgcagcagattctttggtatcgtttaggcagatgctcttcagttttgtcgcacattcatatttttagttgcaatgttcaattttttgtcgtcttggtgtttgctaggcctacatctacatgagtgtaaaaacatatatataatactgattgcaagccatctgaattttgtgcttatgttaatgaagaaaatgtaagaacaaaccacgaagggtgtgactggtttgctg

SEQ ID NO: 27831 - DNA, 1308 bp, Zea Mays
agcccgccgcgacgtgtctcccgctcccgcgcgcccctttccggtgagcggccgccctcggctttccgctttccctcctctccctccctgccctgctgtgcactgctcggttgttcggtggccattaatttgcacgctgccaaaaatcacgcagccctcacgctttctggctcctcctcccctcctccgccgtcaggctcgccgcacagcggttttacactgtttcgacttcgcctcttcctccgcgtccgcgaccgcgaccgcgcgcgatagaccaaacagcacgggtcaagggccgaccggttcaagtctcggcggcgactcggattccactcgaccacgcggacgccatccgtgacattcaagtcccttgccgcgttttacttggccgctgagacctgagtctatcgggacacgagcagagttgcagagcggcagggaggttgctggtcgcgcggcttccaaccaactccatccatggacctcgcccggcgggaggcggacagggccgccgcagcggagttcgtggctctcgacatccggggcgagggggagtcgcctgcgaacgacccggaattgctgatggaatcctcatttgtcgccgctaaggagttcgagcgggatcggagaggagacgtcatttcttcctcctccggtgcgtatgagaagcagacagtgcctgtgcatgttgatgactgcccgagggaacacttacagccctccacgccaactgcaggtggtggtgcaaagcgtcgtcgttccagccgtcgtgttctgggatggcgtgatcccaggaaaatactcttcgcctttgcagcattgtccagcgtgggcactttgattctgctctactttacactctctatggggaagatgacaggaggtcaagctgatggccagtgatagccttgctctgtcttgcttgcaatagcattactaatatttatttgtacagaagaaactgaataactggctgctttctaatgtagtagccaccacatccctgcgtatatcttcatgatttcctgattttagatgtttgtacataggcacaggaaagttgtattacagatacagttttaagtgaaaagcttcttctcatgaggagcgttgaacagtccattttgagatgctagttaccggctgaaacaatgtttcttatttccaatatcgaagtctgtataagtggctgttgtttgagaaatttcagagatactatccaaagttccagacaccttggttcgattttttattttttttgtttcgaaaagttacagacacttttttttttttttttgctcctaaggg

SEQ ID NO: 27832 - DNA, 2001 bp, Zea Mays
tatgaagagactagtatatatgcatccttcttgttattcttgtatccgtgtcaatactctgaagtcttccactgatgctgtcatgcataaactgctggatttagtatgcaaaaatgagctctctgctgtaatcaatggattggaggttgttgaactgaatggtggagaccaatcacaagaagggtgctctctggtccacaagtgcccctatgcgggccttgaaaatgttttgtttgttcagggatcaggaccacatgtgctgcattatggtagccaaccagatcaagctgttaaggaagtagttgtaagtcgaaaatgtgcagagtcagttcttcggggtgcccaggtgtatgttcctggtgttttagcatgtagttcacatgttgaaaagggtgataaggttgcagtgtcagtcgctattgagcagcctgtcaaggaagatggctgggctgtgggcataacacgaggaaccgttttacaaggattgcaatcagatgcacattatgaagaaaggaagggtctgtacattggtcaaggaactgctgcaatgtcaagatctgcaatatttcgtgttcctcatgggattgcagtagagatgactgagagggtatacaagctcccatctttcaatgatgtgcttgaaggggaaatatttcttcagaatttaccaagtgttgtgacggctcgtgtccttgatccccagtcaggagagcgaatactagatatgtgcgctgctcctggaggaaaaacaacagcaattgctatccttatgagggacgaaggagaagttgttgcccttgatagatctcacaataaggtgatggatattctgaagttggcttctgagatggacttgagttgtattaaagcttataaacttgatgctctcaaatctgtacggaaaactgatgaagcaagaagccttggcatggctgataatcacagtgaagcaattgaaacaccaacagaggacccttgccatgccacagtaggtgggagatctaccagtgtagacgaagacagctcaacaacaacagtggtgttttctgataacaaaaacctaaattccaaaagatacattagcaaggcagaactcaggaagaatttaaggcagatgaagaatggacctggaagaaataattgctctggtggtagagttgaaaagtcaaaaggattttgtcctaacagctttgatcgtgtcctccttgatgctccatgttctgcgcttggcttgagacctcggctctttgctggtgaggaaactctagaatcgctgaaaaaacattcgaagtatcagaggaaaatgtttgatcaagctgtcaagctagttcgtcctggtggggtgattgtttattcaacgtgtactataaatccaggggagaatgaggctttggtgagatatgcattggatacctacaaatttctttcactagtatcacagtacccgaaagttggagggcctggtattgttggttcgtgcgagctgttcaacaagacatatactgaggaatggttgagagaggatgaagctgaccttgttcagaggtttgatccgtcatcatcagtggataccattggtttcttcatcgcgaaatttgatgttggagagaaagatgaataaacaaacgtgactgaaattccaatgtttggcattcacaacttacgctagggatatcagcattgaattttctgcaatcagatggctcacgtatacccatggagtggaatgcagcgtgccccctgaaattttgtttgccagtgtttgatattttcttttgttcgaagaacattgttcattatggtgaaatgatggggcaaattagattcaagctcctgtagtcccgtttccaagaaaaaagttaccgggtacccgtatccgtccgggtgtaccgggtattttctgggtattggtcctcccattccgtcctgtatctagggagcatttaaccgggtagcaccagcaaaattgtcctgatttaatattcgatatttggtttggct

SEQ ID NO: 27833 - DNA, 4681 bp, Zea Mays
ccgccacccccgcccaaaaaagaaaaagaaaaaaaacaccctcccttctccttgcttgtcagctcgcacccatggaaccctcgtcgccggccaccacggccaccttccctgctgccgtagaagaacatgagacgtaccctcccatggtgtcatcctctctattcccacttttccccttcgccgcctccacctcctctgctccccccgccgaatcccaatggctttcaaaccctagcttctccttcgatgcctcctccctgaacatcccggctaccacctcatcgtcgctcccgtcgccgcagagccactcgtccgatgaggacacgccgctgcaggccgctcctgcgaaatacgagctggtgccttcttcgccgtcctccgacgaggagagggggtcgcggaggaagagaagtgggaggaggaaacggaagcgcgagaaggagcgctatgatggggcagcgacatcgcggaaggctgggattcgtgcctgggctggattggagacgaagccagccaaggattactatgtcgacgcgaagggcgaccatgataacctggcttttggatccctctacagaatggatgttgcacgctacagatcccagaatatgatggaggcatttggtttaaatcatctgaggtttggttcatcacatattgatttggattcagacttggatggaatggataacaaagtaagagctggaggccgttactattctgcaaaaaatgcagtttctgaaagaaataaaggtttcaaacatctgaaaatatttaagggaaacacctctgtaatgctcgctgaagattttgtcccatttggtacacaatcacttcctttgaaaagcacaactgtggaacaagagctagaggagtcttgggaagatgaaatacttcgccggactagggaattcaataagatgtctcgtgaacgccctcacgatgaaaaagtttggctggctttcgctcaatttcaggacaaagttgctagcactcagccacaaaaggctgctcgtttacaaactaccgaaaggaaaattagcatattggagaaagctgtggagctcaatccagatagtgaggaattattgctttgccttctgaagtcatatggcaagagggacaacactgagactctattgactaaatgggagcaaatacttacgaagcacccagatagctctacgttgtggaaacagtatctgcttctgtgccaaggggaattctccagattcaaagtttctgaaattcggaagtcctacgtgtatgctgtacaggctctatctgcagcttgcaccaagttatgtaggataataaaagcatggattccaaatcttcatccttagttcaactagaagtggggttggtggatatatttgttaatctgtgccgatttgagtggcagacaggacatcgggaactagcaactgggctatttcaggcgcagatggagtttagcttatttgcccctcctttgtatctgacaacaagcagtaagcaaaggctctttgaacacttctggaacagtggtggtgccagaattggggaagatggagctcttggatggtctgaatggttagcaaaagacgaggagagtagacaaaagttgtctatgcaagaaaattcacaagagactgaaacaggaggctggagtggttggtttgatccttctctgggtaatactgagacaaatgatttatcaaacaaatcactggaaccatcattgaccgatggaaatgatgctgaagaccttgatgctgaggactcaccagcacaagatgatgttgaatccttgctgaaaaagcttggtatcgatgtagatgcagagtccaatagtgaagttaaagacgcagaaacctggaatagatgggcctcaatggagctgtcacgggacaatcagcaatggatgcctcttcatgaaaattatgtaggatcaattcattgtggtgatgctccatctggggaagacaatgaccagctttccagagtaattttgtttgaggatgtaactgagttcttgttttctctatcttcagaggaggcccgcttttctctgatgtgccaatttattgatttttatggtggcaaaatctcaagatggacatcaacaaacagtccaagttggctcgatcgaatattgagcttagagaatattacagatgacatcctggaagatctaggtgctgtatctgacgttgtaaacaagaaccaaagttcatatagttgtaaatataaattggaatcattactgggaagcatgtgtgacctttcacaaaggccgggcctgatgaaatttctcaaaaatgcgatactgcttctgcttggtgttttccctcgtaatcatatcctggaggaagctgttcttgttactacccaaatgtttactcctcaagagaactcttcctccattcaaactaatgcatcacgggctttggccaaaagtatgttgaagaaagaccgacaggattttttgctttgtgggatatatggacgaactgaggcaatgaatgggaacattgaacaagcaaggaagatatttgacatggcactgttatcaactgaagcaacttctgaggatcttaggaagaaggttcccatcctttatctttggtacgccgagatggagattacagtgtccgcttcaagaaacaactctgactcaatgcatcgtgcagtttacatcctatcctgcttagggagcaatctaaaatattctccttttgttggccctatttcaaggcttcaggtcttgagggctcgccaagggtttaaagagcagattagaagctcacgatctgcattttcctgtggtgctataaacaaagaatcagttgctctgatctgctcagcttctttgttcgaaagcatgacaacaggctgttactcgggtcttgaagtgatagaggagacttttccaatgacattttcagagagcaataatttggagtgtgaggatttgtgggtgtactacatcaaaatgcttcaaaaaaatcttaaccaattgaatctatcaagggtctggccaagcatatcacgcggagtgcacaaatatccctacaatccaaaatcatattcagcgacgttaaccctgagttatctttacagtgtatccaacaatctccgtctcacactcgacaaatgtagtcaaagggacccttctgtaatcaccttgctctttgctttgtcctttgaatggggtaaagctggatctgacaatagaatacacagcctgtttgagagagctctagctgatgataagttgcagaagtctgtcctattgtggcgctgttatctagcctatgaggcagaaatagtctgcaactcttctgcagcacggcgtgtgttcttcagagctatacatgcctgtccatggtctaaaagattatggcttgatggtttccaaaagttgggctctgttctgacattgaaggagttgtcagatctccaggaagtgatgcgtgacaaggaattaaacatccgcactgacatctatgagatactcctagaagaagaaacaaatacatgattctggtttgtgtgaagatcccgaaactgccccgcatgacatgctctgcagttataagtttccaaaggttcatgaaatattggttctgcattgctgttttgtggcctataagcatcgaactctgaagtctcaatcaagaacctgctatctatcatcaaataagatggatgggaagtacaatgggcatgccttggattgacaatcttgccaaatatgaccatgttttactatttttgttctttcaagatggaccttgttggctgccgttctgaatatctcacatgattcattatcggtatatagatagaagtggcttcagtgggcccttcaactgcacgataagatcaatgttaggaaggcctattacaaattcctgtacggaaatcatgccacgaacaaaaccgaaacatcaaaagcagcatatatttttgtttgactatcagtaaagcaactgcagccaggttaggggatcctgcagtgtgcttgagtgtccaaacaaaaaggcttcgaatgtatagcttcacctggcgttttgttgaaggtccccaaagttatggactttaagatgctggtatatactggctgggagcacagataagagaagtagcagcactgacatgacggcctcagtaagtaataatgttagttttcattcgctgaggatgggtattattgctagctgtgttttgtttgtgcatactgtattgactgttcatttctcgaggattcgagccatctgttgttcatgtgtgcagtgtgcttgtgcatactgtattgagtgttcatttctggaggaatcaagccatctgtttatgtgtgctagctggataaagcgctgcttgatgtacctacagggatatggccacatggctatgtacgccataggtcaacctgcattacagggttgttaatgtatctcatcctgggttgcgccttgataatgtgacaggcacgaaatggtagtgtaatttgatttaagtagttgagttttgtagaaacacagttcctggcacgatggtttgttgagtgcatgacagcatgagacaccaagctcagggatgcaggcatcctcatgaaattatgaaaccacgctgctgtggtagctggtatgttggacaaagttccgaggctgcagcttatgtacgtccaatttaa

SEQ ID NO: 27834 - DNA, 1423 bp, Zea Mays
caccgcttccctaccccgccctctccagtccactctctcccctcgtttctctcgatctctccagctctcccccctctgcctgcctcttcaacttgtctccagagtccagaaccgccagccgccggcccacttgctcccgagggccgttcgccgccgccgccgctgccgctgccgctgacttctcctgaggagctaactgcctaggccgcttcccttgcagcgccgcgccgaggagcgggggagaccgaaattggcgcgccttcgccgcgctgccgcctcgccgattcgaccgacacgttcctctcccgttcgggcaggcaggtgccgatcccgcgcgccggcctgcgcgggcgcggcggcgcgaggcgtgatgtgcagcggatcggagcgcgggcgtgatcgcgtctccgccgagtagaggccggtgaggcccgcgggtgccggtgtgccaggagggtgggtgggtggggttgttgcgcgtgctggcgtgctgctgcggacttgacgatgtacatagcgcgggagacttccaaggtctcgctcgccctcgatccgattcggagcctttttctagtaccgctggacgtgtgtttttttttgttgatcggagctgtgggggatctatgaggtgctttttttgggctccgtgtaggtgtggaggaaggtggccacggaggtatcggtggagctgcagctcctgcgcgagaagtgggggctccttctcgccggtctgatctttcagctgctcgaggagtgcattatttgcatcgacctggaccactgctccaggacttgggatttatggcccttccagagctcgggcaagacaaaggttatcttagtgagactatattttcttccatcttcatctcctttgtgttgtggacattccatccttttatttatcacagcaaacgtttctatactgtcctaatctggcgcagggtgcttgcttttttagttgcttcacaatttttaaggattattacattctattcgacccagctcccaggtccaaattatcattgtcgtgagggctcaaaactggcaactcttccaccacccaatagtgtacttgaagtgctcctgattaactgtttattaagttccttgcttggttcatggctataattcagagtctccttataattgcttctcgcaagcactactcggtcgatgttgttgttgcgtggtacactgtaaacttagtagtattctttgtcgacaacaagctgccagaaatgccggatcggacgagtggactacatttgcttccattaagctccaaagaaaaagagggcaggcagaaggaggagaaagacagtaaactgaaggacgagttccacaagttactgaatgggaaccatgcggatcctactgatcggtaaccctgttcttaaggatctaatagtctaattgcttc

SEQ ID NO: 27835 - DNA, 1381 bp, Zea Mays
tcgatcgatgaggccggcggatcggtagtttaagcgtccccatttaaccgtcctgtgtctgctctctggtgcctataaaaaccacgccccagcaacgcagtgctctccacctcacaccatcggaacacatagcagctggcaggaacgactgccaagcaagtccatcggtcgaggtcctagctagcgcaacgacgatggccaccgcgctctcctgcaaggccctcgcagtggccgcgctcctgtccgtggtgtccgtcgtcacctacggcgctcgcgcccagcagcagcccagccacaacgcctccgactccgagtcgtcgcaggacaggtccttgctgtcctacagcagtggctggctgcccgccaaggccacctggtacggcgcgcccaccggcgccggccccgacgacaacggtggtgcgtgcgggttcaagggcaccaaccagtacccgttctcgtccatgacgtcctgtggcaacgagcccatcttcaaggacggcaagggctgcggctcatgctatcagatacggtgcctccggagcaaccacccggcctgctccggcgtgccgcagacggtgatcataaccgacatgaactactacccggtggccaagtaccacttcgacctgagcggcacggcgttcggcgccatgcacggctccaaccccatgtacctggccgtgctcatcgagcacgccaacatggacggcgacgtggtgcaggccgacatcatgcagaacaactccgggtactgggagcccttgcacgagtcctggggcgccgtctggcggatcgaccccagccgcccgctctgcggccccttctcggtgcgcatcaccaacgagtccggcaagcagctggtggcccagaacgtcatcccggccaactacatcgccgacgtcgactaccgctccttcgtccagtatacgaattaacccgaccggccgggcggggcgcccactgcatgagctagctcgatcggtcacctctgcgaccgtcgtacgtccgagatagctcgttgcttaagtgttcgtgtttagtggctgccgtcggcaaccgccggactgaggatttttaaacctcaattccggcgtggggtgtgtgttggtgtgtgtcttgaagatgtgtgggaaattagaggaggcgagcatcaatgcgctctcccgcccacggtcactctatcattaccggtgtgcggtgtgtaaccagcagaccatggatattggttaatactacatcagtgtgatgttgtttagctacctctacccccatgctgcctcctaactaatgccactgccaggggaccttgttcggttattcccaacacacatgaattggatgagattgaaaaaattaataagaaaattgacttgtttgggat

SEQ ID NO: 27836 - DNA, 1618 bp, Zea Mays
ctaggcgccttgcctgcctaggcgttaaggcggtggtccagctcctcacctcaccgaggaggtagtaaccaatgacattccaacaactcttcataggagcaaagctgattgcccagttcaagaggagatggtaactgtaagtgtggatggttctgtacttgacaggattgctaaaattatgacgtaccttcggcttggatcatcagggaaggttttgaagaaaaagaaaaaggagagagatataaaagggaagaacaatttggcaagtggcgactgtgatgagtcagtaaaaccttccaaaattaatggttctactcagaaacatcaatcagatatgccaccaccaccagctcgaccccctcagaacaataatttcactggaaaggagaaacaaccagtccctgttgcaagagcagacgatgatgacatttttgttggagatggagttgactatacagttcctaacgaggaaatgagtcagagccctgtttctgatatggatgaatccccacataaccatcagaagcagtccaatttcattgaacccatgtatggccctgtaccaccatctgaacctgctcaagcttggcaacagccgaatgggtatgatgctgttcaagcccagatggcagctgctggatatcaaggtgactggtcaagctatgtgtatgcagaacagcagttgggttatccagagcagtacgtgcagcaaagcacacaggaatatgatgtgttagctgaccccagtatatcacaggatccgaggttcatgactcaggcagacaaggatcggggtttaggttctgttttcaaacgtgacgatcaaaggcttaatcagctgagggaaaaggacgaacgggagagagatccaaattttatttcagatagttactcagagtgttatcctggttaccaggagtataataatgagatcgcaggaagcgatgatgaagatgatttatcgaagatggatatgggtggacgggcgaagggccgtcttcacaggtgggacttcgagactgaagaggagtgggccaagtacaacgatcagaaagaagccatgccgaaggctgccttccagttcggggtgaagatgcaggacggcaggaaaaccaggaagcagaacaaggaccagaagctgacgaatgacctccacaagatcaacaagattctggctaggaagaagggcgagaaagatggggcggaagatggcggtcactacgatgatgatttacctagctcaaagaaacagcgtggctgaagcagtcatttttttgtttttgtttctcctgctcgtactgtaggcaggcgaacattctatgaagagtcacagtgtcatgtttagctggcagctgtatcctgctgcgtttgtttaaggtgtcctggtaggaaatatgttgatgctattgagccgaaaccatggaaggaatgtggctatatatatatatatatatatatatatatatatatatatatatatatatatatattcttagaaagaaaagccagatctttatgttacaattacagtgatgaacctgcaagtatttaatttgtcatattgggaggcttttgcaatgtggttagagctgagaatatccaagagtgtggctcagtg

SEQ ID NO: 27837 - DNA, 2472 bp, Zea Mays
cgcccgcatcccgccccgcatcccgcgaccttcttcctctgctgcctcctgcccgcatcctgccggcggacgcaccccgccccgcatcccgcgaccttcttcctctgttgcctccacgggagccttctcacctccacgcgtcgttgcgtcagatccgtctgtcgctagagaaaaccctacccaatgaccacatgcattcttactgggacgacgccactattggcgcagaggagcagatatggcgcatcgcatgtactccgtcgctgtcctcctcgaatccgcctctaatttctccaacgccataggcaaggagatgcctgcccaccgccccggcaccccccgccctcgccgcgcacaccccaagccccgcggatcacagtcgcctctaccctagcgggagccgcgcccgcacccacattacccgcacgatggcaagaggcagcggcacaaggccacggcgactcctcgagcagaggaacccgaccgagcgcagcaacgcaaatcttcaatctcaaatccgtgctgcgagaaaagtttcactcctctggctgctccttgtgtgtgtgtgtccactaatgcgttcagcattgcaactgctgctgccaaatgctgaggtatgacctttatttttcaacaaaaagtgtctttgtgactacaaaacaagttaacgttcagcattgcagtaatgtagcaaattttgttctgaatttttttatcttcaatgtctggtccgtccgtccgtataaaaaaaatgtatgcattcttctatcttcaggcagcagtatacataactggttcaatttgtgcagcattcgttgccaacatagatggtcactctgataaaactgtcaccttcaatgggaggatgctcaggttttgagaccgaacctatatgtaccaccaaaacaatatcctaattgcaagtgaccttcctctcatcatcgcgattgactagcaaccaatggccctgataggtgttatgcaagtgtagggcgacatcactaatgctcggacaacggatgtggcatttcgatggatgcaaagcagacttggttgtttgcgatggaggcttcggatagtaagatatcatatgagtgcaagagaactactctcaccattaactataacaaattttgtcaccaaaatttggtggctggtggatctacttaagaatcaaaagtcagacaaggtggacatcaccatccaaccggaggagcaggaagccatgaatgatgttctagcagccagccatgaccgcgtccacgtcatcaactttgacatcaagcaggggctacagtggccgggcctcctccagaaaaagaggaattgaagcagtatctgactcgaaaacttggtagaaaaagaggaattcctgcatacattttcgaaggaatgtgaatatatcagaactgcagtgacaaatggtagtgccattaagcatgatggctcatatgaatcagatcctgcagttgagattgttcgagttgaactccaaggtgctgctgcatttcttttattctcgtctggttccacgcctatatatattggagaacatggatgggaaatgcttctggtagtaaaaaaggcaacacaagaggctggttcaaaatttgaactgctaggttttgcatctgtgcataacttctatcattatcctgagagtattcgcttacgaatcagccagatacttgtgttgccaccttatcagggtgaaggccatggtcttggtcttcttgaagcaatcaattatattgcacagtctgagaacatttacgatgttacaatagaaagcccttctgattacctgcagtatgtgagatcatccattgactgcctctgtttgctcatgtttgatccgatcaaacctgcacttggtgctattgtctcgtctctgaaggagaccaacctgtcaaaaagggcccaaagtttgagaatggttccaccggttgacctgatggagactcagccagaggatctcaggacgcaggagcaacagctcaatgagctcgtggacatccaaatcgaggagattgatggggtcgccaagaacgtcacttcacgtggcaaggataagatggcagagctggcggttcaatgaatctgggtgaggttcctacttcaaacgatgttaaaatgttgtcgtagcttatctggtgaggtctcttttacgagttggcttcttggtagaaagggaatgtcacggcataggcactgagtagattgtcacgacagattattatatacttcaattctggaatatttgatggaaatgctattttagattgcttggtaagtgggaaccgcctcaaatcacagaagtagaagcagcttccgattcagccggaaccatttcttcaaaaatgttctattatagaataaacaaggcttaggagatagaaaacattatttacaatataaatatgtaatattattataaatgtaccgactcaaataaaatgaactggtattgaa

SEQ ID NO: 27838 - DNA, 1865 bp, Zea Mays
ctattttgaacttcaatatgtttttcaattccagcaattgatcgaaacatgatatatttgacatattcatgatggatttttgtatttgatgtgtcgctttttcatctatcaatgtaattcttggacataacattgcgcacaggtaccaaattcacacccttgttattgcgagttctgtaaatcatgatgttcacatgtgatggtttgattcagttcaatggttagcaagctatttgaacatgatactatagtagtgcatatttgctgtacaaatggccactgcccagctatttgcataagatattatgtttctcctgtgacattttctatgccacatacatttatatggcatttttgtgcaatttagtaccggtttttggttgatggtgtctggaggtgtgatgagacaaaaccctttgtacgtgatgaatatggactgatcagcaatgaagtgcttgtggaaaacaatgtactacccgttgtgcagccagagccttctatcagaggaactaatatggataaggatgcccctggagccatcatctcagaacccaagcatgcaaatagcagttatccgccatgtggtctctggaatattattacacaataccatatatgacgttgttcccctttctagcaagggaaccataacaggcatgctcactgcatcagattttgttttaatcttgagaaagttgcagagaaacattcaagttattggcaacgaagagcccatttctgcttggaaagaagcaaagctacagttctatggtgggcctgatggtgctgtcatgcagagaacgccattaatccatacaggcaacattgatctcagggccaagaaagaagctcaactcggcatgcttcctgtttgaagcaagggcaacaaacttaccccaccagatctctgtcgccaaagcagggctagtgaataagctgtgtttcctcccggattgtcactgcttttatatttgtgcatttattttgagggaaacattttgcccaaaaaaggcctgcagtgcacgttttaaacaagtcatttgaaccaactcttatgctgaaaactgtatgtgatactgcagaaggcaacacactagcttgataggaaagttggttggcaagcataggtggactctggtgccttcatatatctatatatatattttaagttgacgatcttcgtgatgctgaaactgatgaagacctccgatgaaaaaagagacatgctgcacatgcacgagggtacttgcagatcgatgtcggctctatggacgaacactcgaccaagtcagatgaggagtatgagggcctagccatgcgcgacgtgatggctactggtccgacgatgagcagcaagctgtgagttaaagatgaactcacctgccctggagagtaacatccataggagtgaggcaaaatggctggtaccaccacaacatggacccgttcctgaagatgtccaaggaggtggtagccgacaccataatgtcttgtgtcattgtgtcaccggtcggcaacacactgcgctggtaccggcgggtgttgtgtttcttaggcgtctgcttctgtgctttgagttgtgctatagagtggttgtgccaactactgattttaaaagaaaaaggtgagctgagaatcattgttgaaaacaaacatgtaattgttcgttctcatcagttgtgccaactaccaagcatttcattgatcagaatttatcgttgctcatgagaaccaaaagtaagacacttctcaataacattggatgcaaatttctgctagcttatcttcactatcttttctcgtatcaatataacacacatttatacataatttttgtgttattatatgttttcgttgcaacgcac

SEQ ID NO: 27839 - DNA, 2584 bp, Zea Mays
cgcaggcgcaggcgcaggcgcagggagacctcaatcatctggatttcggcgacatatactactgcagggagagaatccaaagccctccctcctttgggcttgtctctgcctctctctctcctcccttctcccacccacccctctctcttgctgtgggtgtgctgtggagaggagaaaggaagtagagcaagaacaagaactaataacaccaacaagagctgctgccaactcctgcacagcctgggctctcatcactgattgcccacctattaccttcctcttttgcgatttagaatcacccatatatctacctgctctcggtcctctgtgaactctctcgtcttctaggtttcccaggcctcaagataggcctctggaccaaagcttgaaagcagctgctgttcttgcctctttttttaattcttcatttcgtggttcctggatttttgggttcttaggtttcttgtatcttcccccaaccttgcaaaatcttgtggtgaagtttcttgcgttcgctgtttcgggaccatggacgaaaggattccgccgccgtccctcttgcaatactcgcagtcccctgctcattcttccccccatcccctcaattctatgaggtattcttcctctgaaagagaaaggtgagtgttgttcttgatttttttttatttcttttgtcactattgttctccctgttgttcttggtgagttttgttttgtttttgatcctgccctttcggaatccttctgaggagcacgagatttgatgctgcggtggagatttccgcttaattctaaacttccggatgccatgtttccccttgatcaatgctgccgattgttatggaggagtgatctgtaatcgtagggacttcttttgtgatggctcgctgatagatttgttactgctgtcctaaacggagctgtatggttgactcgctgctaatgggtgtaaactttgtgtgtaacaaatcgctcattggcgatagtcacatgtaaattttaatttgatggatcgttctgtatatatcatatcaaagtttccttttacatttcatttctgcgggattatagctgctttagttttagatcctccaaattatgtttcttcttttgtatcacatggataataaatttagcattggctactgttatcctaacgttgattcttgtttggcagatatctggctgagttgcttgcagagaggcagaaattggccccatttgtgcaagttcttcctttctgtaccaggctcttgaaccaagagattttgcgcgcatcttctatggcgcctaaccataactttgttgatcctgagagaattgagcatggtagcccattaaggttacctggccacccagtgaatggtcagccgatggatctggagggctggtcagggattcaaacagagcatatgggggttctacaagcatcatcaatgggctggaatggtgctcctgtacttgctgccactcctgttgtcaagaaagtcatgaggctggatgttccagtagacaagtatcctaactacaactttgttggtcgtttattggggccgcgaggtaactccctgaaaagggttgaagcttcaacccaatgtagagtttacattcgaggacggggttctgtgaaagactctgttaagagtttccagcagatatggttgatgtgcgtcttaatcaagctgtgtccatcctagaggatcttcttaaaccaattgacgagtccatggactactacaagaagcagcagctgagggagctggcgattctaaatggcacactgagagaggaaagcccaagccctcacctcagccctagtgtgtcccccttcaactccaccgggatgaagcgcgcaaaaacagggcggtaatctctgttccgaaagccttcatccccccaaatcaatcatggttcaatgcccaattattacacaagctactgctggagatgattggtgatgcatatgctgggatcatcagtgatggcctatgcctgtcatgatctgtgcgctttatcgacaagcacacaaacatgcctgtgctgtgcttggacgaatggtctccgggcttgttgtttgactctactattatttattctttgtgcttctgactgcctaagtattattaacattattggtttgggaaagttaacaaggcccggttggccagtcgctgtagaaagcttggggagaggaggggggggggggggggtgtcaatgtgacggacaataataaggtttcgttggtgtacctgagatagttgtaatatgtcatgtgctgatgcttttgtgtggtgctagtacaagacaaccagacagctatagttgaggcaatgattattttgcgttcataaaatgcatatcggtgtgctttcttcatggttcatgtaccggaaccagtgtaaaatagttcctccgtcccaaaatgttttagctcttgatttttatgtctgtatttataatatataacacatacatcaagtctttcgtgaatccactatttgtctaaaatggattttattttggcacacagaggaagtatcctgtttgagctggtctgtgtgccaaatataaaggtgtatggag

SEQ ID NO: 27840 - DNA, 3908 bp, Zea Mays
tttctctctcccacccaaccctcttccttccaccccatccccgcttctctctcgcctccgcttcgctcgcgcgagagggggccgacgacggaactctaggattcgcgcccgcccgcgcggccaagccaccaggatcgcgctccgcggactcgagggcgctagccaagctccagggcgcgcggatcgtgcaccgggcggggccggttaccgccgccatgtcatcgctcacccgcgacatcgtcttcctcgtcctccagttcctagacgaggagaagtttaaggagaccatgcataagtttgagcaagagtcggggttcttcttcaatatgaagtactttgaagcgaagggccatgctggggactgggatgaggtggagaaatacttgtcaggtttcaccaagatagatgacaataattattcgatgaagatcttctttgagattaggaaacagaagtatttggaagcgcttgataggcatgatggagcaaaggctttagatattcttgttaaggatcttaaagtcttttcgacattcaatgaggagtcatataaggaaataacacagcttctcacttttgagaattttagccactccaacttcctccacctagtccatctttagctcgttggctgacgaatacagccgtcccttcatctgttcagtctgctgttgtagcagcctcgtcaatacctgttccacccaatcaagttgtctccatgttgaaacgcccaactataacagactatcaaagtgcagtgcctgagcaactaatgaagcgcttgaggcctggtggacatggcattggtgagaccacatatcctactcccattcctcaacgtgcatggtcaatggatgatcttccaaggacagttgcttgttcattgtcacatggatctaatgtaactagcatggattttcatccaactcgccatacactgcttctagtgggatctgctaatggtgaatttacactttatgagatcggtctgcgtcaaacattactttcaaagccctttaaaattctggatacaaatgcatgctcaccacaatttcagaatgctgttgttaaagacccccccatgtccattaatcgagttacctggagccctcatggagaattgattggagttgcattcacaaaatatttgatccgtgtatatgcatatcaaccaccaaatgagacacgacatgttctagagattgttgctcattctggaggtgtaaatgatatagcattctcacgaccaaacaagcaactttgtgtggtcacctgtggagatgataaactgataaaggtatggaatatgcatggacagaaattatttacatttgaagggcacaaggcgcctgtgtattctatatgtgcgcatcacaaacagagtattcagtttaaatttagggattatggctatggagtttctactgcgactatggcatacaatatagtgatatgcctattcaagtggaaaaaagggaggtccgcatgtggatgacttttaagtgaacaaatgttgattttagcagtatttatgttcatcttctcaacttcccttgatggaaaaattaaggcctggctttatgacaatgtgggatctagggtggactatgaagctcctggcaagtggtgtactactttgctatatagtgctgatgggactaggttgttctcatgtggaacaagcaaagagggagactcatatttggttcagtggaatgaaaatgatggatctatcaagaggacatattctggattccgtaagaggtcagctggtgttgctggtgtagtgcagtttgatatagctcagaatcacattttggctgctggtgaagataacaagattaaattttgggatgttgataataataatatgctgatctgcaccgacgctgaaggaggcctcccagctcttcctcgcttgaggttcaataaagaaggcaatcttcttgctgttactacagtggacaatggttttaagatacttgcaaatgctgatggactcagaaatctacgcgcattaggtagcaggcctcctttcgaagcatttaggctacaatacgaagatgcttctatgaaggtctcaggtgctcctgttgttgctaccatatctcctaacataggccgaatggatcacttggataggaattctcctgcaaagccatctcctatgctgactggtggcgatacagcatcaagaagcatagatataaaggcaagaatctcagaagaaaagtctgataaagcaaaagcttcggaactaatggaggttctaaatccccaacaatgccgtgtagcaacaatgccagaaactcccgatcaggctagaaaggttgtccgacttctgtacacaaattctggtgttgggttgctagcactagggtcaaacgccattcaaaggctatggaaatggagtcgaaacgagcaaaatcctagtggaaaagccacagccagtgttgtgccacaccattggcagccaaatagcggtcttgtcatgacaaatgatacatcggataccaatccagaggaggcaatcccatgcattgcactctccaagaatgattcctatgtgatgtctgcttgtggtgggaaggtttctttgtttaccatgatgacatttaaggtgctgacaacattcatgccgccaccaccagcatcaacatttttagcatttcaccctcaagataataacatcatagcaataggaatggaagattcaaccattcacatatacgatgtcagggtagataaggtaaaaactgaactcaaaggacatcaaaagaggataactgggttggcattctccaccaaccttggcgtacttgtttcttcaggcgccgatgcacagctctgtgtgtggaccaatgacacctgggaaaaaaagagaacagtctcgatacaaatgctagctgggaaggctccttcaggaaatacacgggtccagtttagttctgaccaaaatcacttgctagtagtacaagagactcaactagccatatatgatgcatcaaaaatggagaggatctatcagtggataccgcaggacacattgtcagcttccatatcccatgcatcatactcatgtaacagccagctagttttttctgccttcattgatggtaacataggtgtttttgacgcggagaacttgagattaagatgccgaattgcgcaatcggtgataaacagcaatccacatgttcaccctcttgttgtcgccgcacatccgcacgagccaaaccaatttgcggtggggctgtcagatgggttcgttaaagtgctggagccattggagtccgaaggaaaatggggaacacctgctccggtgaccaatggcacccccaacggcaagacaccagcttcgtcgactacgagtaaccctgctacggaccaaatccaaagatagattgtatttcctaagcattcttctgtaagggctagtttggcatccctatttttctaaaaaaaattattttattaaggaaattagttcatttttctttgggaaaataaaaattccttagaaaaatgctgttgccaaactagccctaaactttctaattacaccgacttatctgtatgtgcatgctgttaggatgtcattgccatttgttgaaaaaaaaagatagaataggttcaagttcaggtgtggttagttttcagatagagatctcttccagatactaccctagtttttttaaggaaaggctgtagggaaaatccctacaacatgattttgttaaataatgaaaggaaggggacaaattagatcaagaaaagaaaaatgattcaaccggctatcgagaatttagccacaaagacaccctaagcctctgaccgctattaaacctaagcatttgcaacttcagcatgtcattgaagctgtccttccaagagaggaaagaagtggc

SEQ ID NO: 27841 - DNA, 2417 bp, Zea Mays
aaaagattggaaaagaaatcatccagaacttcctgcatctgatcatggctggtactgaaacttagtgatggtgattctttgtcttgccgacttgttgttgatgctatgggaaatttttctccaatagtacggcagatccggtctggtagaaaaccagatggaatgtgccttgttgttggtgcttgcgctcatggattcgaaaaaaatacaacaagtgatattattttcagtagctcatcagtgaaaagagctgggaattcaggagtacagctcttttgggaggcttttcctgctggttctggtcccaatgaccgtactacatacatgttcacttatgttgatccaacatttggaggcccaaagctagaagaacttttggaagtgttttgggatcttatgcctgcttaccagtgggccctgttggctttgattttacaacaaaagtctgatgcgtccatggaagttcccttgtctattttataggatgtgcttcttcaaaatttggatataagaagagttatatttggaattttcccaacttatcgggatagccccttgccagctgcatttgaccgtatcttacaggttggcgatgctagtggaatacagtcacctgtttcttttggaggttttggaagcttgacgagacatcttggccgtttgtctagtggtttgtctgttgaattatccttttcttaatatataactgtttgattatcaaaaaaaaggaatatgtttgatctaatattaagaaaacagagcaaagagtgctgcagccaccggggccagtgccaatacagaaacggaatgcccgtgtagccacctatgtgtccagaaaaagttatttgcaccatcaaccacagaagcagcaaagagtgctgcagcattagggcatatacaacctcatttaatatgaagtctcttgaggggtctttagggggttagataaaaaaatacaaaagacgggctcttcacgaatattgtttatattgtctcttaactgcatttatagtctagaggcttgtatcacagagtcttttaagtgtctcttatacttagaaaaccgaaccagagtctcaaagttgtacatgccaggttgtacatgcccttagagtgaacaagtgactgcaggtccttctaagggccgtcattcctggccttccttaaccagagccacctcatgttcagcgagacagcgaccaacccaaagcttctaaattatggattccaagaccgccttggttgagtgacctgcagactctttcccaaccaacaagacaatgccctccttgtacgtttattcgacctttctagaggaacctcttctaattttatcaatgactttaaaaactcattcagagcagcgcaaatacggagaggctactttgaacccgttacctgactcagtgagacaactcttaccagtgcaccagacctgcccttctgcagtatcactttattgatgatgaattttggatagctctacatgtgctggtttcttatcatttgatttcacatacttcttttttttattttggggttaaggtatatgtgaagcagttgaaggtgatttcctggatgctcatagtttgcagctgctcaacccttacatgccaaacttaagtgcatcatggttgttccaacgagcgatgtcagtaaggccacatgtcaatgtttcaccaacctttatcaatgagcttctctttgctaattttcagtcaatgcagaaactaggggattcggtacttcggccatttctacagtttggacctcttgtgaaaactttggggctagtaatgatcactagaccacaaattttaccttccatatttaagcaggttggactgggagtcatccttgagtggtcaggccattttatgatgcttggttactacacattcctttctacctatattgatccgatcctgaggtcttgggtggaatccttgcccccacgggacaaatatcagtggaaacggtacctggaagcttggagatatggagccggtttagattaccgccaaggggaataaactgtttcactaaaaacacatgaaagtttcctcagaaacaaaattatgtatagatacatgaatatagcactgtcaggggaaagatgaatagagtacatatatgatctctgattgatttagttttccttttccagagcacaagattgaacatcaagtttagaatgtgtattatctagtttcacttgtaatttgcccactttactgaactgatggagtgaatatgtatagtactctagaatttcaaataatgctgaatggagctgagatgctcaatatttgttgatcaatgtatcaattatgtgaaataaaagtaaatgtccggtttcattcagattgcaagtgtaacaacaaaataaacagccatttacacatgttggtaaagag

SEQ ID NO: 27842 - DNA, 5845 bp, Zea Mays
cagccggggcaggtgggcccagcggcgaccatgagcaagaggagagggaggagcgttcctcacctgccgtccgtcgtcttccttgctcgccttcgcttccctcctcttctctttcctagactagactagacttggcttgccttggattctcatctcgtctcttctttcttctcgctccaatcggcgcggacgtagcccccgcgcacgctaccgcctaccggagagattccgccgcccgttgggtggattccagcgccgttgagcaacaggactctagcgccgcaccggacaccaaccactagacgctgctgcctccctccgccgtctcggggcaccgaaggaggagcagagagatccatcggaccgctcggcggggtgcggccgccctcgctcctcatccaaattatccaatccactcgattccgattggcaactacccttcaccccgcgcgcgcaaccgctagctcctgccgccaagcgcaaccggacgaccgccgccctccctacgccaggaggtgcccaggtgtaggtccttcgccggcgacgaacacccacaagagcaaccgcaagggcatgtgacaagctgccgcctgcctttgccgcaggcaatgtgctccgacatgtcgggtcagcgccaccaccacgcaaccagcagggagaatgcaccggaagataatggttaccatcgcactccccatggtgcggatcatctcgagcagagccaggctgcagatacagataataagcatataaatcatctgtccacagatgacaatgttccctccagtgcttcaggccacaaacatggtgctatcagccgccatccatctacatcttctgttgatgatcgctccatcaagtccggtgatgattctgatggggccgagagtaccagtggcagaagcagtaatacagagatctcatttatgaataatgataccatctggataccacctcaagcggcagataaggaggatgaggcccagagttttgctacgagcattgcttatgacgacgacgatgacgattatagtgatggtataaagtggggccagtcaagtttcccatcccctggtaagcagcatgacgccgacactagcaatcatagggaggaacgagaaaaggcaatgctagaagctatgaatggccagctgaaggtacttgtcagtcggtttctcgcatctgctggcattccatcttccaacgaagagggtagcgatagctggcttgatattgtcacctccctgtcatgggaagcagcactacttatcaaacctgatggtagcatgggaaaggaaatggaccctggctcttacatcaaagtcaaatgcgtagcatctggtactcgccggcaaagtgaggtgatcaaggggttagtcttcaagaagaacactgctcataagcacatgccgacaaattgccacaatcctaggcttctacttctcaaaggagttcttgggcattctgatattggtttgtcatcatttagttcaatggatcaggaaaaggacctgttggagagagctattggtaaaatgatggagatatgcagtcccaatgttgttctggtcgagaaaactgtttcacgaaacattcaagaacttcttctgaaagaagttttggataaaccaaagctgaagcaatgtgactactttcatatcgaaaaatttatcgaggagcacaacaacgccagtgagggtggaaagatgccatctaaaacattaatgttcttggaaggctttccacgtccactcggttgcacgatactgctaaaaggagcaaacagtgaagaattgaagaaagtcaaacaagtaatgcattttacggtctttgcagcatatcacttgatccttgaaacatctttctttgaagatcaaagggtttttctaaatgataaaagtacccccaaagaaatttctgttactgctacagaaggggcatcaccaactgcttatgatgttgctgctcttagtgaaaatggggatgcattcagttcagtatccagcagctctgcaaatgaccttgaacaaggtacaagtatcaggcccaataatgctgagaggttaacatcactagtccaagggccactaagaaaactgttcactgacatgttacgtcaccagaatatttacttacctgttacatcattgcaagaggcaaatgatattagtaaggaagtcagggctgaatcaagtcaagaaactgttattaatggtttccataggccagagatagaagagtctgtggtttcaattgaaaatggagattccataaatgatgcccagaaacaagaaattgctcaagcaataatgccaagaggttcttctgcaaatgataaagatgcagaatcgtctgttatgggagacaatggggcacatagtacaagtatcattatcaaagagaaatatgtcgatgatgatcaagctgatgatgcacttgattctcacagcatactgattttgatgtctagccagtgcccggaaaagcaggttatctgtgagcaaagtcatttaacccgtataaaatactacgggagttttgatgtgtccttgggcagatatttgcaagatattctgcagaatcagaaactgagttgctcctcatgtggagagcctccagagtcgcacatgtactcttacacgcaccgcaatggaaatttgaccgttctagtgaaacatctggtgccccaacaccatttgcctggtgaatctgaaggaaaagtatggatgtggactaggtgctcaagatgtgatcatgaacatggggtatccaaaccaactccaagagtactaatatcagctgaagcgcgtaacctctcgtttgggaaattcctggaactcagtttttcgagccactctgcagcaagaaggttatctatatgtggacatctggtcaacagggattgcttgcgtttttttgggctgggctctaaagttgctatgtttcggtactcatctgttgagatctacactacctgcaaaccacaacctactctccagttcgtcaaccccatcagacaggattggtttgaaggacaaaggaggaatgttcatgctaaaggtatggcgcttttctctggggttgcaagatttctacagaacttgaagaatgaacatcctgatgcaataacgttagcaatccattgtggccttgcattccctgttaaggacttcactgaactagaagagttgttgataaaagaaaaggcccagtttgagagttctgtggacaaggccactgatcaaaatggggtaccaacctcttctgtgcatgaactgttgaatataaattggtactatcaggaccttctacttgagctttacatttgggaccgccgtctacatcaattattctattgtaaatctgtcaaactagaaagtgtttctaattacaagaatcttgctgatactgttgatgggatctgtggtgataaattcggtgttgataagaaaattgatgaatttacatatgatgaaactacggcagctttgggggtagccagtaccacagaacctgcaagtaacaaacttgaccatcaatcaggggatgctgcagcatccttacttgatgaaagccaggaagctgggcactcagaaattccttgcaatggaggtagtaaagctgagaaatcttccattgctcatggtcaaataaaggtagatggcacaacaaaaaccggaaatgatccttgcttcgaaatatccaatgataagaaggtccaggtcaatcttacagtagcagatccaatatctatggaacaggagcgttgtagcactctccaacagttcaaatatccttattgggatgacagggaaaggtggatttggaattcaatttctgagtcacaattggcttacaggaatgacattcaaattggatatttggaaaaattcgaactcattaacaattatttgccacattaccttcctcccttgtttgaacaacatgatgatgcggactctccgcatttcgcggtaggtcctggtggtaatattctgtgcataatggaagatgagatatccagcataatagctcgtgctcttgccatatctgacgaacgccgccatttgatagatttaaaatttgagaatggaatggattactccaagggagagcatgctaaagcaatggagaaatcctatagttttctgtctgaaaattctttcacctcatcaccatggtcatctacagattctgaagcaagcttgtcatctctgtcttcattttcatcattttcatctgatgacttttctggttatgatagctcttctttattgtcctcgatgcatccagaaatgactgtgaacgggaaaataactctgaaaggcaaatattcagtcactgttgtatatgacaatcaattctttgcactccgaaaaaagtgttgcccatccgagcttgcatatattacttccttaagccgctgcaagaagtggaatgctcaaggtggaaagagcaaggcctattttgcaaagacaacagatgacaggttcatcataaagcaaatcaagaaaacagagttcgattcatttattaaatttgcacctgattactttaggcatgtttaccattctctggacactggaagccaaacttgccttgccaagatattaggaatatatcaggttaagcagattagacatggcaaagaggtaaagatcgacttgatggtgatggaaaatcttctctttggccacaatatttcacgaatttatgatctcaaaggtgttactttttcgcgacgcgtcactgactcaaatgatcatgatactgtttacctggaccaaaattatgttgaggacatgggtttttctccaatctatattggtggaagaacaaagcatcttttgcagcgtgcaatatggaatgacacgtctttcctcacttcggtgaatgtcatggactattctctacttgtcggagtggacaaagagaagcatgaacttgtgtttggcatcattgattatctgaggcaatatacttgggacaaacaattggaaacatgggtgaagacttctctggtagtacccaagaatgtttcaccaactgtaatttcccccaaggaatacaaaaaaaggtttaggaagttcatggcaaagtacttcctgtcagttccagacacatggagctctgataattcatctaatccatgcaaatcctttggtcagagcaatcacaagttagcggaagtccacaatggtgatagcctgcttcagcacccaaatgaagctgaggggtgtgtctaatcacgtgcaggacttcctggcattttttaagcctatcccattgttgtttggcttttcactttgtaaaatggtgtacattggaggacctcactgttgatctatccaaaagtttgtgtttttaggcaaattgttggacaagtggggtccacaggacatgtacctatacaaatgttcattgttaatttcacaattattatagtgaaattaagaatttgtatgatcattttttggacctatcacttgtgtgactgaagctgtctattcttcacttatgactaactgtccaagatagacatttcctacctctattgaaattaggtcaatttgagtattatgttgtactgtatacccccagtgtacttgttgggatctggaagcagctccatagattttgtgtttgatggatactgtcccttttcggtatgccctttttcacttttttttggttctgcacaatgtacaactttcagatctcctggtatagaacagattgcaagctatgagtttcattgttacttagaatggatgtgatttaagttacttagttgtttgttcagtatgtgttcgtcttctggaatatcattcaatatgcatttatg

SEQ ID NO: 27843 - DNA, 1724 bp, Zea Mays
ctaggctcacagctcgcgactcgcaaggaggagcttgcggcagctcggtatgaaaaagggcatctgtcttctttatccatcgtccgtctccttccacccagacacaggccaggcgggcccattgttgcccaagaccctggaatccggagcaggagtcctctctctctctgactctctcctgagggggaggaggaggaggaggaggcagaggcggaagagcaaccaccaagcagcagagcgcgaggcgacacggggacggagccctggaggtctctcgcgagtccagaggcgatcgacggagtcgcgattcgtctcccaggatatgaacaacgggactttggtttttaacggcagctagagggtagcctggagtgagcatttcattctggagatacaatgggtggctgctgctgctgctgctgttctgcaagggcatctgattcagatagagcaccggtgcgcatctatcaccgacaaaatcccgaggaacatgcacccttgtcgtcagcctttgatggaccatcgccaacttctgctatagttgcagttgacacaaatcttgatacaccatctcttgacacttaccgagcaccacctgcacctttgccatatgatgtttgcttcacagtttcagaaaatcctgatgtggagaagtcaggcattaaaatcaaaactgacgggcagcagtccccaaaagtggacgaatttgagtcgtgcgaaaaaggtgcccctgaggataaggctgatgaggaggaggatgtttgtccaatatgtcttgaaggcttaagaattttggagctcatctgtggatatacattcagttgggtgaaacacgaaatggattgcatttctgaactaggtagtttgaacaagtgctgctgctgtgaagtgtctttgatagatgttatatgtgttccatatcctttcttagtgtaggagtatttgtattctctctccgcatgtacgatatgctctagcagttcagtagtgggtaggtgcatatatgatggagccaatgcaaatggcttggtacctgttgaacttccttgtgcttttctttttgcctgtggtgcatggtaatcttaactgatgcatcagccgatgatgccattctgaaattaatttccaaaccagaagatttcacatataaagctttgcctgcccttccacaccagaatacgacaaagaaaatccacgttcggtcaccaagtgcgagcatcatttccatctctgttgcatactcgaatggatggagaggagcgagacatgcccagtctgtgaccagataactctgatagatgggatgtacgaatagcattcttggcggcggttcctgttgagttggcgttctttgtttttgtttttgttgtggtctggtctggacggctgtctggtggaggagatggttgatgagtcttggcaaaaaaataatttatagaagaaaaatgacatgaaattgtgctagagtcgcctgtgtcctgtttttacctgaaaaccctgtgagatttgctccctggtttcctcttgcttggtttgcgtgttcattcttccatttagatttcagtttctcagtgcctgtgtgacagggaaatcatctgtattgtacagttagtctgaaacggtgacagaaaagaagaaaagctgattctaccatatggttggtttgaactttgtccaatcttgctggcctaatggcacaaggtcgtttgccaggtcagaccgct

SEQ ID NO: 27844 - DNA, 1236 bp, Zea Mays
gggcaacccaaaagacgatgcaaatgaagcaggacaagagactgagatccatcctccagacacgcgcacgccaaggatcgcattcgccaagcaacgtcgggtcggcggcgcgggggcgatggagacgcggcggccgcggcgcggctggaacaaacgcttcgtcctcccgctcgcgctcctctgcctcgccgtgctgctccccggcgcgctgctcccgccgtccgcctcggcgtcgtcttcgtcgccggccgcgggaggtggcagcaggaaacgccggtgggttgggtttgactactatgtactggcgctgcagtggccgggcaccatctgccgcgagaccagcaactgctgcgacaccaatggctgctgccgatcacagcctctcaagtggttcacgattcatggtctttggccacagtataactatgggggctggccatcatgctgcagaccaaccagattcaacataaataagatcttaatgttgatgccgatactcgagaagtattggccgtccttgtactgtggttcttcttcaacctgctttggtggaagggggccattttgggtgcatgagaaactcatgggacctgtgcttaccctgaaatacaggatgaatatgactacttctccacagcactgtatctctacagcaaatacaatgttacgaaagctctgagaaaagcacgtatccggcctacaagcggcagaaaatacgccgttggccatattgttgccgtcattgaatatgcgtttggggcaatgccgtcactcgtctgtaagaacggctcagttcaagaactcaggctctgcttccacaaggattatcagcctcgtgattgcacgcttgaggccggctctgcaccgaacggcagaagctactgccctcgctacatcacgttcccgtcgtacaaaccgtccgtggtggccaatactacggaggggatcaacaaccaatccaatggcgaggttccgagctacatgcgtacgtctgactctgagtagcgtccaggactccaggttctgtgggcctctgccgagccgagtttgtatcaaatatcaatagagcgagacgccacggcgtgcttgcaaaattaccggcccggtatggtcctgtataattctttcattcacagtatcgaatgactggccaccgcgcaccgggatttggaaatgaaatgtgaatgttaatgtatattatattcacttgactgtaccagattcgtgcacaggata

SEQ ID NO: 27845 - DNA, 2362 bp, Zea Mays
acgtactctgtcaaacgatacgccgcgatgcttccagacgagcgccatccccttcctcgcctcacacgccgtcctgttggtcgtgcctctcttcaacctttttttcttgagcattagcgagagccccttacatggtgcagtgctagcatcgttgctggcgacctcggtgaggtcggatctgcaaaggttgcagctagcgcgcctacactacatcaacatggtgtggcatctcctttcgcagatccccaacatgctacgccgccggctgcctcattggaactcctgtgcaccgcttgcctttcttctcccattcaacccgcaggcgttccctggctcaatagcgcaactaggggatgtccgccgctacctccatataggaaacgacagatttagattttcaggtgatgcgtggtcgggatcccggatcaatcaaaataagtgtgaaataagtgtgaaatttgagaggctgttgaacttccagatcaggtaccaaccaaaaaaagtgacccttttgacggcgtattgcgtgggcaaggcatgccagtgcgacaatagagaaactaacggggagctctgttcgttctgctgattgcttatgattaggctcgcagtggtggtagctgggagagcttgggactggccagacgcgaccaactcacccatgtaataagacaacttttatacatagccgacagtacgcaacctcatgcgcaagatccttaatgaaaccaaagagctgcagcagataaccaacgacaagcagaaaaatcaggttgtacgcatccaacattttactttcatatttgctgaagatgtcaacaaacaaaatagacaagcagcccagacaatggagatgatgtatacgataattgcagatgagttcaagtcaatggacaataaggacatgcgccctgaagattacttgaacttcttttgtcttggaaaccgggaagaaccaccatctaatggcagcccagaatcagagaaatctacatataaaagtgcagagatagtctgtttttgcattttccttattcttaaggaagcatttgaagacgcagaaattactcatgttgacgatacagtagatcctgttagagacatggaaactattagtgaagagctcagactaaagttttcgttggattttgttgatttacaagatcagctgtacaacacttaaaccttttttcgacactattctgtttctattttctgcaggatatagagttcatgaaaaagaaacttgaggaccttgataagccaatgaagaggaggaatgataagctgctcaaaattgagcatgaattatattgatccagcacaatgccgaggagactggagactaaacttggaggtgctactgaaggatgtgactttgagtcaaagggtagcacatggagagcttgaattgaattcaagcttggatatgattggaaaatatttgtattagatcacctagaagggtgattgatgcttgttattggccaagcagccaaaatctatagtgggaactcctgcatacattgctcatgaggttcttctgaagaaggaatacaatggaaaggttttatgcgtagtgtcgttaattattctacacttgacatactgtttttgtttagtgtgcatgttattattctccacttgaacaacatgtttgtttgtcaaaacattttatacacgcacgatttgtagtcatgcataacagggaactatgttggaaggttcgaatgctaaattagtcactaactctttgttactgaactaaggttgctgatgtgtggtcatgcggagtgatgccatacgtgatgctgacgatcaccatccctgagataagaaaccatccatggttcttgaaaaacctcctagctgaccaaatggatgacaatacgatgagtaagcagtacgaggagcctgaacaaccgatgcagagcatgaatgagttcatgcagatcctggttgaggcgaccattccagcagttggttcacgtggactcaatcagtttctgaatgatgacattgacctcgacgatgacatggaggacctagactcagatgccggtcttgacctggaaagcagtggggagatcgtgtatgctatttgacaacattgaatactttgttgtgtcgtaggttaccaagataattagagacaaggggcaggttgttgtgcttgcaagtatctgttgcagctgttgttcatgcctgatgttgatgcctcttttcatactgttgtgtttggatggtgtaccaccagtgttttacaacagtttggcccttggaattgctattgctaaaacttggttcctctgagaagaccttttgtttttgtattcccagtcgagggacggtgaagtactta

SEQ ID NO: 27846 - DNA, 720 bp, Zea Mays
ccaaagagaaccgatatataccccatcaatcctacccgtcttgcccttttcaggttcattgaatttggaaatgacggtggacctgcagcgaagaccttgaagccaaagttcaatttgttcgtcaagctagtgtccaagaatactggattgggggtgccgcatattgatataaaaactgtcattgcagctaccatgtttcttaaaggctttggtggtcttctgttcatagtcagcagctcatttggagcattcctcctgctcatttacttggcgtttataacccctattgtgtatgacttctacaaccatgaaatggagtcaacactgtttgtcgatctttttttcaagttcatacagaacttggcgtttatgggtgccctgcttttcttccttgggatgaagaactcaattccaaaacgtcgctccaagggaaggacaacaaaaaccaagacaaactgatgtcagtggttgtaggaggggaagcaattgggctcattatgtttgcatactatacaggaatagatgtcccacttttgttcttggtgcgccaattgaattgtgaattgggacttacagaacttagcatgtaggatatttaagttatcttgcgcaattttattttcttatgttgcgatgtgttcttatgtcacatttcattttgctacaagaactgctttgacagtaaaaaaatattaagtcgcatagtctattttctgtgca

SEQ ID NO: 27847 - DNA, 474 bp, Zea Mays
ggaccttcggtagagaagaagaccccaacagtcatgaagaacaggtcttcatcattcacaaataaaaacatagttacaaatgtaatattatgccatttattcatttcgtattgaatgtctaaacgatatcaagatatacattacattgataccttcggcttgattgaagttaaaaacgtgaatgcagttacagtcctgcgtgaacagtatgtgggtattgttcacctattgataggcaatcatatagctttgtacgatattacatttgtgtcctcgaagaatacatacaaggtttacaaatgtcacagggacaattttgtcatttgcacctagcagtttgaatgaacaccttcttcctatgccatcttcctacgtcatcgtaacgaagcttgcttcgtcgcacctcctttgatcaaaaccgaagcttttctggtaacgaagcttctgtaatacttaataatttgtaaagcctaa

SEQ ID NO: 27848 - DNA, 724 bp, Zea Mays
atttattttgtggtcatgcaggagctgctggctattcagcagcaaggacctcgtgcaataggtttctttggaacccgcaacatgggatttatgcatcaacagcttattgagatcctcagctatgctatggtcataacactgttatcaggggtgctctaagagctgaaaaaccagagctgcttactgtaattttacctcaaagcctaaagaagcagcctcctgaaagccaagaactgttgtctaaagtacaaaacttgatcgagaaaccacagcatgatcatttgccactaattgaggctagcaggttatgcaatatggacatcatctccaaggtccaacaggtgatctgcttcgcgttccatgacagcaagctgctgatggaaacatgccaggaggccaagaaccttcggaagatcgtgacactcttctacttggattagctccttcgacagggatctattctcctttttttttgttcgtggcgtaggctaatgttggggggataaaaagcaagctggacggtttagttagtttcgaaatatactggataggtggtgggatgaccttccattggaggagaaagtcattttgtttcgcccattgttttgatttttgtcacaaagaaaccaataatcttgtcgatatgcctagtcgaagggattataatctggctttatttgttgttgatctcaggcttataattagttcgtgctccagtttttcc

SEQ ID NO: 27849 - DNA, 257 bp, Zea Mays
agggaacttcacggctggaaggagaccagagagagagagacgcggtgcaggggagcttcagggaagaacggcgccatgggagcttcgacggcggctatggatagcgaaagctgtgcgcggccagccgaggagcaaggacgaccgcggtctggcgagctggaggccaaggtataaccagaggagcttggcgagggcagagcttcatggctgcacgatgctgaaacgaccaggcgaggtcgaccactgcaggggcggca

SEQ ID NO: 27850 - DNA, 902 bp, Zea Mays
gtgctgttcggatctaaacggagctaccaaaccctaacttatgctatttggttacctgcatccggatctgatctagtagttactagtgcaacctagtggtgtgttcgggaacgtttccgagggcgggcggcggcccccagtggcgaagatgatccgactaccgacgtacgcagcaggaggcgtccgttgccatcttcttctcctttgagtatatgatactagcaacatccacagtatcaacattcgtgaagtatatattctatgttagtgacatgctaatggaagaattcgcattgcagattatgtgcgctacagaaagatcacttccaacatgaatgaacgctttccagatgctacatcagaagagctcgatgtgagtgatgctacatgtattatttgccgtgaggaaatggctacagcaaagaaactgctcgatgggcatctgttccatgtgcattgtctaagagaaacaggagaacaggctgaagaagaggttcctctacggcttctccatgggagcttcagctccacaggaaggattctctctactgggacggtgccgtgctgcttgccccaatgtgcaagggttattgtatattaacaaccaacagtagtgtcgaaggagcacaagatgatgtgtgagcacaaagtggccagcaagaatggagtcatggaacatcggcaggaggggtgcgacagcggcaaccgatgtatcccttggacaatctggttttgacatgatgcaaatcaatgtgctgtacattgtattctgcacttgcacagattgtttggctaattacaggattatctcaatgttttggtttggatttaaagtacacttatgtatgaaatatttattggtactcatctatattatattaattatattattattaaatata

SEQ ID NO: 27851 - DNA, 1066 bp, Zea Mays
ctcgagtattttctgattgagcaatgcaccccgttccgccttcataccttgctcgtcagcccggataagataacgcccatctgcacgggccacgcgaagcgttcgagctcctcccacggcagccatggtcaccgccaccacctccccgctcttctccctctcctccctccgcgcctccctcccttcccccacccgatttcacacgtctctctcgctccgagccctctccccacgtgctcgtctctctgccgccctccctttcgcctccccactcggcgggtacgggacctgggcggcgacttcaatctcgtccgcgggaaggttgagacggcgggggctggaggtggtgtgcgaggccacgaccgggcggcggccggactcggttaagaagagggagcgccagaacgacaagcaccgcatccgcaatcacgcgcgcaaggccgagatgcgcactaggatgaaaaaggtcttaagagctcttgaaaagcttaggaagaaacctgacgcgcagcctgaagaaataattgagatagagaagctgatcgctgaggcatacaaagccatcgacaagacggtgaaggttggcgccatgcataggaacacggcgaaccatcggaagtctcgactggcaaggaggaagaaggccatcgagatactccgtggttggtatgtcccaaacgctgaacctgtcgctgccacctaggattcttgagaaatcgctatcatgtgtcagcttttcatttttgggcgactatgctattcacgggtctcaacagcttgccaggttctctattgaaatggtctgttcataccttttctgctatgcgtttgctctgtactagcagtttgactactggctagaatgggcagctcttctcccctgtttctgttgttattcgcctcaacgttgtaaaactgaattcagaaaattttaaatatagctgtcatctggtaagtcttgatttgttcagctgaacaaattgtatcagtagtcagtatgcatagtgaaaacagagtgcagatgatgttttcgattgtttcaaggtccacacttttttttttgaaa

SEQ ID NO: 27852 - DNA, 1739 bp, Zea Mays
aaaccaagaagaaaggtcatcacactactatatggtccaactgtttatatcagaaaaaaaactatagagtgaatggccacatgtagcactcattcaggaaacaggtaaaaccacaggaacataaaatacagaaaagggggcagacccaatgctggatgctcccacacaagtggggtctaggaaagggataaaccaaggcaagcctccccctccgcccacaaatgtgcatgatttcagactattacatactatatatactatgcaagaacacattaaaaatatgattccagactattacatactatgtatgtagcacggatacacaataaggccctcgtatcctgtattgaatacgtatatgatacaaacatgtgcatgatgtagcccgataagtatccatggagtatcggggataaaaataaatattatgaatatcagatgctcgggcttatgcttatacatatcaccacatctattcctctgttgaatatggtccagcccagttaacagattggtatttgaagacaatcactgctcgctcaggtcattccctgctctggtcgccacagcgaaaacacgtgggtgtgcagctgcagtgctgcactacctccctgttgccccaactccaggagtggtgacccctggtaaccagcgacagtgaggtgagttcctttcctctccgctaactctacattccactgtttccccttctgatttctaccctctaagaactacagtcgcacagctatggatccacctcaaggcccacagcgacaaccgcagtgagctagtgacacacgctaccaacaagcctgcccgcgtgcaaccacgcaacatgcgctcccgtagtggcacatcagatcagcagcgactcagcggtcagtatcaccaaaaagcaaatcctgtgtggtccattaaaacaaatagtcaaatagatgtactagcattgtaagagaacggcaatactgccttcattcaatcgctaaccagtagatcttagcttcccttgactgtctgccagaaacagaacgagataacattggcactccttacaatggaatcgctagaacactgaggcaatagccattcccgctgagctactacaataagtatcggtatttttgtccaacagtctaaacacaggcgcataaaacaaaaatgatgcacatccgctgctccattttcacttatgctatcaacagaggaatagtagggtttgtggtggtaaatggctcaacaacacacgcggttaactaaacctctaatttccttagcagcaacacgagcggaacatgttcgaggtttgatagccgcataaaagaaaagggcttagcaagtccgtacgaggcggccgtagatggcgatggggaactcgcagcgggagcagatgtggacgcgctccccgagcgggcgacgggagcgacggccgatggcgcgcgtggcggcggcagcggaggtcgtgacggcgccgaggctcttcgcgacggggaggtccgcgatcacgaggtggtcggggcatgccacggtgaccgattccaggatgctgccaccgagcgccgcagccgccccaaccgcggcgggggcgccggcgccagctgccgtgctagcggcggcaccgccggagtccgacgagccaatcttgctcaggcggatctgcagcatcgctagggtttctagtttttcttcctcctttctcgggctgggtttcggcctgcttcggccggtgctccgggtcatgc

SEQ ID NO: 27853 - DNA, 805 bp, Zea Mays
aaaaaagtacatttataaaatacacaaaataaatttgggtcgtcatcaaccttaggttcgcgcgtgtgacggggatggatcgacgggtttcgaccgggtggagagcaaggctcgactacagacggcgaatgcgtggctccggtgaactccggcgacgaacgacacgctccggcgaactacggggatgaacggcaacaaacgacggcgaacgacactagcgttgagcgaggagcactagagaaagaggcgagctcgagtagggaagaagggagagggctctgctgccttttatagacagagggagagaagaagggtctgccagagagagtaacgcggtcttcaatggccatcacaacgacagtttctaacgagcgtaatagagggaaggagaaacggaagggttcatgctccattaacaccgagacgaacggacggcggtttcctggcgcttgggctcgctgcgcaggggctcgggcacggtcggtcgggctgctcgacggtgcagggacgcgcaaggcgcggctgcgcgcagggacttcgggcgctcggtgcggctgggcgacgcagctcgcgcagacgcaggtgcagggcagggcgcgcggcttgcgcacacggcgcgagagcagggtgctcggcgtcgcgtggctcggccggctgcctggttcggtggctgcgcggcgtcggcctcggctggtcgggagagagaagcaagggagagagagcaataggcggcggctgcttagggagtggagagagagaacagagggagagggagtctgggaggcggcggctgggaaaaatccca

SEQ ID NO: 27854 - DNA, 1753 bp, Zea Mays
ccgacactccaccatcctccatggccgttaagcccacatccatcatcgccgcctccgccacagcacgccatggagaccagcaagtcgccaccgctctactcggcgccgcgggagccctctgccacgacagtgatgctgtgtcaactttaatataattgtgacctgacattcaaaaaaaagtgcaagatgcaaggcctaccatgtgcttatttacggttgatgtcttttaacaatcttcaaggcaaacctgtgacatgcaaaatctttcttattatcactcgttttgacttttgtgattgatgcatttatcacatcgtgttaaacatagcttgttattcacatgttgatatgtgtagctccttccttcttgtttacgtttgtttgtttctttgattaaacaagttatctgagctatttctttgtatcttttttgatgccatgacatagaaaacactacattatcaaatattcaaatgcgtagatttggtaaaagtttgactatgatattgatgatctttcgtggtctgagtggtggagtttttgcagctattcacaggctggaaagttcatgcactgccctccttgtggatacactttctgttaacaaaatgctatacagtttctttctacttaccttgtgattttgatggagctctgttcctgtggttctttgacatttgttggtctcttgagcattagttctgcaatatgcattatgctcctctattgaactctatagcccatattgtggagatcactaacatgttagtaattttacttcccatcaaactttcagttccatcgaattgtacattattgaaatgctcttctgtcttcttatactcggtattcctgtaactagatttaaacaagggtacaagacaacaaaccttaataaatgtattgcatgcagcacatgcaaatcttttggtctaccatgtgctgggtgtttccagcatggcactctgctggtatgaggctaacaaatatctactattgagtttgttagctcccgtgactctgggcactgcttcaccattttgtgactttgcacctacatagcaagggatattttttttcatgcaacccagaatctgaacgccattgcgaaaagcagggataaaatgctgctgtttcactgcaccaactaaacagagaaagaaaaggagatgagaaaactcagcatgttttgattcgactacagtctgcgcccccaagaaaccagggaacaggagtcaggactaacctccagcagctgcaaccggtactgcctctgcccactttggacgacgccaatcattcgcatgacaaggtagagcggcagcaggataccagcagcacgaaccgtcgccactgcaaccagatgccatgcgagcgtcacaatggtgaactgcacaagtcagaatccaggggacagcatggatcaggactcgtcctaaaggatggctatttttcaattcgctgcatgacttagaaccactacataccgtgatcgccagcgaccggcaccatgtggcgcattgatctgcggcgtaggagcacctggtgtaatctgcaccgtcaaccaagccctccggaggttccaaatgttgcatgtcctcgtgttcactgcacgatcacttgagaaaatttagatggttgccaatttgactggaacccagttacaagcctacttgaaagctttttttattttagattttctttccgaactttatgaaacttttgcaggttaacggttttttttttgaaagaa

SEQ ID NO: 27855 - DNA, 5783 bp, Zea Mays
ccccactccaactccaagcatgcagccccgctcggcttccgttgccaggctgccacgccgtcgccgtctcgccgcctaaaacctccctcccccccctcgcaccactccgctcacctctcttcacgccgccgtagccggcgagtagcagcgggtacgtgcctttgcggtgtaccttattggctgagccttccctttgccgaggaagagcacagaagcagggaggtcggcatggcggaggtgcatctaggtctgccaggtccctgggcggcggattacagggagatggccgaccactacaccactaagatcggtggagtccctgattggccaactggtgatatgggcttcaagcccgagactcttcagtgcagcttatgtgggaccaagctttgtcttgttgctcaggtacatgcgcctgtggcaaagctaaacattgaggagaggataatctatgtgcttgtttgcccgacaccagaatgtggacctaaacctcaaagttggaaggttctaagagttcaaaaatgccataatgttatgcaaacagaaggtggtggtgatgaattaggtcaaccgaatggaccttcttctacaagtcttccagaagaacagaatgataaaaataaaattcctgagacaaatgatgacgattttgatctagatgccttagccgaagcacttgaacaagctgcaactttggcatcaaactcaaagaagaagaacaaatcgaagcatgctaatgctcctgtaaaacgtcctgtattgaaggagcaagcatgtgatctgagcatacctgtccttccttgtttttacatacattataataaggaactatatgggggcaaaggcgctgtgggttcaagtagcagtgagttggttttggacaaagaaatcatggatgccgcaaatgacgaagaagaaaaatgggaaggagaaaagtatgagtacgatagagctattggtgctgacagaacttttttaaaattcaagaaacggctggatgcatatccccagcaatgctttaggtattcttatggtggcaagccactgttggctacaacaaaattacaagatcctggcacctgtaggctgtgtggttcaccacgccagtatgaactgcaattgatgtctcctttatcatactttctccatgaagctggagacggttcctcaaattatgcacccagcagctggacttggctgactgttataatatacacctgccccaagcaacaaggaaacaaggtgctgccacttctgttcgtgccaagatcaggagacttttgttttaatagaacatctccagacactgatggccaacagcatgagggaactggatgtgtgagcagaggagtcattagcgtcatccaaagaaatgcaggtttaacgggtgttggaaaggtgcaaggggtgcatcaggagtttgcatttctcatggcggtgggcagaggttgcaacaaaggtgctgagagtcggacaacattctgcaaggctcatggaggagggagacgatgccaagagttaggctgcaccaaaagcgtggcagggaagacagagttctgtatcgctcatggtggtgggcgctggtgtgggatcaaggaatgctcgagtgcggcaagggggaaatccggattctgcctaaaacacggtgaagggaaaaggtggaggatcgagggttgcactcgcggtgctgaaggtcattctgggctgtgcatctcacacggaggtggccgccggtgccagcacccgaactgcgagctacagaaagacagtgcgctaccatcaaatagctctgattctgagccagaagctatggaattggatgacaatggagcaggaaaatcccatagcatcgagggaaacagggattctcctatagacactgatgaaggccagccatctatggatgttgatattaagggaaaatcatctctcaacgatgatgttaatggaaagtcttcttctgagccattttccaatcctccaatcaacatgagtgtggaaagcctagagaagttttgcaaagaagcgtcgaggtccttctttgatgaagttggtctgattagccatcagataaattcctacaatgagtttgtctcgcatgggctccaggagctttttgattcgctgggtgaagtgattgttgaacctggctatgatccttcaaagaaaggatcaggtagctggaagcatgcaatcatcaagtttgggagagtgaagcttgaaaagcctgtgttttggactggcaaagatgaggtttctgttgattttaaaccttggcatgctcgtctccagaatatgacatatgcttcaagacttagagtagaagtgactattcaggtttattctttggagaaaagtgacaaatctaaaacagggaatgatggttttgttcaaaaaaggaacttcatgaatgaaactcactggatatttattggcctccttccagttatggtgaaatcaaacttatgtttgttgcatagtcttaaggaaagtgagtgcctgtttgatgcaggtggatactttttggtcaagggaatggagaaggtatttattgctcaagagctaagatgtctaaggaggctttggattagtgaccgtccttgctggactatctcttttatgtctgaaatgaagcgtagacgtatatatattaaactagttgaatctacaaggagtgaagatttcagtgggagcaaaatcatttccatttcctttttgtatgcgacaatgccagtttggttgttgttctttgcacttggaatatcgtcagataaggaagcctttgatgtgatagatatgcaagattgcgatgcttctgttatcaacacgatatctgcaactatcaaagaatctgatgagctgtgtggaggctttcgtaaatcagataaagctcgtcaatatgttgatgagttggtaaaaagttcgaaatttcctccagtggagtcctttgatgactatatcgctaagtttctgtttcctggtattagtggaaataggaacaaagcacttttcttagggtacatggtgaaatgtctgctaatggcttttactgggaagcgtaaatgtgataataaggatgatttcaggaacaagaggctggacctacctggtgaattgcttggaagggaacttagggcacatcttaggcaagcagagagacgcatggttaaggccattcaaagagatttaaacagtgaccgtgagttacaagatcttgaacgttatatagatgcatcgattgttactaatggtctaaatcgtgccttttccactggttcttggtgccatccctacaaaagagctgaacggtgctcaggaattgttgcaactctaaggagaactaatcctcttcaaatgatgtctgacttgaggaaaacccggcagcgggttgcttatgctgggaaagctggtgatgcaagatatccgaatccatcctattggggaaaactgtgttttatgtccactccggatggtgaaaactgtggacttgtaaaaaatctagctgttacttcaattgttagctcaaaggtggtgcagcccttgattgagagcttcatttcttgtggaatgaataagctgaatgacattcctactgagcacattcaaagaatggacaagatctttttgaatggcaattggctaggatcttgttctgattcagcttcatttgtatttcgattaaggtgcatgagacgcagcagtctgattgatcctcaggttgaaattaaaagggacaagcattacaaggaggttcgtctgttttcagatgcagggcgaatcctcagaccacttcttgtggttgagaaccttaataaaatcagaaagcccaagggacgctcattctctttccaggaattaatgcaacaagaaataattgaattcattggtgtcgaagaggaggaagatatacaatgtgcctggggaatcagacatttgtttgagagtgaaggagctatatctagttatactcactgtgagctggatccttcctttattctgggattaagctgtggtatcattccttttgcaaaccataattttgctcggagggtattgtaccaatctgaaaaacactcgcaacaagctattgggtactcaacctcaaatccacgcatcagagttgacactctttctcatcaactatattatcctcagaggcctcttttcaaaacagttatagccgactgtcttggcaggtcagactgcactacttttggaagaaaagatgacttcacgagaccagaatatttcaatggacaaaatgcaattgtagcagtcaatgttcatcaggggtttaatcaagaggattccctggttatgaatagagcttctcttgaacgaggtatgtttaggactgaacacctcaggagctataaggcagatgtagaaaacaaggatggaaccaagcgactgaaattgaaggaaaagatagactttgggaaaacggaaagcaaaagaggacgtgttgacaatcttgatgatgatggcttaccctacattggtgcaagtcttcagaccaatgacattgttattggaaaagtctcagaatctggagaagaccacagtattaagttgaagcatacagaaaagggaatggttcagaaagtattgctttcagcaaatgatgaagggaagaattttgctgtggttactctaagacaggtgaggacaccttgccttggagataagttttccagcatgcatggccaaaaaggtgttgttggttttctagaatctcaagagaacttcccatttactcacgacggtatagtcccagacatcgtgataaatccacatgccttcccaacacgtcaaactcccggacagctgcttgaagctgctcttgggaagggaatagcctgcaaaggtacaatgagatacgcaacaccattcaccacagcatcagttgatgttattgcagaacagttgcacaaggctggatattcacgatggggagccgagaacgttctaaatggtcgaactggtgaaagaatgaaatccttggttttcatgggccctaccttttaccagaggctgattcatatgtccgaagataaggtgaaataccgtaatactgggccggtccaccccctcacgaggcagcctgtcgctgacaggaaaaggttcggtggagtcaagtttggggaaatggagcgtgattgcctcctcgcccatgggtcagctgccaacctgcatgagcgcctcttcatgctgagtgacttctcccagatgcacatctgccagacgtgcgagcgcgtggctaatgttgtcatgaggtctgtccccggaggcaaaaagatccgtggcccctactgtgggttctgcaagtcttcggagaacattgtgagaatcaacgtgccctacggcgcgaagctgctctaccaggaactattcagcatggggatctgcctcaagtttgagaccgaagtctgctagagcttgtaggcttgcttgtatccagacatccagttattatgtacatagagttagcctatgacgatctcatgctggcagctatgtgaaatcgtgtgccgatgtgtgataccggcggcacagcaaggatgggcgagttcgatggagtgaaacggcagtgtcaggtgggtgtctcaaagctggtggggcaatctacctctgcttagagaataaactctgttgaaactagaaaccttgcagcgttttatatgctgttttcgtcctgcccatctgataaactatgttcatgtgaacgaacactcgtttcctgtttcctgcttggattgcgctggtgcatgcctttttgtttt

SEQ ID NO: 27856 - DNA, 1938 bp, Zea Mays
ctctcctcctctctcttgcttttgccaaccagaagcatcgtgccgaggcagccaagtatctcagcttctgattctcctcctccaaacaccatccgcgggcgtggcgtacatacccagtggtgccgacgactgccgagcaaggcaaaaaggccaagcagcgccccgggccgggccccagcgcggcgcctattggttcgctctgatcgccggggctagtcaacggccggtgatcagccgaccctcgcgcgggagtggggccgcggaacggcggcgatggcggggctgccgccggtcgccaggcggcgcccgctcgcgacggcgtcgtcgctgctgctgcttttgctgctgctcgtggtgaccgcggcggcgcgcgaggagcggggcctggcgcgtgtgcagggcccgccgccgcgccaccgccacgcgtacgccgcgatgatgtacatgggcacgccgcgggactacgagttctacgtcgccgtgcgcgtcatgatgcgctccctcccccgcgtccgcgccgacgccgaccgcgtcctcatcgcctccgccgacgtgccgcgcgactgggtccgcgcaatgacagaagaggatggcatgagggtgttgatagtggagaacctcaggaatccttacgagagcaacctaggagggaccaacaagaggttcaagctgacactgaacaagctttatgcctggaccctggtggactacgagcgtgtcgtcatgattgattccgataacatcttcctccagaacacagacgagctattccaatgtggacagttctgtgctgttttcatcaacccgtgctacttccacaccggtcttttcgtgctccagccttctattgatgtattcagaagcatgcttcatgacctggagactggccgtgaaaactctgatggtgctgaccaaggctttttggttgggtgctacccagacttgctcgacaaaccaatgtttcaccctcctgagaatggcacaaagctcaatgggacctatcgccttcctcttggctatcaaatggatgcgtcatactactatctcaagctacattggcatgtcccctgtgggccaaacagtgtcatcacattccccagcgcaccttggtttaaaccttggtactggtggtcctggccggtcttgccattaggtctttcctggcacaagcagcgctgggacgatcttgggtatgctgctgaaatgccagtgattctgatggagcttttgatgtacatagttatcatagcagtcaccagattggcaaggccagggatcaccaaactgtgctataaccgacggcctgagaagcaaagtgccctggtgcagtggctgatcaagctggctgcaattgcggctatggtggctgcatattccattccattctttgtggtcccacgcacagtccacccgatcatgggctggtccgtctacctatttggcgcgcttgccttgtcagtgctcgttatcaatgtttttctgctcccgccacttgatgtgcttacaacgtggcttgcaattgtgggcatgctcatcgttatggcattcccatggtaccatgatggtgttgtgagggctctggcggtctttggatatgcattttgctctgcgccaatcttgtgggcatccatggtgaggatgatggactcactgcagacgatgcttgagagggattcattcttcccccggattggtgaaccagcacaggagactgaattcagcaagctgtactgattcttttacgcacagatttgggatgcttcatcaccatatgaacagatgatccggatcagttaattctcgattgatgctggtggtttttgctcaggcattccattgtgtactcatagtaatgtataaacattgcctgcagcaaccatgatagatgcagatccaggaaagacagatttaccagctatcaccatctgtccatctaca

SEQ ID NO: 27857 - DNA, 2033 bp, Zea Mays
aattcccatcagggtccgtcacgaaccggtgggcggagtcttccagaggccaatattctgacacagcggaccccgtgggccgtggccgtctcgtttcccgtctcccgcatagaggttcccaaaccattctctttcgctttcgtctccgcaccctagggtttctgtgcctcgccagcgaagcgatgcagccgccgcaccaaccgccgatgaacgggcaacactcccagcctccgccgcaaggacccgtggtgcccatgcctccgcagcagcaggcgcccccgctgccgtactaccagcagcagcaggcgccgcagtactaccaacaggccctcccgcagccgtgggggcagcagcagcagtacgctgcaccgccgccgcagtacccgcctccgcctcagacgcagcattacgcgacaccaccgcagcagtacgcccctctgccgcagcagcagtacgctcctccaccgcagcagcagtacgctccttcgccatatggtaccacgccgggaagcggtgaagtcaggacgctgtggatcggagatcttcagcactggatggacgagaactacctccactacaacgcctttgcggccgtggcccagcagattgcttctgtgaaaattatacggaacaagcaaactgggcactcagaaggctatggttttattgagttttactctcgagctgctgcagaacatactctgatgaacttcaatgggcagatgatgccgaatgttgagatgacttttaagctgaactgggcttctgctagcactggtgataagcgtggagatagtggttctgatcgcacaatatttgttggtgatttggctcatgatgttactgactccatgttggaagatgtgttcagagctaagtacccttcagttagaggagctaatgttgttgttgataggatgactggatggcccaaaggatttggtttcgtgcgttttggagatctgaatgagcaggcacgtgctatgactgagatgaatggaatgttgttatctacaaggcaaatgaggattggtgctgcagctaacaagaagaatagggatgctcagcagacatatgcaactgacggatgtcatgccatctgcatttaaggcctggaattgtcttcagatgtctatgtaaccagtgcctcggttaggtcagtgttttaatttcatgagattttggttctaaagctctttcactctcaggcatcaacttatctggacttactctccagtcttcaatgctttcagtttatttttttaaaaaatactgcccatcatgttccagtactcgtgatagctaatatgtacaattttatatgttgttgtggtatttatttttatatattccccctttttctcatctctggattggatttcttatatctgcacctaatgtcacctgtaacatgtttgttactccgcattgtactgtatagtgcaggaagcttttagtttcacctgtagcttatctggtctcctcaatgtaccatttttttagtcattccaaattctgttgcggtgcagaaaatatttttttttgttcaactttccactgttgtgcctgcacttcctctggtttattattccatgctgcagattcaattttctttttatttctcattagttttccctgaatgcactttgtagttatgcatttttgtttgttgcccacatattctgcttatctgagtttgggtttggtagttggtatggcttagcaacactgtaaagtttgatttcttatttgaaatattttatcaacagttgatgactcagaataagattaaaaaatcgaaatagttgaactaatatgttctacttcatgcccgtgttagtgcatgaggatatttccaggttgtgattaatacacgcagttgctgctacatagtttttgtcatttaaagatactgggtattgtgtagataatctgagtttatctactgacagtttgactatagtaaaatttcttctgttgcagctaagcagtacatgcagtgaacaactaattgaagcaaggatttcttgagc

SEQ ID NO: 27858 - DNA, 4848 bp, Zea Mays
attccgaaaaaaatcactaacagaaggacggttcaggaagcattgacagatagaagatggattgctgatatcacaggatcactctcggtgggagtattattggattatcttcatctttggaatttaatttcagattttgagctgctgccagatatagaagataaacatacttttagtattgctgcaaatgggacttattctgctaaggctgcatatgatgggttgttcatcggggctgtgcatttcggtcactatgaaagagtttggaaaacttgggccccctctaaatgccacttcttcctctggttatcggtgctaaataaatgctggacaacagataggttggcaaagagaggacttgatcatccggagaagtgtccgctttgtgaccaagagtctgaatctttggatcatattttggtttcttgtgtttttgcgagagaattctggttccggctgaaggttgatgtgcattttcagactacaaaatctggctcctacacctagtacggtgtcttttacgggttggtgggagatgatagacaatggctccggagatatgattatgaagggtgtcaactcccttattgccttgggagcctggattatttggaatcatcggaatcaaattgtctttgatggaatctcccctagtgtttctgcagctctttgtcaggcaagggaggaacaacagttgtgggaaatggcaggagctaagggtctctcctttcttgccgcaaccatcaggggcacctagctgcctggtttatcgctgatgggctggttttgtttttcaggatctgtttgttctttttttgtttttttctcttcttttttctttggtttttttatcccctccggggaggtcttttgtactttggtctattttggaccctcttttccttctacttaatataatgatgtgcagttctcctgcgctttcgagaaaaaaaaacgtcatccgcggcctcaacgaatgctttgccaacattggtcttcacctttgacgtgggcgcctttccccacctttttcgatgcttgctctgagctccttcttgaagtgctcaggccatcagggcacctccattgacccctactgcccttgcggcctctatcattccgcctgctcccgctagtgcgcccttggtcttcggggcctgacctctggcttcctctcgtagtcttgtgtgctttgtggagcgtcggggggctcaggcctagggcctttaggtcccgtaggtcatgagtgggactcaggcctaggactcgactcgtcggtcgtgggtgggaggcggactggctccttcctacaccgcggctcggtgctgggcgcagttaatgtggcgtgcgtagtattgatggtgagagcagccctagggccagatgtggaatccactcgagtggctctctggcggttcgtctgatctccttgccaggcttcgcctcgtccgacctctggcgcggtgcataggggtcatctgggtgcagattcacataggcgagcttctccctatcttatctctcactcgtggtctcgtgggggcccggggatccgatccccgacactcgggatatggatcgccgacgtggggaaaggaggcgctggggtggcagctacacccgcgggaggctagggaggcgtaggccgagcgccgatggccgggtgtagggggatgccgccgaccgcaaccgagaaggggaggtctgtcaccggaggaggaggtgcggcagcggccgtaatcgcaatcgtccgcgcgatggctgcagcggtggttggtgcagtggacgttcgtgccgcttgcgtggggagggaggcgagcacatgaaaaggagaaagggagggaggcagtcgtggacgccgagaaggtgcgggcggacgcggtgacgatcgctctgggagatgcaggggaaggagagggaggggttgccggaggactgctccatgacggtggcgatggccgggggtgcgccgacggctagagtgcctggtggttagggaatgtagaggcttgataccatgttggaatagaaaaccctaaccagagttgatagtgcattaatataatagagttaggtgggtctgaggcccattacaatagaggcattacaatagagcatacagttacgctaacagtatcaaatgcctttgaaatctctagcttcaaaaggatgtatggttctttacttttatgtagggtctgagcaagctgctgcacaagtaagaaattgttgtgaatattcctcctaacaaaggcgctctggttgttagaccagcttaggcagcagggtgccaagcgataagcaaaaatcttggttaccaactttgcaaagcttgagttttaggacttgagctttacaagatgagtttacagcttggacttgatcagatcccatctgaggaaaaggatctccagttttggcacttgaattatcaccattgtcgaatagccaccctaaaatcaaagtatttaatttcttctgtgactgctaaaaggttgaaataacttttctaaaagaaaattgcttgtccatgggagacccctgggcattttttagtttataagttagcaaattacatcctgattggtgattggctaggaaaactagctaaatcagtttccagggaggtaaccacaaattgctgagtcctggatttgagcacaggtggccttcctctcaactgggaagtactttctaatttccttttcagatgtagatgtaatatttccaagaagtacaacccttttccttttttccttgcaccaaaccttttgtaactttgttcccagataccgggttctcggtcttgttagaagtatattactaaacaatctatctgcctacactgcattgttcagcagatgctggattagataaaatgtgattttaacaagtactccctatgttccagtttattaggtggtagtgcatttttgagaaagggcagattgttaggcggcatacatagcaaggcattgcattataaattcctgtggaagaaacacagccgttttatccgacccgatccaacaagtgaatgcaatgcaccagatcagtgtggcacctggcgtgaattaaatcttgctcacactctggtgtgtgtactcttagcgcctttaaattgggtgtggagggagtgtatatgggtgcaaaaataacatagctttgtacaagtaaacaaacatggttggacatcacttttacctaagatttttattgaggactaactgtctctgcttcttacatcctagactgaaaattttccattagatgtccacattgccttggaatgtattgattgtgctatctctttcagcatcaacatgggaaataaggactttgtatacatcaggatcatcgagtccaaaatgtgttgttactcttatgttggagattgctccaagtttttggggcagatggaagagaaggcactcaaattttgacaaaagcatcccttttgctttgctcagccaagtagcaggtataagagagtacttcgcagccaatccagccttgacatctgagctgccttcaacagtagtgaagtcaaaagcatctgaaactttgatcatccagagtgaacatgaagattctgaacttggtgatgaattttatgatgcacttactagaggtgaatccttcgaagatggggatagtgatgatgatgatgatgccacaactccaaaggctagaaaagtaaagttgaagaatgtgtcatgggctattgcaggcttggctttaaagacaactaaagctttggttgagacaagtgaattggttacaaattctagtccagttactgttgaccccagccacttccatggcacccttcatagagcgaaaactcaaaatgatcaaaattcttggagtgcacctggtggggagaagtttatgatcagagggaagacttacttaacagattatcacaaggttgttggcggtgatccacttctagagctacttgcggtcgattggttcaaagttaatgaacgctttgattcagttgccttacatcccaaaagccttgtgcaatcagaagctgcaaagaaacttcctttcatattggttataaatttgcaggtgccagcgaaaccaaattataacttggttatgtactacgctgcagagagaccagtgaacaaagattctttgttgggtagattcattgatggaactgatgcataccgagatgccagatttaaacttataccaagcattgttgagggttattggatggttaagcgtgctgtaggaacaaaagcttgccttctgggcaaagcagtaacgtgcaattatcttcgccaggataactttctggagatgttgacatcggttcatcatccgttgcccggagcattattggtctagtattgggatatgtcacaagcatagttgttgatcttgctattcttattgaggccaaggaagagaaagagctccccgagtacattctgggcactgttcgtctgaaccgtgtgaatcccgacagtgctgtatcaatctaattacgtttctagccgatctatgcaaatttactcttatcctcttttattctgagagaaacagcgtggcattttgaaaatgtgaaatagcattactatttgctgatccccaatcgagggtaacatatgtaaattggcatgaggcatgactacgtgacgcctttcgtaaatagaataaatcaatggttatgtaatattaatatcccatatacgcgtgtcataatctatgtggcttaaaagtggcatcaagtcatctagtttcctgtgttaacttcttattccttaggtagtcagacattaacagtgtgtttggtttgaggaatgaagtgatccatctttttctcac

SEQ ID NO: 27859 - DNA, 1648 bp, Zea Mays
aacatagttcagcatagtacaacgaaaaccaaaaaagcatttctaccatctacagaaagaatgataatcgtccttgatggaagcaagaaataaggggcaagcgagaagatgaggctggtgggtttgacgggtggcatcgcatctgggaagagcactgtctctaacctctttagggactctggtgtccccgttgtggatgccgatgtcattgctcgggatgtagtgcagaaaggcaccagaggttggaagaagattgtaaaagcctttgggaatgatattttgctggaaagtggagaaattaacagagctctattgggacaaatcgtattttctgacccatcaaaacgtcaacttctaaaccgtcttctggcaccacatatttcttatagcattgtctgggagatagcaaaactgtggatgaaaggctgcaaggttatcatccttgacatcccgctgctgtttgagacaaagatggatagatggacgaatccaatcattgttctctgggttgatccaaaagtccagattgagaggctcatttcaagagatggatgctctgaaggacaagctcagaataggatcaatgcacagcttgcactagactggaagaaatcagaagcagacatagtgattgacaattctggttccctggatgacaccaaacagcaattccaagaagtgttgatgaaagtctcggagcccttgacatggaaggaacgcttgagatctagagatggtctgatctctgttgtcgtctttactgcagtgggcgtattacttgcccagaagaatctgctatgatcatgaaggcttagggagttaaaaatgttgatacgatgttttaaaggactggcacaactaagtaagaacccttagtaagaaccactatttttagttgtccttactggataatgggtcaagtaatgaaagtctgcatttagggattgctgggcttagccaaaatcttgttgtaccaaattgtgttgatgggctgggaattacaactatattcggactacgggctatccatgttcatgtgattttttgtaccgagtataaagcatggccatgcatgcgaatccgcactgcctaattatggaagccacttgattagaagcttgccctttagtcacagaagtgttcttttcaggcttgtcaacatttcaattttgggtacacattactctttcaatcataagtttgggggtgtttggtttcaagtttgggggtgtttagtttctggggactaatttttagtctctcaaatttattctatgctaatctctaaattaccaaatacggaaactaattagcaatttagaagggactaaaaatctctagaaaccaaacacctctttttgaaagtgatacgagtgtatttgtttttttagaaatagtatgataaatatttgccaaagtttgaaatggctgatttcaggaaacctaatacaccacttatttgtcactggacggaataatcaactctgagggctagtttaagagctaaaataccagtgggaattggaggagctaaaattctcttattttgaaaaaaaaagattttagtttcatcaatcccctccggttttgtggctcccaaacaagtcccgaacgtaactgacataaaagcaaatgtatgcatttaaac

SEQ ID NO: 27860 - DNA, 1935 bp, Zea Mays
aagcaccgagaaatctagtggtgcagcgaccgagcgaaccctccccttcctccgcctcccattcccaaaattttcaccgcacgccctctcgctctcctcggctaaccgcgacgacgacccccgaagcttcgcgaagcttcctgggcctccccccgcggccgcccctccctagatcgccgcctctggcagcggcgaggctgcatcgcgagggcggtggaggctggaggagccgggccacggggtcgacgaaggcgagactagggtttgggtttggtgtccagctgcatcggtcggcgccctgtgagggagaaggatgcatatgatgcggcggctcaagagcatcgcctccggccgctcgtccgtctccgatccgggtggtgactctggctccaaaaggccaaaatttgagcaggatggagcaggggatattgttattgagccacacttaactgaggccaagcctgtccggatagaccaagaatcatcatcatcatctaatagggatgctgaggcaagcacatctactagcatgaagcctgttaaaactgaagaaccagtagcagatcttcttcccaaagaattgaatgatatgacaattagtgacgataaagctgatgaccataatgataaggaaggtgaaggtgttactcttgatgggaatggagccgagacaggacagataattgtgacaacaataggaggtcataatgggaagccaaagcagaaggtctcatacatggcggaacgggttgttggtactggttcgtttggtatagttttccaggcaaaatgcttggaaactggtgagacggtggcgataaaaaaggtgttacaagataagcgctacaagaatagagagctccagactatgcagttgcttgaccacccaaatgtagttcagctgaagcatcacttcttttcaacaactcaaaggggagaagtttacctcaacctagtacttgaattcgtatctgagacagtttatcgtgttgccaaatactacaaccggatgaaccagcgtgtacccatattatatgttaagttatatgcatatcagatgtgccgtgcccttgcttacatccatcgtgttgtcggtgtgtgtcaccgtgatattaaacctcaaaatctactggtcaatcctcatacacatcaacttaagatttgcgattttgggagcgctaaaaaattgggctcctgaactaatatttggagctacggagtataccactgcaatcgatatctggtctgttggctgtgtagtggctgagcttctgattggtcagcctttgtttcctggtgaaagtggtgttgatcaactggtggaaatcataaagattttgggtactccaacaagagaggaaatcaggtgcatgaatccaaattattctgaattcaagttccctcagataaaagcccatccatggcacaagctttttggtaagcgcatgccacctgaagctgttgatctcgtgtcaaggctacttcagtactcaccaaacctgcgctgcactgctgttgatgcttgtgcccatccattctttgatgagctgcgggaccccaaggtctgcttgccaagtggacgaccgctgccagcgctgttcgacttcacagcagccgaactcgaagggctcccaatcgagcttgtccatcggatcgttcctgaacacatgaggaagtgaaccggtggtggacgtgctggagagatccctgtttcgtgagggcatgctatggaggagcgatgtagctagcgaacgccttgctagatgtaaagagggctgaaagttccttgattgggcgtgtcaccaaggttcatgctgaacaagagaattcagagtgctgtgctgtgcttgcttcgttagctggagatcaacaggatgtcagttttgatctgcttgcgcgtggtttcttttttttttttacgtcatcaacgacact

SEQ ID NO: 27861 - DNA, 146 bp, Zea Mays
tcataccctcaacaattacatacaaggtttacaaatgtcacagggtaagcattgtcatttgtactcaacaacttgaacaacaccttctccatgcatcgccttcctgcttcgtcgtgacaaagcttgcttcaccgtatttctcttga

SEQ ID NO: 27862 - DNA, 731 bp, Zea Mays
taggactctcagattcccatctcgtcttcttatctccacttccccacacggcctcgcctcctcttccgtcctctgtttatataataataataataacttgccaggcgcgcgccatctcgctccgtccatccctgtcgccaccaatccatcgcttccgcttcggcctcaacgacggccgccaccaccgctcccatccctctcctcctcctcgcccagcggccattaccacagcctcccccatcaagccgggatggctgcacagcctgcactcaaggcgtcgttcagaggggagctcaacgccgtctccttcctcgactccagcaggggacctttcggccaacacaaaggaccatgcttcgtcgccgaaggtcctgcggaaagaaaacagcttcgactgaagctgcttgaacgtaatgccgaaggtaccattcatgaagcttcggtattacagcatgtccgaagatgagggatcgaaccgacttaaagatagaatgaccttttagttcataagggtctgagtcaatgttgtaaacttttatgagggacatgattgtaatttctcacaggctgtgtcctgtgcctataaatagtgaacagtattcctttactgttcacgcattcctgtaattgcaaacgcttcactcgggaattattgtttgtcaagacaaatgtataaatgtatctaaacattatgtttaagcatcttagattcatataataagatatgtgaa

SEQ ID NO: 27863 - DNA, 2072 bp, Zea Mays
ggaaggttgttccatcatgctcttgaagaatcaagacccaaatctgttctggttcattcactatcagtgtgcatatctttgctggatccgaaaagactagcatcagcttcgtatcaagcattcagaagcaacttaagtcatggggcattggtcacagccagtccagagacagttgatggcatgcttgacagtttagttactggacacttcggctactgaaagcgggttgccaacaacttatggatctttgcgcccacctcttggaaaacatcgtctgaagattgtagaattcatctctgtgctgcttacaattggaagtgaaactgctgaaaaagagctaagaaggcagtcagcaataaagcgctcgattgatttgttctttgagtatccatataacaactttttgcaccatcatgttgagaatataattgttgcttgcctggagggtaaaagacctgaagttgttgagcatgttcttcatgaatgtgatattgttggtaaaattcttgtctcagagaggttttcatccttgtcgactgagtctaatgggcctactgttccctctgaagggaaaacccctccaagaattggaaatgttggtcacatgacaagaatagccaataaacttattcagttgggcaatagtaacaacacaatccaggctcacttacaggaaaataatgattgggttgaatggcaaacaaatgtgctggtcaaacgcaatgaagtggagaatgtttatcattgggcttgtgggcgcccgacatctttacatgaccgtggtagggacagcgatgatgatgacttccgggacagggattacgacgtggcagctcttgctaataacttaagtcaggcatttcgttatgggatatatagcaacgatgacattgaagaggcacaaggatcacttgaacgagatgatgaggatgtgtattttgatgatgaatcagctgaggttgtaatatcttctttgcgtctgggagatgaccaggacagctccctctttacaaattcaaattggttcacatttgatggagagagaggcattgatgatcgtttatctgcctctgttccttcatcatcccccaattctctggagacttcactagaggccgaggaagctgatgatggtaaagtcattggcactgaggatgaaatggaaacagtatatcttggaaatggtagtgctgaggaggtaaaagatgtagcagaatgtaatgaacagccaaattgttgtactgaggatgagcgattgaaaaatactgaagggattgaacggcatccagatgtttcaaatcactataccgacatatgtacaaatgaggctgcctctgctgcagcagaatcttcagccccatcagttgagatagtggcaaagaaaacagtagatgaaccatcggaggcagaaagaacagtggatgaaccggcagaatcatctttggacagttctgtctctatacctttgcctgctcctgttaatggtagtgagcctgccaactcggaagcctcttccgaacaagttgcccatgacactgatgtgcagcaaccagtcaaggaagctcctgatgaggacgttaatgcaaagaaaactgatgtagccaaagcaagcgagtgaattagcaacatgttggactgagctgatcagagcaattacttgcgaactgaaaacactggagtgtagcctgtgctcagctgccacaagatagcctgaagcaaactgctgtacaataagcaagtgattgttctgccatcaacggtggcatatcactgtacaaatgagcaccattgactaacgcacataagtcgccttgtctgaaactggtcattttctttgaaattcaccctccagttcatgtgctttggtggcagacgtcgtggcatggtatatggtacctgagaacattctttgggtggcaactggttttggctacttagtcttctgttgcctgtaatatgagatgtgatgttatttctagtctagctattgttgtaatttttttggactctacatgtgtcagttcgacttcgaacaatttttttataaagattcgtcactgcattagaggacc

SEQ ID NO: 27864 - DNA, 4797 bp, Zea Mays
tggcaacgatgtttttggttttggagggaagttgcgcgccacctaatttcaggagcccccgacaccaaaacccccctgctaggctgctcgcctgctcccaattcccacctccattgcttcaaacgcggcgagatcggaggccaaagccgcggccaaacaaggctgtctggggtctcaaaccgaaggcccaagcggcgcgcctcgacaccccggctcccctccgcccaatcgcctcccggcccccgcgcagcgtggcgcgttaggtctccgccgcctacctctgtatgcaacaagaagctgccagcatccactccaccacctgccctctatcaccgtcattgtctactgcacggatcttgatgaagacaagtgatatactttgatgttagaatcctccacaagattaataaccaatccctcttcggtagttcattagaatggagtgcaacaaggaagaagcttcaagagctaaggatttagctttggtaaagctgcaagaagcagactatgctggtgctaaaaggattgccctcaaggctcaaaagcttttctctggccttgaaaatatttctcagctgttaactgtttgtgaagttcactgctgtgctgctattaagatcaacggggagactgactggtatagtgtccttcaagtagaaacaactgcagatgacatattactcaaaaaacagtaccgcaaacttgctctcttactccatccagataagaacaagtttgtgggtgctgaagctgcctttaagctaattggagaagctcacatgatactgacagacaaagtaaaacgttcacgtcatgactcaaaaaggaacccagttattccaaaatctgcaccaaagaagcgtggacgaccatcaaaggaaactgattatgttgctaagagggccaataaggaaaatactgatgctgtatattcaactttctggaccatttgcaccacttgtggaaccaaataccagtacccatatagtttgttgatgaaagttctcttgtgccaggtctgctcaaagagtttctttgcttatgatttgtctaagaaaccgtttgtcagagtggatgcatcaaatccatggagtggaattgggatgcgacacaaaatgtttcccaaccaacaacacaattaccagagtgttcctactcagcaaaatcctgtcactggtcgtcaaactcctgtccccgaccagaaacagcaacctcggaatgtctctggtaagcaaactccaggcattaaccagcaacaacgatcacagaaattccctttcagttcaaggccaaagaatgtggtaaattctcatccatggggtggatttggtaggcaacaggaaatgtgtcctctgagtcaacccacacatgtatctgaccaaaaaccctactatcaaagggcccctggccagcaaaaccctgtcaatggtcatcaaactcttgtcactgaccatcaacagcattctctgaatacccagcaacaatctacaaaccccccttgcaatccaggatcaaagaatgtagtgaattctcaaggggcagccttccagaatagtaatgcaactgcaaacagtaaccttacggatgaagctggggcttgtaatagagaaaagattacaaggccatcattcaatgatgaagatagaactaaatcacaggttgcaaattctgataaagttcatctagtaaacaagcaaatgaagggaaacaaggtagctacaggatccagtcatcctgttgccataaatggtagccaagttgctaggaaagatgttcttactgccgcatgtgcagataaaacatctgggcagcatccttgtatagcaagccagcagagaaatagtgtcattgttgaagatgggtctgatggttgtggaaaggttagtgatcatcttcctaactcttcgacaaagaaaaggataagaaaagaccattcttcctatactgctggcaaaagtgatcatacaacagaaaatgaagttgctgaagcaaacagccaacacaaatatagtattccaagcaaagagaagataacaaatgaaaaagaagtgatcagtggattaaatcttgatgtgttgcaaggaacaaaaagaaaacaacaaacaagttctggaagtggaagtgatgctgctgctaaatctgtaaaccatagtattccctgcaatgttacagtttcatgtccagatccagacttctacgactttgagaaaaatagggatgcagatcgattcacagttgatcagatatgggcagtttatgatgatcttgaaggcatgccaagatactatgctcgaattaagcaggtctactctccaaacttcatgttgcagttcacatggctagagtatgatcctttgtgtgatgctgagaaggaatggtcttctaaggagctgcctgttgcttgtggaaatttcagagttggaagaacactcttgactgaagacactaagatgttttctcatgttgtctcttggacaaaaggaaggaagaggaacagatatgagatttatcctaagaaaggcgaagtctgggcacttttcaggggatgggacatcaactgggtttcagattccgacgatcataggcaccatgattatgatattgttgaaatcacctcagactttgctatgggtttaggcacttatgtgattcccttggtaaagatcaaaggttttgtcagcttatttgttcgatcaagcagtgaagcaccatttctgatacctagtggcaacacccttagtttctcgcacagcatccctttccacaggttggtggaaaatggcaggcaacatatcccaaccggtgctcttgagctggacactgcatcactaccttctgatttggagaaagcgtttactcctgtgaacctcgacaacagttttatgagcaccggaagtggtagcactccatgcaatgtttcatctactagctcctgcgaagtgccggttggaaagaccgaacagactcaggatggtactggtacaggtgtgaaggatggagtcgagaagctgaatcagaatacaaaggtcgaacaagacaacggctcagaagcttcaacgattgatgactgtggcgatgggtggaacgacagctctccgccaggatctccagctgggtttcattaccctgacacggagttttgcagcttcactagcctgagatcattcgacaagttcaagaaagggcaagtttgggcactgtactgcgacaccgacaagttcccaaagtactacggtttggtaaagagcgtcgattcagaagactgcacagtccacataaggtggctggagcactgtccgcgcgaacaagtggaggagcacctggcacaagacggcctgtccattggctgtgggttattcgaagtcagcaggcagagtgagacctacgactgcacagaagtcttctctcacagtgtggaggtgacgggtaaagggaaaagatatgagatccttccgtgtgctggccaggtgtgggctgtatacaaggactggagccgcacatggagcttcgaagattacagtagatgcgagtatcttctggtcgaggtcatggaggtttctgatggtgatataacagtgtcgtgccttactaaagcggagggctttagcactgtgttcatgcaagagcagaacggtaaatccaggagaatagcaaggagtgacttgactatgttctctcatcaggttcctgcctaccgcttgacagacgaaactggcgatctttgtggttactgggagcttgatcctgcgtctttaccggaagttttgctggtcaggaagaccaagtgaaacattgttgagctgatagagaggggttttggcactgtgaaaagtgaagttatgcgctggtgacaaggctgtggtactggattgttgtttatttttggctagttgtaccttgtttcgtgtaaacaggctagtccattagtttgctacctgatgccactatggcaagccttttgctggctcggtctcgctttaggctacgtttcatcatctcacctgtttgtctttgctacgtccattgtggacatttttggtgggtataccagttggtcgcggctgtcttttaaaattaattatacaaacggtatccagacgaatctattagttctaattagtttaggattagttctccatcctaaaattcaggtaactaaactatatgagaaacgttattacaatcttataatatatattccatttacttttgttttgtttcagtccgcaatgtttggggagatgctgggttcagggagagcaacgccgaagctgctcgggttgtacgttctgttccttgtctttgctgtagcttcagttgcgcgtggcctctgctcccgctcagcacaggctacaccggcggcaggtccatcgcctgtacttgctgctccgaagaagagggtttagatacctgatcagggcatgtttgagagtcttgcattgggtccaaaacctctgaaaattacacaatgttcaaaagtttccacgacatggactggattttgctatttgaatggcggtcgacgtgctaaagacatgtgcctggtttgagacgccaagtagaatgagatatggcagtcttccctcttcacggtgatgtagtagtcagaataatcgtagtaggtgttggacaccaaaatgagcggacggtccggcccatgggcccggacggtccgcgtgtcccgagattagattgactcggatgtttatccttatctcgtgcgtggttatccatctaatcacgtgggagtttgttggctatctcttaggaaaaggtccagacctcctcccctataaa

SEQ ID NO: 27865 - DNA, 1596 bp, Zea Mays
gccggatcctggactcgttgtcgcgcgccagggcaaaggtggagattaggaattctgctgccacggacgacgacatggctaaccatcagttggtctcctaccacgagctcgctcgtgctaccgaaaacttcagtgatgctaacctgctggggtctggaagctttgggaaggtttttaagggccagctgagcaatggcctggtggttgccgtaaaggtcatacacatgcatatggagcaagctgctgcaaggtttgacgcaaagtgttgtgtgcttcgaatggctcggcatcgcaacctgataaggatactgaacacctgttccaacctgcacttcagagcgctggtgctccagtacatgcccaacgggagcttagaggagctcttgcgctccgtcaacggaggaatgcgactagggttcgttgagaggctggacatcgtgctagatgtgtccatggcaatggagtatctgcaccacgagcactgcgaggtggtcctacactgcgacttgaagcctagcaaactaaggcatgagacattgaagcagcagctgtgccgaaagctaataaatggtgtatcagtgcataaccatgttcctgggcagagttctgttatacctccagagacaaattccatctccatgcatgacttaaaggcagaaatagagttaaacccttgtttgcttgggattaatgcatcactgctacacgaaaagatcaattcatatgactagtaggatggagctagttgtattcatctcgtcacaagatcctatgatcttgatggtctgtcttgtttcatggctgttgtaatcaagccataagtttactgatgggtggcggtgaaggcaagcgcattctgtgcagtaccctgattgttttgcatgtcatctctagtgcaatcttccaaaatgaacaaaaaactgtgtatctgctgggtgcagtactaaaataattcatttcatccacctaaggagtaaggactacgatgggcgaaagtgctccagagataactatgttgctggactccagacaaattgaggaaccatatcaaagatttgatctccaaatgaaagcctgtatgagcagaagcccgaagaaacagctcctgtcctgccatatcttgtttctctgcacttggttgcggcctgtggtactggtcgactatggcggcacaatgcctcagctacaagaaaatctttgtggactgctatatcttgcccgacagttcaagctctgcaaggtgaggtctgtttagtttggccagaaaggcatcccctacctgaacacctacgacggccgcaccatccgctaccccgatcctctcatcaaggccaacgacaccatcaagattgatctggagaccaacaatatcatggacttcatcaagttgtatttgcccatggacttcatcaagttatatacttagttaggctcaatgttagcacaaacagttgatgagcaagtttaaatttagagtacacttatgtatgagttatttgacaatgcttatttatgagatattgaatgttatttatctatattatattaattatagtgttattaaatatatgtgtatgtatttttctcttttaaatt

SEQ ID NO: 27866 - DNA, 3543 bp, Zea Mays
cccaagatgtggtttctattctatcgccgtcattgcgctctcctcccgttgtaaacccaaagaccttcgtcgcacggacccgtccttgctaattgctcactccatcggcgccgggtcatcctcgtggccccgtgccgcaccgcgaaaccaaaatctcgcaatcctaacctaccccagcgacctagcgccgtcgtcgctcgacctcccctcgccgcgccgggccccccagagggtctcaggccatagcgaggagccggggttccgctccgacccgaatccgagcctcccccaggacgcagcgggtctcgtttccgtactcgtagcaggaagtttcgcgcgagggattgattgtcgagctagagatgtacgggcagggagggagcttcaatccacactatcgccatggcccgcctccgccccagcagcaagctggggtaactgggtccttcccccagcaacctgtgccaccgcctcggccaccttacccacagcaccctggagtgcggcctccggctgggccgtaccagcatggcgtgctgccacatcagaaccagccatacccctttgcgcagcatggtcggatgcaccagatgccaatgcttccgccacagcagagaggttatgggtcgatgccaatgccagggtcgctgcctccgcaacaagctatgcatcaggcccctccacagtatccgcccctccctccacctccacctcggccgcctggctttgttcatgataatgtgctgcctccatctctgcctcctcctcctcctccttctccaccaccaccaccaccaccaccaccaccagaagcagcagcagcagcatcatattctcctcctcacacacttgttgttgcacagtcatgcggcgcagaggcagaagcaaaagaaggtgcatctgaaggtggtcgttttgccaaaactctggaagcagctactcagctaattgtttctgatgactcagatatggacatggatggggatgaggactctccatcaaagcagccccttaccccagaaacttctttgcctgtgactgttgaatgtactggaaatgttaatgtgtcaaagttcagtgatgtttcaactgaggacaatgctaaaactgcggatgcaactgaggacaatgctaaaactgcgcatgcaactgaggacggtgggagcacattccaactgatacaaggttatggctccgatgacagtgcaaatgaggctgatgctggtcctggcagtgctaatacccttgtgacattgcctgaagataacctgcatggtcatttaagtgatagtaatactgagtttgattatcagaaacatgttaatgcaaaaggaaatgtgaatacccctcatggcactgagcaaaatggtaaggctgaaaattatcatctcaaggttgagagcaacccagtgaagcatggcacagatgtacttgggcatctggccaaagaagatacaagtggcagtgaaattgagggaggtcaaagtagtaaaaggcatgggaggatacaaaagaaacgaacccggagcatctcacctcagggtagaagtggtagtccagtgggggcaaacaagagcagtccatcccaaagttcttcacctggaaagcagagcaggccaccatttgctaagcgtctccattctgctgatgatggtaatgattcagaaggtagagttgttcagcaagagggcctgtcattgacatcaaaattggatagttcttctaatgatttaattggtaaagtgggagatgctgctgcggttggtgttgcccttgggcagcattgtcacagtgacaatttaatttctgagcattcacaactaatggctgctggtgctactcataagatgcaaatgccatgccccccatctgagtctctatcagacttaaatgtgtcttcatcagcaggtggcccaattcttacgaaccaacctgctgcaggtgtcccatatgtgtctgtagaaactaccaagagctccatgacatctaaacatctccagtctcatcctcagagtttgagtcctcctgaacacatgccatcctcaaatatgattcagctaccaggacagccatcatttgcaacatcagaattccctcaaatgcagttccaccataaagttgttgcaccagcaaatgaattcttgcagaaccagatgagaagctaccctccacaagatgtgtctcatcctagaccattcgatttccatcatcatactctcccaccagcagttccttctaaccagcagccttctaccattcctgttgagaatgctccagtacctcatcataacagatggccagagtattctggtggtgttggtctatcctattcatctcatcggcctccatatggtcagcatcaacctcctgggaatcttgattcaggaagtaacttggtttatccctctttccagagatatccatcaaatctaccagtcagtaacaatattggtcccttatctgatgccgatttgactaaatcgtctatcaaaccccactacaatccatttgcatctacctttgataaaacagatccaagtctagatattgggcctcctgtaagccctaatgcagttggttctgtttccacaacagcagaacacatgaatacactgtctccttttggtcgatccagagcacatgcccatggaaattctgcagaacctgtgcccaatagacaaaagttactccatcaggagtttgcttctggtgctccgtatgatccattagttgacagtattgaaccatcaagcagttcaatcaacaaggtagatcttcgtaaagagaagaactggagtgctgctgataggcgtgatgcatcgaaatttatgaacctagaagtggacagtgaaaatatgcatggactgggggttgttgctgagtcagaagttgagggacttggagaggtggcagcagatactgagacaggtgtggtggagaatgcaagtcctgagttcttgggtggtaaagattggaactcagatatccctgttgattttgacaatgaccaaacattggacaaaaataagaagggtaaagattccagatcaatgaagctttttaagagtgctattgcagattttgttaaggaagttcttaaaccatcatggaggcagggtaacatgagcaaagaggctttcaaaactattgtcaggaaaacagttgataaggtttccggttcagttcctagcagtcatattccaaaaacacctgccaagattaaacattatgtacaatcctcccaaaggaaggtgaccaaattagtaatggggtatgtcgacaagtatgtgaagccatagagtaatgtggcattgtgctgaatcagaactgtcatggttccagagtctgtgctgcattctactaaatgaggctgcaaatttggtaatctttctgatgaaacggttgttccacagtaaggtgttaacttggctatcttagctctacagaaattgaaaaaggcacacttgatgcctttgcacattttcgaaagggcttttgaaagtcttggcaactatggttcttcctctagtcggcacatgtgtc

SEQ ID NO: 27867 - DNA, 4889 bp, Zea Mays
tgctattgggcctctcaaaggcccgaaaaaacacaggtcaccgtcctctcctctagcgccgcccatccatccagccgtccaacgcctactaccgccgccacccgcctcccgcctctcctctagccccagccgttcagcgccgcccgcctccctcctctcctcctctcctccctcctccagtgccgccacgacgctcgccactagcgccgttcgcctcctccaacgcccgagcaccgcctccctcctccctcctccagcgccgactgcccctaacaccgccctctagctcctctagcagccagcgtcgcttacagccatcaagttccagggcaggagtcaagacagtgaatcacccagctgctctattcggttcaaatcctgtgtcggccactgcccatatggtttcaggccggctgtgctcgtttcgtcccttgtgcgggagctttgtttgagatttgagtcgttgcagctaaatcatggaagatagtaatgccctgattttgccctgcaaaaggaagaacaaggcgcaagtgaaagccaaggatggtaagaaagccaagaaggaagacccaaagatgagcaagacgaagctcaaaaagctgcaaaaattggaggaggaaaagaaaaagaagctgctacaagctaaaagcatcgaggttttgcagaagcacaagatctcagaggatgcatattcactgcttcatgcttcagggactattggtcaagctgagactttgaaagaaaaacggaggcgtgctgtgcaattctcaaaggctggcctggatgttcctgaagaactctcactgttcaagaaaagcggtggtacgaaagttcctgaaaacagtgatgttggggagcaagtttccccattaaagtttgttgagccagcaccaattgtggattctggtagagaatgtaataacaaaatgaaggatctagtgaaagctattgaatgccaaccgattatgggttttggagctggcattccagagccagaaactgaagagcctagtgatgatgctcatatgttgacaaatcagaaaattcagttgtcaattccaagttgttctggagcagaattagatttgcagggtaaagaactaggacaagggcagcattctgtacaggagtgcataaatcctccaattgttgtacctgtgtcaagactgcatgaagttgagaaggcaaggagggatctcccaataataatgatggagcaagaaataatggaagctatctatgaaaattctgtagtaattctgtgcggagagactggctgcggtaaaactacccaggttccccagttcctatacgaagctggcttcggcactagtgaccgagctgatagaaaagggatgattggtatcacacaaccacggcgcgtagctgttcatgccacagctaagagggtttcctatgagttaggacttaagctgggaagagaagttggttttcaagttaggcatgatagaaaggtaggaagtgaatgctccatcaagttcatgacagatggtattttgctgcgagaaatccagggtgattttctgttgaagcgctattcagtgatcatattggatgaggcacacgaaaggagcttgaacacagatatacttattgggatgctttctagaattataaagattcgcaaggatttgtatgcaaagcagcaggaaaaattacggtctggatttaagatcaaaccagaggataagatcagtcagttaaaggtggtgctcatgagtgctactctgcagttaaaggactttatttcaaatagaaggttgtttggcgtgatcccaccagctgttaaggtacctgtgcggcagtttccagtatcagttcacttctcaaagaggacacatgatgattatttagggctagcttataaaaaggttatgtcaatccacaagaggcttccaccaggtggaatcctcgtatttgtcactggacaacgggaagtggagtacttgtgtaagaaactgcgaagagcatccaaggtgcaaactgctaagaatcctgggaaaactgatggtgaagacaatggtccatgcccaaaagtagatgaaaaggaaatttttgaagcatatgatattgacagagatgaacccgagcaccgatatgacatgttttcctcgtatgatgacgatggtatgtatgatgacgatggtatgaatgttgagacaaatattgattcttctgacaacgaaacggagagcgaaatggatactgaaaccgatgacgaagagtctgttactattgaaactacagaagaggatgttccagtattagcatttttgaaagatgctgagagctcatctgcgttgaaggcatcatttggagctttgtcgggaataccaaatgtgctggaaagtgtcgaggaattaagtgatgctaaatgtgaagaaaagaccagcacttcacttcgttgttttagtaaatgcacagaacataagcctgtttcacatggtagacttcgtgtcttgccactttatgcaaagttatcagcttcacaacagcttcaagtgtttgaagatgtcccagagggggaaagattagttgtggtggcaactaatgttgccgaaacctctctaacaattccaggcataaaatatgtagttgatactggaaaagaaaaggttaagaattatgatcatgctactgggatgtcaagttatgatgtccaatggataagcaaggcatcagcatcccagcgtgctggaagagcaggaagaacagggcctggccactgttaccgtctctactcagctgcagcatatggtaaagatgatttattccctgaattcgctgaacctcagattaagaaaattccagttgaaggtgttgtcctgatgctcaagttcatgtctattgataaggttgagaactttcctttcccaacaccaccaaacaaggaaagtttggttgaagctgagcgttgcttaaagacattggaagcacttcatagtgatggaaaacttacacctatgggcaaggcaatggcacagtaccccatgagcccaagacattctcgtcttcttcttacagtgattaagaatttgaagaataagcagcaaggctttgctagatctaacttcatattaggatatgctgctgctgctgcatcaggtttgaattttactaatccttttctcaagcaattggatgaatgtgacacttatggtgaatcagtagaaaacactaatctggaagctaatggtccatgggaaaggaagagacagaagaagctcaaggctgtggttagagaggcacgggaaaagttttctaaccctagcagtgatgctttaaccatcgctcgtgccctgcagttctttgagttgtcagaaaacccagtggaattctgcagagccaattcacttcatcttaaaaccatggaagagatgtcaaagttgagaaagcagcttctgcagttaatatttcgccatagcaaatggtgcgaggagtttgcttggaattcgggtgactctgctgaggttgaacgggcctggaggaacgagcccagtatattgcagttgaatgaagaggaacttcttgggcaaggaatttgcgctggatgggctgatagagttgcaaggaggattcacacctatttgaaaccatcagaagacgatcgaaaggttcgagccgttcgttatcagtcttgtgcacttgatgatacaatatatctgcaccgatcatcatctgtcgcccaagttgccccagagcttgtagtttactcggagctacttagtacaaagaggctatacatgcacggtgtaacgaccgtaaagccagggtggcttttgaagtatgctagttccctctgcaccttctctgcaccgttggaagatccgaagccgtactatgacccactgaacgaccaagtctactgctacgttagcccggtcttctctcgtcataactggcagcttccgttgcacagtttacctatcaaagacggtgcgagccggctgcaggtgtttgcatgcgcgttgcttaaaggggacgtcctgccatgtctacgggacgccaaggatttcctcgcgctgtcaccatccgctgtgttggggcctgccaggcaacggagagtgggagatcttcttagcaggatgaagatcggtccgaagttagtcgacagcagggcagcactgagaggcgtgtggaattttgatcctggttttctctatcctgagctcaagttgtggtaccaggatagattccatgaccagtttgacttggtgtgggagcagatgcaccaacaggttctccttgaggggcgcaagcttttcccaaagaggtccaagaaagttaaaggctaggccaaaatttttggtgcagttggttggctggcagaagcttttttgtgtgtgtggttttaaggaatagatacgagagatgcagtgagacatcatgcacaagcagttttgtctagacattttgccttgatctggatttgttccattgcatctccgtgttgaactgttgatgtacaccgttcctctgcaagcaaccttcaccctgccatctgtgtcagaaatgttttctgatccaaccatttgctcaaaaccttgaacctgaaaaatatcctgatatccaaccatcgccatggcccatggggattggagggaattggcttcgagtgagggccaggggtaggattcgccagaaacaaacaggggatggtcgtgcgcagattgattacatttctctcctttccgtctctcgctctatttgcttttagcatatgaagtgtccgattccaggggtaaaaacagcggtagagtcgatataaaaatgtagcactaaactatattaccctcagttcaagaaaacaaattacccctctggcatgcttgcatgaactttggtctgcatgtaaaattgaattccag

SEQ ID NO: 27868 - DNA, 2312 bp, Zea Mays
gtctggtaattcttttttggtaaactcacagtttacatgcgactaaccgtataaagtacagactgaccaagtctagcgatggtacaatgagaaattctcctacaggccttgctacaacaaagtatttcaggtgacacggagctcaagcaaaaccactgccactctcctatctcaaatctctggcagtggcaccctgttcaaccaaacgtctactgttttcctgctggccgttttcagcaaacacggaatcttcaagcaagacccatgcttcagccgccatgcagacagatggcggatgtttcctgaatccagcattgttggtggctgcaaattgttttttttttctaaaaaacgcaggagagttgtgtttcattccattaagaagaaaaaaacagagataatacaaaacagccacctcacagggggccaaatacagacatactgatactcatccatgaataaagcacccaaaactacaaattcctacagacccgggatgtgactagtcagcaaggatagttttcttgccccagtcagctcccgcttctctcgctcttgatcgccattctgacagcaagagccacattaggtctgtttctgtcgaagacacagctattccgacgtttccatattgtccaagctcctgaaattaccagggagtttactgcttcccctgccactgactccatgtatctgattgcccagccatctccaccagcccataaaagatgcatcaacaagctgagaggccatgttttggagattaacttgagatagtagtttaaaccagaaatctcgggcgaacacacacccaatcagcaaatggcctgctcctgacaaagggcagctcgtagggtgatccatgcctctcttttccaacctgttagctgtccaaagccgtcgcgaccagccacatgaagaacttggcctttggaggagcccgggttttccaaattatgtggtacggttcaaaaatcgtcgacccaaggaaaaaaaccctcatagactgcctttgttgaatacttcccattggcggcgagacgaaagaagtgagtgtcattcacttcgcgtctaagctgaaccgaggtgacaatatcccatagagcaaggtattcagaaataaccccaacagcaagagctccttgtatgtctgaaatccaagtctgattagtgagagcatccaaaacagtcctcttattaaccctccttttaggaacattctggagtaatcttggggcaatgtccatgaccctgtgtcccatcaaccaacggtcagaccaaaaaagagtagaggctccattaccaatttcagtttgcatagccaccgagaagaaaactttagccttgctgggaacttgtatagcaagggaggcccatggccgtcccggatcagtttttgctaaccaaaaccaacgcatacgaagtgcccaagcaagatcaatgagattggaaatccctagcccaccaagctcaagcggccgacaaacttttccccaagcaacaagacagtgtccccccctcgcttctttgcgccatcgccaaagaaagcctcggcggatcttgtcaatagctttgagagcccaaggaggtaaatccacagccattgcgagatatatgaccatccctgtgaggacaaactgcacatggaccttccatccagccttagtcatcaaatcagatttccaccccgatagttggttggcaattttatcaataatcgtttgtacttggtccttggtaagtttcttgatggcaagaagtagacccaagtatttgcagggaaattgtgagatctcacaaggcagcaagctttgcagtaaggtcaagtcttgttccccgcatctaattgggcatacattgcttttctggatattagttcgcaacctggaagcctccccaaagatatgaagaatgtccagtacagtcctgatatccccgactgttggttggataaatataaccacatcatcaacataaatagagaatctgtgatggagagttcttgtagcaaggggccgaagcaacccttcattctcagccttggtaataagaaagcccagaacgtccatcaccaaaatgaataacattggggaaagtgggtcatcttgtctgagcccacgccgatgagatatatgctgccctggagatccattaagcaacacctgtgtggaggaagtccatagcaggccactagctaggttcaaaagccataaacgaggcacaacacgaacaatcagttccgtctcaagttccggcaccaagatgaacagcatattgcgcggctggttcattgaagaagaattctcaccgac

SEQ ID NO: 27869 - DNA, 3777 bp, Zea Mays
aaaaaatcctctagcgacagttcattggttgcccagttcaccgactgcctttataaacagggagctcgagctcgagtggtagcagcacaggcacaagtgcggtgccataagtgacagccacctcagtctctgtctgtggagctctctctcgcgcgcgttgccatctcgcaggcggcgacaggagatggacggggagcaggcggcgcggtgggcggcggcgcaggagggggttcccgtcggggcggaccttgtcgcggcggcgctgcggcagctgcgcttcctcgcggcggtggaccgccgccggtggctctacgacgagggcccgctgctcgaccgggccatacgcaggtacaaagcatgctggcttccgcttcttgacaagcacactaagggtgtggttgtagatggtccattggttgttcctcttgattgtgagtggatatggcactgccatcgccttaacccggttcagtacataagggactgcaagaaagtgtatggcagaatactgaacaataacaacgttgagtcgtccactcaaacaaagtcgacacttgagtcagaaaaagtttggaaagagctgtatcctgaggagcccttcgaattgttgttcacaagaacctttgacactgccgtggatgtcaaccctgcaggtgcagaggaggacattacctatgatctggtctcggctgttaagagacaatcctctttctattatcaggttggaacaccaacaatgcatgatccacggtttctccaagaagctctagctcgatacaaggcgtttctttacctgatcaagatgaatcaagaaaaaggattgcagcgcttccgtgtaccaacctatgatgtggatctgttgtggcacactcaccagctgcatcctattacctaccgcaacgacatggtgaagcttcttggaaaagttctggagcatgatgacaccgatgctgatcgatctgaagggaagaaactcgatgttggatttaccgagactactgaacagttcgagagtacctttggtgtaagatactggaaggctggatgtatgtaccgtggcaacgtgccatctcctgtgacatccactcctcagacattcagtgctgaggttggtactgggtcttacatctgcaaagcccagaaagatcttaatgcccttgatgtaacagttgtagagttatatttacaaattgtagacatcaagaatttaccatctgctgttcaaaaagaaaatgtgtatgtacggttcgccaagaatcaatcagatatgttcatcagtgacggcggcaggttggatatctcaacagttacagggaagaacaccggagtttgtttacagtgtgaacctaccggagaactcattcttgcagtaatggttgatcaattatcaaagaaaccagaaccgatagggaaggtttctttcccactgcacgatttgacagggcctgattctaagctctccttcgagaagtggtttgaactgaaagctcatggtgggcatgccgcttcacctcctgttagtcttcgtgttgcagcttctgctactgtcccaagcagcgctcagaaggtgttcaccatggtcaggatggagccattctctctcaagtcatgtcttttgccacattccatcaaggatcagaacacgggcagctggactcgtttcgtaaatgattgtggtaccgagcttatccgtctccagataagagagcacaaggcgaagaatagcatggccgtcgttcgagaattggttggagtattgaagtcaacaaaaaagcaaattcaacttgcagaattcaaggaaaacaagtggaccctaaaagactccaacttgccaataagtcatggcactgatggcagtctactcgatctcaaagatcaagctttatcggggaaggaaactggaatacgagcgcaaatgttgcagcgctcactctgaggacgtatcagctgttactgctgtaaagttctgtgctgaacatccatatggcaaagccgttgccttgctagacactgaagctcagcttatcatggtgaacgaggattggctcctacttccatggatctccatatcagtcctgtttatggacggcgatggcggtacgaaacttggcggcggtgccatggttcagaaaggtacagtgtttggatccgacactagcatggtgctagagacacagaccgtcggagcagggagcgtggcatccaatctagcacaatgtggcacttgcagcgccgtgttcggtggtgatgataaagaaatggcgaactgcaaggttgagcatgcgagctctggcgcttctcgcacggttgttgcaagtggtgagaatgggcacactgagactgctggctgtggaggcggctgtggtagcaattgtggacccatgatggctgaagaccccaaggccggcaatgccaagtccggaggctgtggttcggggtgtggtggtggctgcggtggcgcgggaggttgtgggaccatggccaacgaaggccaatccaggtccggaggtgttggcaccttgttgagctccaacgccatgggtggtgagggccagcaggcccattcagctggctgtggctccggctgtggtggtggctgcggcagcggcatggtcatcgaaggctccaaggttaacaacgttaacgccatgtccggcggctgtggctctggttgtggtggtggttgcggcagtggcatggtcatcgaaggctccaaggccaacaacgccatgtccggtggctgtggctctggttgcggtggtggatgcggcagcggcatgctcatcgaaggctccaaggccaacaaagccatgtccggcggctgtggctctggttgtggtggtggttgcggcagcggcatggtcatcgaatgctccaaggccaacaacaccatgtccggcggctgtggctctggttgcggtggtggttgcggcagtggcatggtcatcgaaggctccaaggccaacaacgccatgtccggcggctgtggctctggttgtggtggtggttgcggcagtggcatggtcaacgaaggctccaaggccgccaacaccatgtccggcggctgtggctccggttgcggtggtggttgcggtgccctgttcaacgctagcactgctgccggagagggcctgcacaataagtcggctgggtgcggcggcggcgggtgcggctccgggtgcggcggtggcggcggctgtggtagcggcatggctatcgaaggcttcaaggccaaccacgccaagtctggtggctgcggctctggctgcggtggtggtggctgcggcaccctgttcagctccagcgctgcggccagccaaggccagtccagatccggcggctgcggctctggctgcggtggtggaggctgtggcactggcagcatggtcgctgaaggctccaacggcgggaacgccaagtccggcggctgtggcggcggttgcggtggcggaggtggctgcggcggcggaggctgtggcgggggttgcggcgccgtgttcaacgcatgatctcggtggagtggaggcatttgtgcagacatgcagtcgtcgtcgtctactgctagataccacatgctacagcatactgtgtattgctgtgcataatctactaaataaaaggaatgaataaacaatggatggatcggctgcctccgtggcgtttctgcaaacgaaaaatctcggtgttgttgggtgcagggatgaggatgaaaacgatttcaaacggtccgaaacgatatcgtctatttaacggttggttaagaaattacctgattta

SEQ ID NO: 27870 - DNA, 3189 bp, Zea Mays
cttcgtccagtcacgctcccccaacccctctccgcggtccgcccccctctcaccccacccatcgtccctcgcctcctcccgtcccgcacctcgccggagcaccgcccccctcgccggagcaccgcccccgcctccctcgcgcatccccctttttaccatctcctccgcctatctctgctccccttatccatcctcgagctcgcccgccgcgtggatcgcctcgacccattttactttttttttgtacctccccgcccgagcgttagctggtgggcggatgtacgtgtcttggctggagatggagatgccactggcttgacggattgatctcggggagctgcctttagtgaccggccgccctcggcctcgccgcggcggccatggacacggagaggggggcgggcagcgagcaggggtcgcccgacagcgaaatgggagacggcgacaacgacagcgtcggttacggcgcagagatggaggtggacgccgggagcggctcggccggggcctcggctccggcgagctcggcgtccgcatcggcctcggtctccgcgtcagcgtacgccgcgcgcgccggcgcctacgacggggtcgaccctttcgagggcatggagttcgacgacgaggaggaggcctggacgttctacaacgtctacgcccaccgcgtgggcttcagcacccggattagcgtcatgcacaggtcgcgacggaacggctccgtcatgtcccgccagttcgtctgcgccaaggagggattccgcacctaccgcgggaagaatgaggtttcacgtggtgatgccgtagacgctggcgacgacgatagtgggaggggtcggcggacgcgggctgtcaccagggttggctgcaaggccatgatccgggtgaagaagcaggacaatggccgctggagtgtgaccaagctggagactgcacataaccaccccctggtccctgcgaaccaggcacactgtctgcgcccgcacaagccactgtcagagtgtggaaagcagcggccttttgggggccatcgaaatggcagtttgcctctggcaattgagccaccgccacctcctcttacaccgcctgttcctcatacaagcatagctcaagtggttcctgagtatgtttcggatggtatcgggcatgacactagagtaattttggattatgtcaagcgcatgcaagctgaagatccagcgttcttttatgccatgcaatttgttgaggggcgtccagtggggaatgtgttttgggccgattcgagggctaggacggcatacaaagattttggagatgccatcatcttggatgactactgcaaaaggagcaagcatgaacttctactttcagctgctttgaaagtatttcctctaactaggctccagttctgtaagtggcacatcatgaacgaagcacaagataagctgtcatatctcctagatgtgtttccatccttccatgaggactttatcaattgcatcaacatgtctgaaacaatcaatgagtttgaagcaagttggaaggcattaatttctaaggtcagctctcaaaaaagtgaatggattgacttgatgtacagctgccgccatcagtgggtccccgtatatctgagagatacattctttggggatgtgtcattaaagctgcaatgttcaagcaggagttcgttgtttgaaggttatatcagtgccaaaactgattcacagtcattcattcagcagtacgaaaaagctttagactgttgttacgagaaagaggtgaaggaagaatttgaaacaaaatattcacttcctgatatgaagacatcatctcctatagaaaagcaaggagcggagttatatacaaggtcaatgtttttgaaattccaacaggaattggttggtgcctctgtttacactgctgacatggtgaaagaggagggcgatgcttcaatttatacagtgaccagatctgaaggaagtgagaagtctgtaacagttcagttcagttcttctggaagttcggcgacatgtagctgtcatatgtttgaatattttggtattgtctgcaggcacatacttaccgtgtttggcataagaggtgtctctgcactcccttctcattactttgtaaaaagatggacaaagaatgcactggatagaagctcaggcaagaatgttgacgaagttagcagagttgcggagcccaaggaggagcaaagaagtagcgctgaagatgatgagcagtccccgacatggcgttacaacagtttgtgtcgtgaagcactaaggtatgctgaggagggggcatcatcattagaggtttatattgtggcaatgcaagctcttcaagaggctgctaacagggttaatatggccaagagaggtattggacaggtagcaccattagcggtgatgccaattgcagcacaaccaccagaaagttttgcaagaaatcaggagattagttctaataagcaaaagaagagaaaaaggaattcaaatagctcaagggagaatgtcacaccaaatcaacttatttgataagttttctgggttacctgtccgaaatgcatcagctccttcaattggaaatctgcaaggtggagaaacaaaatccatagggactgattcacaaataaaagagagccatgaattatcccaagctaatggtagcaggggatgcagtgtaaatacattaaactccagtgtcgcgccacagctcgtgactgttcctattggactgtgccttccatccactgatggctccaagatatctgcggctggtatgaactctgtaaattctggagatatcagtagcaatggcaagttgtcatttggtcttcatcaatctcagtcatctgcacaacagccagctacaccatcacagacaacaacgcttgaccatattgactcccgtgctaatcctgagggttcatctataagggctgcagccattgcagccggcgcacgcattgggtccccatctgatgcagcaacaatcataaaagcggctcagtcaaaaggcgccatccacatcatgcctggggaaaacctcccaaattacctgaaaccactagcaccaaaaccactttctgcactaccaccggcgaacccactcaacccggcacatgcacccccaggacagctcagctttggtgattctgcagccgccaaggacgcaatcttcggtcaacttttgcctgattaa

SEQ ID NO: 27871 - DNA, 1796 bp, Zea Mays
ggctctctctctccggcgtgccaaccttatcaccacccattcgagcttgctgcggctgcccgctgcccccacgatcccgatagttttccgaaaaaagacacttccccaatccgtagtggttcacgtcctggttcctcgccggcggcaaccgcgctggacgaggtttcatctgcgcttcgccggcggcaaccgcgctggacgaggtagcgctgctatcaaacaccttgtgctgtcaacatttatgagtgcaaggcagtattgctaagagtatcttgccatggcatctcctgcttccgtcaccaacctcggaagcaatgggaggtctggcccgctcccggctgcagctgcaaggagggcgcagttggtcacaaggatcagattcacggggttcgatggcataaggcgatggcagtatgagcctgggaggctttgcaggtgtatggtcgtcactaatctgattgaggagaaggttgttcagttctcgtcaagagggagtgtcagtgtgaaagctgatgatgacaatgatctgcttctgaagccgccacagaagccagtccggtcaaatggacccccggagagcatgaaaacagcatcactgccggatcagaagccagcaggggcaactttagacgacagagagaaggtcagagagtcactggacgctgtattggagaaagcagagaagcttgaggcctccagctttggtaatgcagatggtggcaaccttggttcaaggcagagtaatgtttccatgagtaatggtccaggaccgacagcagtggaggaaggtggtaattcaaggaagacaaaaacactaaagagtgtatggcggaaggggaaccctgtgccaactgtacgtaaggtcattagagagcaaccaagaactgaaacaaggagtcagtctatacctgtggctaaaccttcagtgtcatctgcatctaagccttcccctctgctactatctaaaccttctgtagcacagcctcctcgtcggcctatcaagtctgatacatcaaatgagaaaaaaggacccatccttattgataaatttgcttccaagagggcagcagttgatccgattgtacctgaggaattgttagaccctctaaaaccagtacgaggcccaccagcaaaagtcagagttgatcgtcgtaaaaaaccagacacacaagctggttccagacgacgtatgtccaatgatgatggattagttgatgaggatactactgacgtgccaatttctggtgttccagtgcgcaagggtaggaggtggagcaaggcaaaacgccgcgctgcaaggctagaggctatgcaagctgaagagccagtcagagttgagatccttgaagttggtgaagaaggtatgctgattgaggacttggcatatgagttggcaattggtgaatcagaaattttacgattcttatcggtgagaggagttatgcttgacaatgttcagactctagataaagatttggttaagatggtttgcatggaatatgatgttgaagtactagaaagtggtcctgtgaaagtggaggaaatggctaagaagaaggagttccttgatgatgaagatttggataaattggaagtgaggcctcccattgtgactatcatgggccatgttgatcatgggaagacaactctgttggattatatacgcaagagcaagttggtggcatctgaagctggtggtataacacaagggattggagcatatcaggttcttttaccagtagatggaaaccatcaagcctgtgtttttctggatactccaggacatgagatctcag

SEQ ID NO: 27872 - DNA, 3545 bp, Zea Mays
ccttccttccgtcgcggcccgcctccttcactacaaccaggacaggccaacgcggaagcccgtcctccccacccccttccagatttgcagctcgcacctcgcgaatccccgaattccccactgcctcgccacgccgcgcgctgaccgcggcacccggagccccacctgctattcccgaggcggaggacccatcctgccttggcgctcgttcctccctcgtgatcggcgccgcgggcgaatcgcgctgcccggtgggggggaatctagggttccggccatgccggcctagtcgtagggcgggggtaccggcctgcgtcgccggcgcgcgtggagatctcggtgcctccgaaccctggcgggggccggggaggccgcagctgctgaggcatggacgtggactcgcgcatgacgacggagtccgactccgactccgacgcggcggccgcggccgcccgcgggggcaacgccggaggttccgggtccgggagcgagacctcctcgtcgtccgcgccctcgacgcctgggacacccgggacgcccgcggcggccccgaatccggcgccggtcggcgctgtgggtccgaggccagcacctgggtacacggccgtgaacgcggtgatcgagaagaaggaggacgggccagggtgccggtgcgggcacactcttaccgcggtgccggctgtcggggaggagggcgcgcccgggtacatcggaccgcggctgatcctgtttggtggggccacggcgctcgaaggaaactctgccacgccgccctcttcggccgggagcgcggggatccgtcttgctggtgccacagcagatgtccattgctacgatgtgtcattgaacaagtggagcaggcttaccccacttggcgagcctccttcaccaagagctgcacatgtggcaactgcggttggaaccatggtggttattcagggtggaattggtcctgctggtttatctgcagaggatcttcatgttctagaccttacacagcaacgaccacgatggcacagagtggtggttcaaggacctggtccaggtccacgatacggtcatgtgatggccttggttgggcagagatttttgttgactattggtggaaatgacgggaagcggcctctggcggatgtatgggcccttgatactgcagctaagccatatgaatggaggaaacttgaaccagaaggtgaaggaccacccccatgcatgtatgccactgcaagtgcacgctcggatggacttctcttactttgtggtgggagggatgcgaatagcgtgcccttatcaagtgcatatggtcttgcgaaacatagagatgggcgctgggagtgggcaattgcccccggtgtctctccatcacccagataccaacatgcagctgtttttgtgaatgcacgtcttcatgtgtccggaggtgctcttggaggtgggcggatggtggaagactcctcaagtgttgcagtactggacactgctgctggagtctggtgtgacacaaaatctgttgttacaactcctaggacaggaagatttagtgcagatgcagcagggggtgatgctgctgttgagcttacacgacggtgcaggcatgcagcagctgctgttaatgatctcatattcatttatggaggtttacggggcggggtacttctggatgatcttcttgtggccgaggatcttgctgctgctgaaacaacaaatgctgctaatcatgcagcagcaaatgcagctgccacaaatttgcaagcaggacgaacacctgggaagtatgcgtataatgaacaaacaagacaaacaattacagaatcaggtcctgatggggctgtagttcttgggactccagttgcacctcctgtaaatggggacatgtatactgatatcagtcctgagaatgcggtgctgcaaggacagaggagattaagcaaaggcgtggattacttggttgaagcatcagcagcagaggcggaggcaatcagtgctacattagctgctgtgaaggccaggcaggttaatggtgagatggagcagttgccagacaaggagcagtctccagactccacatcaactagcaaacattcaagcctcatcaaactggacagtgctctttctaacaacttggcagctccacctggggttcggttgcaccatagagccgtcgtggtcgctgcggaaactggaggtgctctaggtggcatggtcaggcagctttcaattgaccagtttgaaaatgaagggagaagagtcagctatggcaccccagagaacgcaactgcagcaaggaagttgctagatagacaaatgtctattaatagtgttcctaaaaagatctttgtgacagtgccgagagaatattttcaagcgaaccaagtgttttgcagcttaaagcacctgttaaaatatttggagatttacacggacaatttggagatctgatgaggttattcgatgaatatggtgctccttcgactgctggtgacattgcttacattgattatctattcttgggggattatgtagatcgtggccagcatagtttagaaactatcactcttcttctcgcattgaaggttgaatatcctcaaaatgtacacttgattcgaggaaatcatgaagctgcagatatcaatgctttgtttggtttccgaatagagtgcatagaacgaatgggtgagagagatggtatctggacatggcatcggatgaataggctatttaattggcttcctttggctgcgcttatagaaaagaaaatcgtttgtatgcatggtggcatcggtcggtcaatcaaccatgttgagcaaattgagaatcttcaaaggccaattacaatggaagctggctcggttgtcctcatggatcttctgtggtctgatccaacagagaacgacagtgttgaaggactgaggcccaatgcccggggtcctggtcttgttacatttgggcctgatcgggttatggagttctgcaacaacaatgatcttcagttaattgtacgagcacatgagtgtgtgatggatggatttgagcgctttgctcaaggtcacttgatcactccttcattaacaacaaaataaggaggtactgcaaataatgccggagcgatcttggttttgggtagagatcttgtggttgtgccaaaactaatccatcctttgccccctgcaattacgtcacgtgaggcgtcgccggatcatattgaggacacatggatgcaggagctaaatgctaacagaccaccaactccgaccagggggcgtccccaagcagtagctaatgacaagggttctcttgcctggatatagtagattgaccacacattggttggtatgattcatatgaagcctgagtggtctggatcttgttattttcatttgtgttcgggagaggggctggtcgacagccgtaccgaaacgaaagattgatgtacaggggagcataaagactataaagttggtagaagggagcttaatctattttcttctctctccaattcgtttcattgaacacgagtagcaaacgaatcaagctgattcatcaga

SEQ ID NO: 27873 - DNA, 1473 bp, Zea Mays
cgccgttgcagctgatctccttcctaccatcgtcgctgtcgacgaggtgcactctttgttgtcgctcacgcggatggtgatctcactatcgatgacatcaagaaattgaagccatcgccagagttgaggaggctgtttattccactcatcgagccatcgtctatcataatggccatacaggtgacttccttgaagtgtggaggggtggtgttaggaacagctatccaccacgccgccgcagacgcttcaagtgcgttccacttttttcagacatggtcggcattctgcaagcatggtgaccgtgctgccgtggcggtggagctcccgtgccacgaccgcaccctactccgcgcacggtccccacccacagtccaccccgacgcgctcttgacattgctgcctcggctcaccctctctgaccccgagggatcccttgccaccgaagtcttcaccatttccagcgatcagctcgcctccctgaagcacctctgcggtggcgcgagcaccttttgcgcggtgagcgctctcctctggcagtgcgcgtgcgttgcgcgccgccttccaccggattctcaagtgcgcatgctgttccctgccgacctccggcgccggatgaggccgcccctcccgagccactacttcggcaacgcagtgttcaggctatgcgcaactggccgggcgggggatattggcacggtggcgttgggatccgtcgctgcccggatcaagggcgccatcgaccggatggatgacgagctggtgcgttccgccattgactactacgagtacgagacggccgaggtgaacaagagacggactccgacaggcaccctgccacagacggacctcaatattaccagctggttgggtaggtcacagtacgacgcggattttgggtggggaacgccgcaattcatgtcccgggcggactccgaccgcggcggattcgtgcacttgatcaacgatgagggtggtggcaccgccaccggcgacgtccgcgtgctcgtgaccgtgggggctgaaaatataaaggagctagggcggcttctttatgcgaaactctagctaggtgctgctagtggcattatccaaacttgaaatatcccaactcgtaactgatgtaccgaaacctgaattctcaaacactatttcagatcctaggtttgaaaaccaaaatttatacacaaattaactgaaattatatgttatttgtaatgtataatatatgctcttggggactggtgactttatgttaactcttcaacgccctaagttgtgatatctaatatattatgtttgcttgtgtggacttctattaggtctacttctagttcaataatttctgtttctactgtactagactgctagttttgttatatagctatgtaccatgcgatgtggcactgctagctagcagtatgaacttaatttgtaatgtgtgaaatgcatgtgaaatgaggtatttgttcaatt

SEQ ID NO: 27874 - DNA, 1277 bp, Zea Mays
cggcagcgcggggccccacttgcagcgagacggccgtttcctagcccctccgagccaccaccgttggcgttgatacagcccccccacctggcctcatcgccccgaagagttgtggtacagttgtactgagctgagctgccggaggcagaataggagaggcaggcgatgacgatggcgacgaaggcggcgtgcgtgctggcggtgtgggtgctcgtcgcatcgggcctgtccgacctgggctcagcgcgcgcgcccctgggcagcaagccgcagcgggagttcgactacttcgcgctctccctccagtggcccggcaccatctgcgcctccacccgccactgctgcgccaccaacggctgctgccgctcggagcctctccagacgttcacgatccacgggctatggccggactacgacgacgggacctggccgtcgtgctgccgccgcacccaattcgagatggacaagatattgccactgaaggaggtgcttgacaagtactggccgtccctctactgctccaaatctggaacatgcttcagcggcaagggactcttctgggctcacgaggtgcaagaaacatggaacctgctctgcccctgtggttcaggatgaattacagtatttcacccttgcccttgacctctacttcaagtataacgttacggaaatgctgtcaagtggatggatacaggtttcaaatggtaaggaatatgcactgagcgatgtcatcgataccatcaaacatgcttttgggggatcaccacaaattgtttgcaagaggggttcaatcgaagaacttaggttatgcttcgacaaagaattgaagcctcgtgattgccttaccacttctttggcgaatggaagtgtatcaaaaagcaagcactgcccgcggtacatcaccttgccaacgtatgatccccttgagatcatgacacagttcgatgaatttgaggtgcctgcagctctttatacagcctaaaatgcaattgttgcaatagcagaaggtgctcgcgtgagcacctagaaccaggcacatttatcctgggatattcaatcatttgtacatgtacacttgaaagagaactgacatcttttcaacctgaaaatttataagctttatgtaaccgtgaaggtcggatattgcacatgtaattcgctaaatcaaaactgtatcttgaggtagaattttcaagtagtaataatagagatataagaaacttatcgcccatcatgtctgtcattaatcatgattcatggattagccgattaggaag

SEQ ID NO: 27875 - DNA, 3885 bp, Zea Mays
gcgcgcgcgacgcgagccgcgcgaggaagcactcgcaggcaacgcacccgcgcgcaccggtttgccgatcggcggggcgccaccgattgccatggatccggacgacgaggcactgaaggtggcgcgcgccccgccgcagcagcgccgcgggatctcctacagccagccgctgtcgcgggacgccgcgtccgcgcgccgcgccgcgccgcgcaatcacagcctcgacgacgagcacattctgccgacctcccactccatcaactacccgctgcaccacgatccctcgggcatggtgcccatgggctaccaccccccgctcccgccccaccagcgccaccccagcgcgtcctattcatccaacacccgacgctccgctggcggcgtcagcgaggactccatgacgctcgagcgctccatgtcagagtacggaggcggcaacggcagcctcccggagttcgtcggcgcggggggcggcaagggcatcttccgtgtgccgctccgcgccgccatgcacccgggccgtccgcccccgctcgaggtgcggccccacccgctccgcgagacgcaggcgggctccttcctccgctcgctcgctgccgagccgcatcgccgccagctctgggccgggaccgagtccgggatcagggtgtggtcgctcgacgaggtgttcgcggagtggggcgcgggcgcgcgccgcggcgacgaggagagcgcgcccttccgagaaggcatgcccgcgccgcccgcgctctgtgtcgtcgtagacagggccaaccgcctgctgtggacggggcataaggacgggaggatccgctcgtggcgcatggacctcgacgcggccgctactgcgcctgcgcccccggctgctggtgcaggcgacggcggggggagtagtcacggcgggggaagcaataatgcgccagtgttcagggaagccctgacgtggcaggcctatggcaggacgcccgtgctctccatggtcatcacttcgtatggtgagatatggtcgggttccgagtgtggaaccataaaggcatggccttacgatgccattgccaagtcgctgtcattgtcaccagaagagagacatatggctgctttgttggttgaaagagcgtacatcgacctgaggaaccattgcacagttggtaacgtttgctcgttgcccgcttctgatgttaagtacatgctagcggaccattcacgggcgaaagtttggactgtgactagcatgacatttgctctctgggatgctcgtacaagggagttgctgaaagtatttgggatggatggccagtttgagtcagcaaagctagagacacctgtcatgccagagcaacctatggaggaagaggtcaaccctaatcctaaagcaaaaccttcgaagaaggacaagtcacaaggttctttgaacttcttccaaaaatctaggaatgctttaataggagcagccgatgcggtgcgcagggtggcaacaaaggggacatttgtcgaagataaccgcagaacaggagcggtggctcaagtaacggatggaacaatctggtcaggatgcacgaatggcgccattattcagtgggatggaaatgggaatagagtgcaagaattccagcatcatacttcttctgtgcagtgcataaaggcactcggagaaagggtgtgggtgggatatgccagtggcatgattcaagtcatggatgctgaaggtaacattattgcaggatggactggacatagctgtccagttataaggatggcaattggttgttcttacatttacacactagcacatcatggtggtattcgggggtggccactaacttctcctggaccccttgacgatattatacgaactgaattgtctaacaaagagctgtcatacactagaatggagaagataaacataatggtagggagttggaatgtagcacaagggaaagcatctgctgagtcattaagatcatggttgggtagtgtagcatctgatgttgggttggttgttgttggattacaagaggttgagatgggcgcagggtttcttgccatttctgctgcaaaagaaacagtagggcttgagggcagtgcgaatgggcaatggtggatagacaatattggcaaagcgcttgacgagggaacatcattccaccgagttggttctaggcagttggctgccctgcttattgctgcatgggcaagaaagagccttaaaccatatgttggagatgttgaagctgctgcagtgccgtgtggtcttggacgtgctattggcaataagggtggtgtaggattgagaataagggtatatgatcgtaaaatgtgttttgtgagtaatcactttgctgcacatctagaagctgtgagcagacgcaatgctgattttgaccacatttatcggacaatggctttcaacaaacctcatggatctacagcttctgctacatctgtccaattgcacagaacagtaaatgtcaatggaaatcaggttgaagaagtaagacctgacctagcagaagctgatatgattgtatttcttggtgatttcaactaccgcctctatggtatcacatatgatgaagcgagggacatggtttcacaaagaagctttgattggctaagagagaaggatcagcttcgagcagaaatgaaagctggaaaggtattccaaggaatgcgtgaagctgtaatcaattttcctccaacatacaaatttcaaaagcaccaaccaggtctcggagtgctgaaaactgtttgtcaactgccatgtaggttatgattcgggtgagaagaaacggatacctgcttggtgcgatagggtactatatcgtgatagccgttctgtatcagtagctgaatgctcattagagtgccctgtagttgcttcaatcacatcgtacgtggcatgcatggatgtcacagagagcgatcataaacctgtgaggtgtacattcagcgttgatattgcaagagttgatgaattaataagaaggcaagagtatggagaaataattgagtcgaatgagaaagtacggtctttgttacaagatggttgttttgttccggacactacagttagcataagcgagatcacactggagaagcaagaggatattgtattccaaattgcgaataaatgtgaaacaagcagagcagctttcgaaatcctgtgtgacgggcagtcaaccaaggaagacggtactaaatcagagcttcttccaagggcatcgtttggcttcccactttggctcgaggtccaaccagccgtcggtctgataaaaccaggtgaaacggtagaaattactctgcatcatgaagatttttacacacaggaggaatttgtcgacggaataccacagaactggtggtgcgaagacaccagggacaaggaagccgttctcagaataaacataacgggcaacagctcaaccaaaaccaagacgcacaccatcaacgtccaacatcgctgcccaccaccatcggcgccaccgccggcgatgaaccaacaaccggtggctgccgcgccaccaagcaatgtccttgccagcgagggacactcatcaaagcgttcctcgaagaagagccagtccaagcaccgggaacagcagcaggattacccgcagtttgggacctcagaggtacacgacctgtgccgcatgcggtgcccttgagacctgtacagactactcttacattactacaaagaagtatggatactgaagttctgtctaggttctgtacatatgcttcactcgatcagctgccactctaacgtagcccaagcaaagagtctagagtcctgggataacagtgttaacaacttgttgttttatttttgttccttattaaggagtgttcgctagatagttgaagccagggatatttgaacaa

SEQ ID NO: 27876 - DNA, 1821 bp, Zea Mays
agagcgcacggcccagttgggcccaatactcgacacgactcattgaccggcccattacggctgaagggagtcgctcgccgccgcgttcgaggcgttccctcgtcgcgctcgcgccgtcgaccttcaccgctcgctgtcaggtctgacaatgatccagcgagatactacgatggatatagcagattaagaacatgggcatacagttctcttgatcaatataagcacgaattacttcgcgtcctttatccagttttcatccatagcttcatggatctagtggcagaaggacatatgcaggaagctcggtcatttttccatacatttcgggaagatcatgaggtgatgcattcaagggatcttcagaagctggaaggcgtcctgtctccttcacacttggaggaaatggaattggcccggtcttttaggaaaaataaatttaaaattaaattatgtgagtattcgtatgaattgcttctccagtatctccagaaaacacaagcccttgtggtgcttggagtaatcaatgagcacataacttttgaagtatctcctggtcagccctcattaatctctgatgacgctgatgttgttgctctgattgggacaagtaaggacttggcaaaacagataaatcagaaggaagtacattgggggttgcttgaagattctgttgaagagcgaatggagaaggcactagcagaatctgataaaatagaagctgaaagcaaggatgctgatgcagaagataacaagaaaagaaatgcagaaggtggaaagcaaggtgcttctcttaagaaagccaaaaaggacaagcttgttggtgcgactggaaaaagcgtcagaactgaaacaagcatggtttctgtggcacctcgagtgaaaccggagctaactcttccagcaacgcctgttgaagttgaacaatcaattcttgaggacctacgaaaccgtgcacaactgaatagtgtggcattgccatctgttagcttctacacattccttaatacacataatggattaaactgttcctcaatatcacatgatggatcactggttgttggtgggttttctgattcgtcagtgaaggtctgggatatgtcaaagatgggccagccagcaaaaatatcaagatcacagggtgagaatgggccttcccagggtgagcgcatatcaacattagatgaggggaaacgaacctatacactatttcaaggccattctggaccagtttattctgcggcctttagcccgtttggggatttcctcttgtcatcatcttcagactcgacaattagactatggagcaccaagctgaatgctaatcttgtctgttacaaaggacacaactacccggtttgggatgtccaattcagtccagttggccattactttgctagtgcttcgcacgacaggactgctagaatttggtcaatggataaaatccagcctttgcgaataatggctgggcatctttctgatgttgattgtgtccagtggcatgtaaactgtaactacattgccactggctctagcgacaaaactgtaaggctatgggatgttcagacgggtgaatgcatacggatgtttattggtcataggagtatggttttatcactggcaatgtcacctgatggacgatacatggcctccggagatgaagatggaacaatcatgatatgggatctctcgactggccgttgtgtttcaccactactaggacacagctcttgtgtgtggacacttgctttcagggtcgcaatctgattcgattatctgtagccaaacttagcgtctaggcttcaaagcatagcacaattttgg

SEQ ID NO: 27877 - DNA, 1119 bp, Zea Mays
atttcccgtctgggagctccaagcacaaggccaacgagacacaacacggtcacgagcacagcgcgaagaggaggcaaccaacccctaccggacggtgcccgcacaccccccacgaacccacttcctcctccagttctcccggtcccgccgatatccagagagacggagcagagcaggcgaagcaagcgaaagccacaaccaccgcaaaagcgaaaggcggaggagcacaaggagatgagacgataccactagactaaagcaaagccgtgggcattagagagagacacagagagaaggcgcgtggggcggccggatggcgatgcacttcggcgagatcacgacggccttcccaggcggcggcggcattgccggggcgtccacggccaggacaacgccggcggcgagcccgtaccagtgccggatgatgatcgcatggccgcaagcatgtgtggctgcgtaccatgtcgcatatgcagagaacccgcagaaccctcagctgggcacgctgataccagaacatctgcgcgagctccaagcaatggctgcagatcaagatcgtcccagagttatccatttttctgatgacattgacaattcatagatccttccattctttcagtctttttcccccctgacccaagggggtagacacctcggcagcagacgtagacacgtcgttgcagtcttccagatgcatgatgatgggtgttgactgctcctgggctgcttgctggtgcagatgatagggtgtgctcagttctgtagatattgggcaagtggataactgagcaaaagaagtggttagatgtcgtataggtacagagtttagcaaagtaaacaaaaatgtagaattaaatacattgttttcagaatttcccggaggcgtgttcttgccctcgcactgacactgaacgctgttgcgattcctgtgccttttcatctgcttacgaggtggctctacgtggcaattgacatgcatcaggttcgaggatttttttttgccagtagaaatgtggaatgctcgtggctttgcttgcactaccaatttatcttttcctattcctaatcatgttggagttttttttggcagtaggatgctcgtgcccaattcattttccc

SEQ ID NO: 27878 - DNA, 1025 bp, Zea Mays
cgccttctggctcagatacttcgaatccaagagtcggatgattgccgatcaaataaatcatgctcgcgaagtaaatccaaaggtgagacgcttccccttctcctcgccgatggagtcgcttgcctcgcaagcgaggccggcggcggtgctctggctcgccggcttcttccaggccgcgcgcctccaccgcgttgtctccttctgcgccagctcgagggcactatccatcaggattgcacagtgcttcctgctgaacgggcttatcttccttgggagcttgcttacacttacatcggtggtcattccaactctactgtggatactacctgagcgatgcaatcaaacagcaggacatctttgtgaacacagggcagccgtatctatctattcattcttgcgctccggccttgttgagattttttatgtattttggttttatccactttatgtcttcagcttcatattaagtacgatttggtacggattctcatcgtattatcctcaaattatgtataactccgagactgaacaagggagcatgcttttatccattttgtgatgtggaacattttatgccagggttgcacttggtattggggaacaagtctattcaattcttcttttaaccattttctttgttgaggtttcagtgattggttacataccttactttggcaaggcaatgaacttcctgctcctgtcattgatgtatgcctactactgctttgagtacaagtggaacttctttgcagtgagtctgcatgagaggcttgatttctttgaatcaaactgggcgttctttgctggatttggtgctccatgcgtccttccaattttcttcttctctcctcttataagctatgggtttctggctatactttatccgttgtttgtcttgactgccgcaggcactcaagctgagcaagtaattgatgcactgaaacctgcacacgaagggaaactacaaagaatacctgtgttctttgtcgcaaagcgactgacttgcaactttttttctgaaattg

SEQ ID NO: 27879 - DNA, 1051 bp, Zea Mays
tcaatcacgattaatctcccaagtagtccgactaatcgtgattaatcgccccaagtcggtcagccagaacgaccagtaagtcgtccaacttgaaaacaatgttgatggctaacaagaaaaaattgcatatttggtcctaccagctcttccaaactcttttccaaggaccaaacttgacccccctccattccgaagtgtacctcatgaaggacccatgtgtgatcttttgtggtctgacccagatgaccgatgtgggtggggaatttcacccagaggagcaggttacacatttgggcaagacattgcacagcagttcaaccatacaaatggtctctctctcatttcaagggcccatcaacttgtaatggaaggatttaattggtgccaggataagaatgtagtcacagtcttcagtgcgcctaattactgttaccgctgtggtaacatggctgctattcttgaaatcggggaaaacatggaccagaacttccttcaattcaaccccgcacctcggcaaattgagccagacacaactcgcaaaaccccagactactttctgtaattgtggtggtgaccttaactttctggtgtttgatgctcctctcttccgcagcatcaggggaatggaggacgcagtaggaacgcccctgctatgcttttgctcatcacatcatccgcgtggctgaataaattgcgtccagatgcgaaggttttggtttgcagcttccccatctgatgtgcctagtgctgtgtaatgttggttggcgccttgcagtttctacatgtgaatatgtgatggccaaaatggtttcatggtgattcttatatcacttatggcaaatcaagattattcaatatgtacagatgacgcataatcggcagttcaacagatcagctctattcatgcttacatgattttgctgttgtattgagacgcgtgatggaacatcttggcatgtgatgggatctagctggctagagggagtaaataatctatattttaaatgctgtaaagtaataaagcaagtgatgcaaaagaaatacttatact

SEQ ID NO: 27880 - DNA, 709 bp, Zea Mays
gctgttcctatctcctccgcggtgccagtcactcagtcagcctctgcgagcatccaacgccgaccaaccaccaccacaagttcaccgctaccaccactgcacggagtcacggcgatgacgccgcctcaccaccccgtaaacttcgccgtccttctcctcttcctatgcctcccggcagtcccacccgccgccgccgcggccgacccgaccccgaccccatggcccccgcagttccacgcgacgctggtgatggactaccacggcaacatgtccgtggccgacctctggtacgactggccgggcggccgcaacctgcacgtcatccgctaccagctcgccgccgacgcgccatactacgacaacgagtggaacaacggcacctccttcttctacacgccggcgctccgcacctgccgctccgccgccgtcggggtcggcatcctccgcccggactggctccgccccggggccgtctacctcggccgccgcgacgccggcggattcgactgccacgtctgggccaaggccgacttcatcacctactacgaggacgtcaacaccaagcgacccgtcaagtgggtcttctacacaggtccctaggcctgctgtgctgcctattcacgaaatcacaacacaggtcacggcttcaactgcttgaagctaagtttacctgaaagtccaatgtcttctataaagatctttgagtatg

SEQ ID NO: 27881 - DNA, 2327 bp, Zea Mays
atgactcatgagacgacggcagtctccgtctcccgctgttattggacggcgctttcggcattgacgagcaccgatgccctaatccgcatgctgggcccggccgtcgcttttcccaaggccgccgatcccgacgacgacccaacaaagtggcagccagaaaactcggcagagcatctcgcttgcgaaacaaaggacggcgcgccagaggaggggaaaggaaaacaaccaccacgaccccgtccattccgttccacttccacccgagctcagcgatcgcggcggcggatgcggatgcggatggggaaggggccgtcgtcgcgggcggggtcgcggcaccggcagttccgcgcccgagccatgacccgcgtcgacgacctccaggaggtcttctcgggcctgcagtccgcgcgcaaggactcacgctccgcggacgccgccgtcctcgaggcgcagctccagcagatgctgcgggagtggcgctccgagctcagcgatccctcccccgcctcctccctgcagttggtggtggccgaggaggaggatgacgccacgagcaagatggtcgagcagcagcagcagcagcccccacctccgctcccagctaaccggagccaggggcacgcgcatgttgtgtgccagggcatgaagccggagccgcgcgaggaagcagttgacgtcgctgtggaccagccgcagctgctgagtcagggggttctgcctaatggtgctgctaccgcgtctgcgatgttccatgatcagctgtactatgtgaaccaggagctcacggtcgaggattttctttatgatgatgattacaagatagatctttctgggtctaatctggatgtcattaataacctagaagggattgttcagctggaatatccagatcacaatttgccgcaagggttagcccctaatgcataccttgacatgaatagttgtgggcagagtgccggggctgttttcctgcacatgccagatttgctcacaacaatgacttcagcaccttctgcattcctgaagccaaaatgcgctctctgggactgccccaggcctgctattggatcagaaagatggcataattattgcagcatgtatcatgctgatttggctgtgcaggaagagggccctccaggcacaatgcctgtgatccgtccaagaggcattgatctgaaagatggccccctgtttgctgctcttagtgcaaaagtccaaggaaaaaacgttggggtccctatctgtgaaggagctgccactgcaaagtctccatggaatgcacctgaacttttcgatctttacatatttgaaggtgaatctatcagagaatggttgttttttgacaaaccaaggagggcatttgatagtggaaatcggaagcagcggtccttgccagactacaacggccgtggttggcatgaatctaggaagcaggtgatgaaggactttgggggtctgaagaggtcctattacatggatccacaaccatccaacggctatgaatggcacctatatgaatatgagatcaatgactgtgatgcttttgccttatatcggcttgaattcaagtcttcagatgcaaagaaaattgcaaaatccaaattaggttgtaatccactgaatgaaattcagcagcaaatggatagactcagtgcagacagtcctgtcgacaccaaacggacggcccggagccggacagagcctaacccgatagatgtcaatactaacatctattcagttccaaacaccacagttcaaactgatgttccaaatgcttatcagccagggtcacaagtggaccagatgacatatttgaacggtagtgtcgtttatgggcctcatctgccgtacggttactcgactgaaagaagtgacttctattggaactcaaatgatgggacatgagaagatataaacacatgttcgatttatggcatatttggccttcaagttctaacaattcccgttatgattattgggtcaaatctattagcatgacccccatcttcttgtaattgtagttggcccaatctacaggaaacatctctgaaacaagggatgccaataggcaatactgcagttctattttctgtggcaactttgtcgttgtaatatagccatatcatgataatagcaccctcctcgatgtgcagctgtatgtaacatatatctctggcttggtggacgataaccgttaaccagtcacgttggtgcctccatttatcggttacgttgtatgtgtaccattattcctgttctgaatctgggtgcaatctttatcctcaaactccgattgcacttgggtcagatggagtaaaaaccagccc

SEQ ID NO: 27882 - DNA, 1657 bp, Zea Mays
tctactctactcagtggagtagtataaaactgaggaacacggcaataacacgagcaaattcagcttgtcttccaatgggggatcgtgttggtgtcaagtacaacagcatcaatgaggctgaagagcataagggagggcatggcatccccaaggtttccatgatacccctcatattcctcatattttatgaagtttcagggggtccctttgggattgaggatagtgtcaaggctgctgggccactactggcaattttgggctttcttctgtttgcactcatatggagcgttccagaagctctaatcactgctgagatgggcactatgttccccgagaatggtggttatgttgtctgggtttcttcagctcttggtccgttctggggttttcagcaaggttgggcaaagtggctcagcggtgtcatagataatgccctctatccagtcctatttctggactatgtcaagtccagtgttccagctcttggaggtgggctcccaaggaccttagcggtgcttatcctcacagttgcgcttacatacatgaactacagagggctgactttttttgccaagagatctcactatggaaccccgcttattggcatcctgttctctgccttcggtgtgatcctactgtcctggatgagcttccaggagatcatcgctgccgagaactacctctactgcttcggcatgatcctggagttcattgccttcatcaagctgcgggtgtaccatccgaacgcctctcggccctacaagatccctttgggcaccattggtgctatccttatgatcatcccacctggtctcttgatcattgtggtgatggcactcgcgtcctacaaggtgatggtggtgagcatcctagcgatggtcttcggattcgtgctgcagccgtgtttggtgtacgtggagaagaagcggtggttaaggttctccatcagtgcagacctgcccgatttgcctgatgtgcaggaaattgctgaagatgatgctgtcccactcgtggtctaatattcggccattgtgctctggaggtgttgttcccaatcgagacatcctaggatggaatgtgacacactgggattcacgaccttgtatctcctgaatgagttccaaagccagaggtcttagacatcttgtataaggacacattatgttttcaccgtgctattgaacatcatgatggcatcatgcatcaaacagaaatgtaagccccagacagtgttcatcaaaggagatcctccagattatcaaatacatgttgcatctgctgtcagctgtcgcttaacttgtctatatactagggtcgatccatgacatgacatgaggttactcatctgggatcgccttaaaatgggtgaacgttaactcttgataagaggcagtagaggttctcgacctgcagattgtaacctggtttccattgcataaactgttatcagtaattccatcttttgcgtacagttttgtgttataaatggagcatcggcgtaattgtccttggaagttagttgccattattctgcatgtttcgactcatttttgcaaacaatataaaatgtttttcgcaaacaatataaaatgttgagttttatttcggaagggtactatttttttcgatttttgaatcccaaagtttcatcattaga

SEQ ID NO: 27883 - DNA, 873 bp, Zea Mays
tcgtcccgtcgattgtagttgctcagcactaaggaaattctctgatctggttagtcccaccagtcctttcctgtgaatttttggtcgaattatttatgggggcgtgggaattcagcagacttcggccgaggacggttcgaatccgatctgtattatgctatcacacaaatatcacgggaggccgtagaggtgttgtgatgtgtttctttggagcactcactgcccatttgatctttgtagttgatttggggatcggaggcttcttgatttatgttgtagggactattctcttaattagtatgtgatttggtcaagaggtgtggaaacccatattctcatattcccgttgttggtaggttaattgcgatgattcattgataaaaaagaactcagtttttaaagtcattgtggtcgaaagacctagttcttatatagttcactgctggatgctttcttgtatcattccataggcctgtttggatacacgaactatttactagctagctaaaaattagccttagtgcatccaagtaagaaaactaatagcttagtaataggtgagcttattctttagctaagttttcaactagttgttagccaactagctattcaaactcagctaatttgagctaatttttagcccgaccagtaactacccctagctcatccaaacagaccgtaagtgggtatcaaagaggttctatcttccacctctaaaaacagaagcagctatcaattcttgttccctgggtaactctgcaaaacaaagttgcttataattgtggccatcgttttataatcagtgcaaaaggtgatgtctttagcaacattcttgctggattttactattgctggggtcttcctgcctaggac

SEQ ID NO: 27884 - DNA, 4827 bp, Zea Mays
ccaatttcttcctcctcctgccttatcgtcttcctccttcctgccttgtcttcgtcctcgctcaacgccaatctctctcctcttaccattacccatttctcaaatttccaactgaaatacgcccgccccttttcctgcgcgctccgattccaaaccctcggagctctcaagacaagagattcaacagagccggagcggtagcacctctttcctgtttgcctgtaaccttcctgctacagtacgccgcagcgattagcggcccgaacccaaatccgcaacggcctgagcgagctattgagctcggcggggcgggattctcggcgtagagagtatccttcagctgtatcgcgaaagattgagccgaatcggttgctggagttgagccagctcttggacttcctgcgagcagaagtgatccggagattggagctgctggtcctgccgcgtcatgtcgctgttccggaagttcttctataagaagccgcccgatggtctgctcctcatcacagataacgtctacgtttttgatcactgcttctccctgaaagaggtggaaggggaccatttcgatgctcacattagaggcattgcagcagatcttctggaaaattttcgcgatcactcattcatgatctcgaatttcgggactaaagaggaagaaagccctatataccatattttgtctgagtatggtatgactgtattggactaccctggccactatgagggatgtccactcctcaccatggaaatgatccactgcatcttgaagtccagcgaaagctggctttctttgggtcagcataacttactgctaatgcactgtcaacgagggagctggcctattctggctttcatgttagctgctcttctaatatacctggggcattattccgacgaggagaaagtgctggatatggtctacaagcaatcgtctttggagcttttggagatgatttcacctctgaatcccatgccttctcaaatgagatatttgcgctatatctcgacgaggaatgtcatgcctgagtggcctccagctgatagagccctcacattagattgtgttattttgaggatggttccaaattttcatggccaaggtggtttccgtccaatattcaggatatacggcccggatcatctcatgccccctgatcagactccaaaagttcttttttcaactccaaagaaaagcaaccttgtccgtttttattcacaggcagatgaactggtgaaaatagaccttcaatgtcatgtccaaggtgatattgtcctagagtgtatccatctgtatgaggatctggatcgtgaagagatggttttccgaatcatgttcaatacagcattcatccggtcaaacatcttgatgcttaaccgtgatcacatagacatgttatggaatgcaaaagaccaattccctaaagattttcggtttgaggttatcttttccgatatggacatagttacttcacatgtcacaacagagcctgttattcatcaagagaaacaaggacttggggttgaagagtttgctaaggtgctagatatctttaaccatttggactggttggatgggaaaaaagacaccgtacctcacacaacccagctaaagatctcagcgattaccgatgaacctgagactttctttgatactcgtgaagaacttgaatctgaaagttcttctggtgaaatttattcttctagtgttgttctgaaggtcggaaatgaattggatatgcttgtcagcactaaaccgagacatattccccaagattcaagttcagctaatgttcaatccaaatcacaaactacagtgcagtctccttcgcgaatgcggcgcacagcattgttatcaccttctaaggttaaggtttcaaagaccagtgcttcaccaatggaactgtcttcaagtacaatcatgccacaacaatcatcttcgccggttcagcctcggcgagtgatgtctgactctgcagtaaaatttttatcagagataacagaatcagcatcaggtgagatgtcttgttcacaaactccagttgaacatgaaccttcctctctgatggaaaacaatccagcaccaacagcatctctgttacctttgtgcacacctcctcctcttcctccccctccacccactgtctctttactccctgttcccactaagttacccataaatactagcacaagtaccatcaacatttcccttagagcaaccgtgcgttcctctccaccttcagaaccatcagtccctcctaaagatcttttgagaaccgaagagctgggtaaatcacaagaaccttcctatgaaactcgtgggaaattacaaactgatagtactacaggttccaatgatttcatactgtcaccagccgcttcatcttcactggatgaggaattgagcaacgcaagagcatctctcccgacagatttgccagcagtacctcaaaatccagacactaggccctttgcaattcaagcgacaagatctgaaactatgccgccgccgccaccaccaccaccaccgcctccgtcaaaatcaggcatgacgctgtttcctttgacacatggtgaagaggtaaaaatcactatagaaaaagtcgtaccacatcagcctccgcatccaccagcagcagcagcgtcattttcaagctcaaatccagatgctgtatctgtaattctagctccacaaaagagagctcggtctccaccgcccccgcccctgcccccacccccagggttggcaaaaccaccattttcctctctacggtcacgatcatcacctgaagtctcattgtctcaaccgcagtttctagataacaaggacagtgcaacaatggaatatccagacaccccgtctttgacacctacattttcacaaagcgttacacgggtgcaaacactgcatgttccacctccaccacctcctccatctcgaacaccgcctgttccacctccacctcctcgaacaccacctgttccgcctccaccaccaccttcatctcgaacaccgcctgttccatctccacctcctggaacaccacacgttccacctccaccaccacattcttctcaaacaccacctactccacctccaccacctccctcttcacaaagtttcccatccttaagtagaagaaatcgtgtggcagcccctcatccacctccgcctccagcaccactgtcatcccgtgttacttctgcaccatcagtaccaccttcacccccattacctcctcctaagctagccgtggccaataacacttcacagaagtcaccaacaatccgaccacctccacctccacccggcccccttcataagcttacgaagggaagtgttgccaattctaaccctcccccacatccagcattttcatttggtgcaaaggatcgtagcacagcccgctcaaaaagtcctagaagtttacgtgccaaccaggcatctaaaaggaccccgctgaagccattgcactgggtgaaagtttcaagagcaacacagggaagtttgtgggctgaaacacagaagtctgatgaaatatctaggaccccagagattgatatctctgagctggaaagtcttttctctgtaacgatgccaaatatggaggcaaaacgtcaacggcaacaacaacacccttctgttgcaacaaagcaagaaaaagttcatctgattgagctccaacgcgcaaagaattgtgaaattatgctgagaaacattaagatgccactgcctgatctaatgggtttagtagttgctcttgatgattccgtagttgatggtgatcaagtagattacctaataaagttctgtccaactaaggaagaaatggaactactcaaaagttatacgggcaaaaaggagaacctagggaactgtgaacagttcttcatggagatgatgaaagtaccaagggtggaatcaaaactgagaattttgtcatttaagataaagtttgttacacaggttgcggacctaaaaagtaatttgaataccatcaatttggttgctgaagaggttaggagctctgtgaaacttaagcgagtgatgcagacaattctttctttgggaaacgcattaaaccaaggaactgcaaggggtgcagctgttggatttagattggatagtcttcttaagctcagtgatatacgagcacgtaataataggatgactctcatgcattatctatgcaaggttctttcggacaagcttcctgaagtgcttgacttcagcagggatcttgcaaatttagaacctgcctcaaagatacaactgaaggagttagcagaagaaatgcaagcgataactaaaggactggaaaaagtggagcaggaactggcaacagctgaaaaggatccttcagagacagagatattttacaggaaactgaatttattccttgatgacgcccaagctgaaggaaggtcgttagcttcgctttacagcagtgcggggaaaagtgccgattctctagcacattattttggtgaagatcccgtgcggtgtcctttcgagcaagttgtctcaacgttgctaagcttcacgaagacgttcgagcgggcccatgcggagaatgttaagcagatggagctggagaagaaaagagcacaagcggaagcagagaaagagaaggccaaactaactgcccacaagaagagggagtcgctggagcttggaatttcaggccggtgacacaccatatattgcatctgtggatagcacgcacttcactaattctgtgccgcctgatcacctagaccagcggcagaaaattttgtagcgctccttcagcgtgtatcacaagtttgtttgttttttgggctttc

SEQ ID NO: 27885 - DNA, 1777 bp, Zea Mays
cgcgctgcagtcagccctcatggccgccgcacaatgccagtgccagaccttcaccacgggccgggcgtgcatggcagatcttccatttaggtagagtagtggacaaccaagcccaaggccaaagccattgcttgctcagcctctctgcactgcagggcgatgatgaggcaacggcaaactggcagcagcaagtactactagcgcttgctaaaggtcggtgagttcctcctcagtcctcacctcctccttttgccggttttttccaggttgaagaatgagagtgctgtgtgtacttcagatttcaggctatctctctgtttatctgcttgctaccactattctctgccgtttccttttttttcagcatgcttttcagctttacacccagtcatgggaggatagtacatagtagtagtgggtgttcgttgtgaatctctctctctctctctctctctctctctctctctctctctctctctctctatccagttttggatacatttctgaaacttgcgccgctgagagcctgagatcaagcgagcgcgcggcgcttggaagagccacggcgtgagtgacgcattgcggcaaaggcatcactgtttctcgttctggtttggactttggagtcccacagcaaaaaaatgcctatccctacccactcatgcctaccaagaaacaacaactcaactctcgggaggcgcaacaaacgatgccgcatttcccttcccctttcgttttttttttacctcttcagtgttcacatgtactagaacgtgtgatatgtcttcgcaagcgtcacatggtctcgcgcgggcacgagagacaggacggcctcgagtcctctcaactcaactgccctctgatgcctgcatttcttctaccaggccaggagcccaggacccggaggtgctcgctgtcgctgatcaaccgcgcgccgtcgcaggcagcacagcaaccagcaacagccaacagctaggcaggtagtagtagtatacatgagcaggttcgcggggcagacgtccaccaggccgtgggtggggatggcgggctctggcgccaccgcgtccgagcctgccgccgccgacgtcgcgagggacgacgccacggcggccatgaggggcgccggcgccggcgccggcaccaacgccagcgccatctccttcggcttcgcggccacggcggtcctcgtctccatgttcctcctcatggccatcttcgagcacctcatcaagcccggcctggcttcctcctcctcccgcggcgcatcgggctcccatgaagacgccgccgacgacgatggcgaaggccgcggccaccgccaccgcatggggggatcacccccggctcgactgcgcgagcgcgacgacgcggcgccggacaagctctgtcacctgccaaaggtggaggccgtggtggacttgacggtgctgatgccggggcagcggtacccgacgttcctggcgcagccggcgccgctcgcgccgtgccacagggaaggcgtgctctggccttcccacgaccgtcgccgctcgtttgtgccaccgtgattttttccccccaccacatcgttctttctgtacagaggttattgtaaatggcagcgccctggcttattcgaggctgatatatcatatggctgttgtcacatgtgatgtggaacactgtttcggtatggtagatatagcgatggtaggatagatcttcacatgcgtacggccggtacgtagtttcagcaacttgctaattaggctgggaaatgtcgttgggtaagtttggc

SEQ ID NO: 27886 - DNA, 892 bp, Zea Mays
attatgatgctgctggttttggagatttaggaaggttgttgagattattgatcggtatgatgaggcatgtgtgccaggcaacatgactgagaacaagcttgcttacatccagaatgagaccttatccaaagagtgcataaggaatcttacggttacaaaggatatgaagcagcctatttttgtgtattatgaacttggtaacttctaccagaaccataggaggtatgtaaagagccgaaacgatgcacagctaagagatgctagtaaagctaaccagacatccgcttgtgaacctgagaagaccacagctaatgggcaaccaattgttccttgcggcctcattgcttggagcttgtttaatgatacatataatttcactcgtggtaatgagaacttgacagtggacaagaaagatatttcctggaagagcgatagggaacataaatttggtaaagatgtctatccgagcaacttccagaatggcgcacttaaaggtggagcaacacttgacccaaagatcccgctaatatccattgatttcttgttcatgtggaaaaaaactgtatggttgagtgagcaagaggatctcatcgtttggatgcggactgcagcacttcctacattcagaaagttatatgggagaatatacattgacctcaaggagaatgacacaataacagtgacattgaataacaactacaatacatatagcttcggtggcaagaaaaagctggtcctctccactgcaacttggcttggggggaagaacgattttcttggctttgcataccttatagttggcgggctctgcattttcctggcatttgcattcaccttgctgtacttcgtaaaaccaagccgtactgtgaatgtgatgcttgctgtgaagtaa

SEQ ID NO: 27887 - DNA, 370 bp, Zea Mays
ctcccaccccccaccagcgccgagctccaccaattgcacctccttcccatggcgtgagccctgtgttggcgcacacctctgctcggtctccatctccccagtcgtcggaccggcctcctcccagccatggcacagggccctgctcctcttcggcttccccttcgcgtaggctcgccttcggccgtcgtgaggacaccagcaggctccagatccgaacgatcgtgctccgactctggctggccaccatctctaggcgccgctgccccaaacccgacctcgcgcgctgccaacgttgtcttctccgaccacctctccattccgcgcgaggttactagtcatctgaagaatcaccctggtaactggaatctca

SEQ ID NO: 27888 - DNA, 1434 bp, Zea Mays
tccctcctccctctctcttgtcttctcccttgcggcgatccggattccgccgcaacggcccctctcgccttctccctcgcggcgctcgatccctccggattggcgcgtggaggggacagtgatcagctggttcaacaaaactagtaaagatggcatcagaagggaacaaagacgtacctcatgaagctttgaccgtggatcactcatcgatttcgggttcaaagcgcaagcgtggccgcccaaggaaatatgagtatcctgtaaatgaactaccacagaaggtacagcccatccagagcgccccacctcttcttcactgcacacaagatggctcaagtctggccagccatgcatctggtggcggtgctcatggtaattggtccgctcaacctaggaattcagctaatgcttctcttcaagcaatacctatatcggttgctcccatcaatcctgaaatgagaacttcggccaggcaggatgctgaacttgtgatcccacaatcatcagtttctgcagtgccaataaaatttgtttgtcctgcctcggtaccatgcaagcaactggctaatcaaaatgagtttactggaaataagtctgttgatgaggttcagaaagattcggaatctccaaatgtaaccaaggaatcaccagtgaaagctgaaaaaccaaacattgctcttgtggatgtagtggccaaggattctctaggggaagggcaacaacttaatgatcaagtaacggatgtagttagggatttttctggtcaaactcaaaatgttgatgtgacaatgtctgatgagatcaagatagcatcaggtgccagagataagccaaattctgcaaattgtgaacagcagagttctaaggaaccatcagacatcacagaacaatctgagcagctcaagacagagaccgatgtccagaaaggagttgatgcctcagatgacattcatcctgcgcatgatgaacaataaatcaaggttgtcggtaagtgaaaatagagatcaagattcaacgaacacaacacagatcctgatgtttagtggaagtttgctgcctgtaatgtttctgtcaggcttattgggatgtggagctggaattttagcatggaccaatgctttaggtgtataggtgagagattaagtagagttacataaacccaaaaaaaatcacctaggacgtagcagttatagcacagagagaatacttgatggacttctcatttttaggaagatgacccggcttaaagttattttgaactcctggtcttgtaatatgcctttttaatattttaagctctattcacagacatatggaaacatgatgctatacaggaaaacttgcatgttatatgtaatggccctcttgtttgttgttattctcccccaaaaaagtatttttcaacagattttgttcccgtgttttgtacctaaa

SEQ ID NO: 27889 - DNA, 678 bp, Zea Mays
agggaacaaacgccagagggttgtggcagtagatcacctctctcccgattggggagcagggtccagcttgcagccaaatggcgtacaaaccggcaaagagcctgctaaggaggttcccaaggaaccatcttttacctgcccaatatgttggaataagatggaggagccttccacaacgacttgtggccatatcttctgcgacacgtgcatcaaacaggccatcaaggttcagaagaaatgccctacttgcaggaaggggctgaaaatgaatagtgttcatcgtattttccttccgaacgcttctagttaaggtcgattggctttgtcaaaggaacttctggtaacacaaggctgtgcaatgtacagtgaggatcagaagttcttgggtgaacagcagatagatgtttcatcctagtctgtatcatttaacagcatcactaggagctcatcatgaaaacttcctgactagggaagtggatatcagcctcagttttactggcctcttattgcatccgtggttcataatgttatttcgctgttgtatgtattaggttattactgtggtggattagtgtaactgggatttgcttcattgtaaaatgataatgacgagttgaaacgtttagcatttttggatgcttttgtttggtgtactcatgatccctctgtatcctacgg

SEQ ID NO: 27890 - DNA, 885 bp, Zea Mays
atgagagtggagaatgcttcttgcattagggatgagatgagtatgcagtactcacctatgtcagaagagtcagatgattataggtactatgacactcaagtaaacaccaatgggaatcaaacagatgtactgggaaggctggatcccatcctcacctaatgacatgtgctatggtggagatctgagacgaaccgcacttctgaggtcagttcaaatgaaggtgcagagcccccatccatgtgatgtgcatgaacgagaacaagggcgttctaatgtacatgctgacgagcttcaacaggatcagaaagaagctgtgggtgtacagctggaccaaaggcctctctcttgtccaaagtcaacccaggatgctaagtgccagagctctatacactgatgacgcggattttgttgaggatcagattacggtgtgaccagtcaaagtttgtcgaggatcatcacatatctggtaattttttgcgtagatttggatgaccataaataatactccctgtttcccaatatattgttcgtcctggcggatctattgacaccctaaaacgaatactattttgggttggagggagggagcatgttgcatggcccgttcgtaatttagtaaccattaacagtattctagtggtggcctgccccgttcgatgaacttatgtgacactaggttgtaagaagatgggacactaattaatcttgatcttagaaatgcaatgtgatgtagatgatatcagtgcttttattatgattagattaagaagttaagcagtctctgtcacttgcactttcaaggttcagatattgtttggatttgtttatcgttcggtgtctattttcattgttgaagctatgcatttgatgagggaaagagacaaa

SEQ ID NO: 27891 - DNA, 3540 bp, Zea Mays
cttttttcccttcctctcctttcatcctccgcctctttttcctcctcctgccgctcgccggagcaccgccgcgggcgctccctccttcgccttggtttggttccgacgcctacgcgggatccgtagtctgcgccgttccggagttctggagccacctccgtgcgctcgggagcgcggcgttaccggagcaggggcgggcgcggatcggagcgcgctggggacgccggtagcggccgcctcaggggaatgtgggtccccgtttgaggaggcctcgggccgggaggccgcgccgagatgatacgatcaaggagaccggttctcttgagctggggactgcaaaggatacgtggcttcagtcattgtgctctggatttttagatcaagggaccaatgcctccaggataatggcggggaaggacggagtttctctgaaatctgtgtcatacggggcaaggctgcgcaggagttgtgatgcatcactgagagaggcagggtccatgagagacccattcttgaaacacagagtaaagaaatttgatctatctagcctagattggattgatgagattccagattgccctgtattttctccatcaacccaggagtttgaggatcctctggtttatctcagcaaaattgcccctgtggctgcaaaatatggtatatgcaagatcatttcacctgtctctgcttcagtacctgcgggcactgtactaatgaaggaactaggtgggattaagtttacgaccagagttcagcctctccgtcttgctgaatggaccaaggatgacaagtttgccttctttatgagtggaagaaagtacacatttcgggagttcgagaagatggcaaataaagaatttgtacggagatactctagtgctgcttgtcttccatcaaggtatatggaagaggagttttggcatgaaatagcttttggcaagatggagtctgttgagtatgcatgtgatatcgatggtagcgcattttcttcttcttctcatgaccaacttgggagaagcaaatggaacttgaagagattctcacggttgccgaactctacgctgcgtcttctcagagctgcagttccaggaataacagatccaatgctgtatattgggatgctctttagtatgtttgcctggcatgtggaagatcattacctgtacagtattaactatcaccactgtggagcccccaaaacatggtatggtattccaggaagtgctgcttctgattttgagaaagtggtacgtgagcatgtatatgatcacgaaattttatcaggtgaaggggaaagtgcagcatttgatgttctgttgggaaagactacaatcttcccacctaatattttactggatcatcatgttccagtctatagagccatacagaaacctggagagtttgttgtaacgtttccccgagcttatcattctggtttcagccatggtttcaattgtggtgaggcagtaaattttgctacgggcgaatggtttcctctaggagcagttgccagtcaacattatgcacttcttaagaggataccagtattaccttatgaggagcttctttgtaaagaagcaacattttgtgctaatgagttttccttgtttgaacacggaaatgtaacattaactggaggcacacatatacagagctatatgaagggtccctttgtgcagttgatgcggttccaacaccgtgttcgttggttgcttgtgaaaatgggtgcccgtacatgctataaagcagacattgatgccacagttctctgtgggatatgcaaacgtgactgctatgtagctcacattatgtgtaactgcagagcagatgcaatttgcctttgtcatgaggaagagattagtaagtgttcttgcaactgcgaccgtgttgtttttgtgaggaaagacatctttgaattggaggaaatatcaaagaagtttgaggaaattggaatactggatgaagtaggaaaacaaatgtctcaaaatgatggctataacatgcatccttacttgtccaatggcattgaccacaatgctaaatactttccatactgcaagatcctaattgatacatcccctgaacttcgtaccttttcagaggtagatgttcttggatatgatctgaataagccatatcctacattatcaacaataacttctgcacatggaccccatgagtattctacacaaagtgatgagtgtactagttctaagcaaagaacatactctagctcatgtccagagaatggaacgcttagtgtttatcctttatgtacatctgatcaagcattctcaactgacaaattggctgctcaggatactgatgattctgactgtgaggtatttagagttaagagacgatctagcatagttatggagaaaagatgttcagaagatctaacaataactttaactgagaatcaggctttaagacggttaaagaaagcctgttcagatgacagacaagagaacgcaactgaatcacattgccttgacttcatttctggaaatacagataatttcatcaatcgaagcaaacaaaaaatgaatgtagatcagctagatgcaaaaaatgtggaagatgaagttgctttcggccagaaatctatcggttgcagttacctgtctccatctgtagatcttgggccgaaacgcttgaaaattcgtggcccatccttcccaagcactgtttctgaagtggaaatatcttataggttccaggaggacattgacttggctagtcagcatactcaatgaagtatgctgctcttggtgctaactgctaacatcaatcgtaacttctggaagatgaaagctcttttttcattggatggttcagaactgattctatctacaggtctccaatggaggcactgttatggctggattttatgattctattgccaggtcataggcgatttttctgatgatccgtagctgcacatcacttatttcctttctttgtaggttttccactgtgaataggttagtctactacttttaacaatttggttcattctttttccaccacagatacacctgtacctagaatgctttaatagatcctcatacgaaatggacattgtacattttttttaacaagtcagtcttttgctcattataatctggaaccatttgcaattcttattcttgttcagttgttggcaccggtacatttgtcctcagatgtgttgataactttgatatgttaataaatcgtttgatgctgacaggaattcacttccactgactgtcatgttgcatatgcaacaaagtagatgctttgtgataatgttgaagcgcatgcaaatgctcgaatcaatcatgttctatagaaagtggatacaacagaaggaataaaggagcaacttcttgctgttagatcctggtctactgaaatctgtcacataagatttactttctcttttaagttcaggatataatatttggttagacaattattttaatttgatcatatgtctggttggttagcaaagtaggcaatttgatttgtcccctaagtagcttctatttg

SEQ ID NO: 27892 - DNA, 2596 bp, Zea Mays
gatattgatatggcgtggccgctttggggacctcagaggggcgtggaggagtagatgtgatagaggaatggaacgcagtgggtatgggggtcggctgggagggttcccagggtcactggagttggactaggagtcagccacgatgaccagaggagccacccagcaggtaccatgctatccacaatgaagtttacaagtggtttaacataaaatttgacaagtttgggcggacatcttctccagagcagacagaaatctgccatgcaattttccataaattgatggaaaacaattggctcacagaaaatactatgcagcagctttactgcgatatgtgccaaaaatttctagccgataggcttgttgaaggaacatgcccaaacaaagtctgcaacgcatcagcacgaggagatcagtgtgaaacatgcagcaccttgttgaatccaacagaacttattgacccaaagtgcaaggtttgtaagaatactccacgtattcgtgacacggatcacttatttttggagcttcctctattgagagacaagctggtaaactacatcaatgaaacttcagttgctggtttgtggagtcaaaatgctattcaagcaacaaatgcatggttgaaggaagggctaaagccacgctgcatcaccagagatcttaaatggggtgttcctgttcctcatgagaagtataaagacaaggtcttctatgtttggtttgatgcacctatcggatatgtgtctattacggcatcctatacacctgaatgggagaagtggtggaagaatcctgataatgtagagttgtttcagtttatgggcaaagataatgtgccgtttcacacgatcatgttcccttcaacgctacttggaactggggaaaagtggacaatgatgaagacaataagtgttactgaatatttaaattatgaagcaggaaaattttccaagagtaaaggtattggagtctttggtaatgatgcaaaggatacaaatattcctcctgaagtatggcgatactacttgcttatgaaccgtcctgaggtatcagatacactttttacttgggctgatttgcaagccaaattgaacagcgagttgctgaacaacttggggaacttcattaatcgtgtgctaagttttattgcaaaagaagctggagctggatatgattctgttgtacctgatgctcctaatgcgggtgaacacacattgacaaagatacttgcagaaaaaacaagtaaatgggttgaacaatatctcgacgcaatggaaaaggttaaactgaaacaaggactgaagagtgcaatgggcatttctagtgatggaaatgcgtatctgcaggagagccagttttggaaactttacaaggaagatcctgcagcatgtgcgatcgtgatgaaaacttcagttggccttgtctacctgcttgcctgtctgctatcacctttcatgccctccttttctgatgaagtattacgtcaattaaatttatctccagaagaaaatttgtcattaagtgaagaaaagggagaaattgcaaaggcaaaatctccttgggattttgtaccagcagggcacagaatagggaagcctgcacctctgttcaaggaattgaaagatgaagacgtagctctccatagagaaaaatatgcagggagtcaagctgagagaagctcaaaagcagcagctgatgctgaagccaacaaagttgctaatcagctcaagggcacaaaattatccgatggaggaacaaaaaagggaccaaagaaacaatctggtggttcgaaatcgaagacagctgatgctgatattacggttgcaaaattggatattagagtgggccttatcaggaaagcagagaagcatccagatgctgattccctttacgtggaggagattgatgttggagaggacacaccaagaacagtggtcagtggcctcgtcaaattcatacctctcgaagaaatgcagaaccggaaagtttgcgtactctgcaatctgaaacctgtggcaatgcgtggtataaaatcacatgcaatggttttggctgcatcgaatgaggaccacacgaaggttgagttggtggagccacccgaatctgctgccgtgggcgagcgtgttacctttgctgggtactcgggggagcctgaggcttccctcagtggcaagagcaagacgtgggagaagctggccgccgagctgcacagtaacggtgagctcgtggcgtgctacaaagatgtgcccttcacaacctcggctggaatctgcaaggtcaagacaatagcaaacggagagattcgctaggcacatctccgaactgcagccagctgacccaatctgggaagtgctaaactttagcatcatgaacctaaacaagcctaaagccttttatgtttgaaaagtcgtgtacaagacaaactctccgtgaagagatgctttttttttacttactctactagagactcctaaaaaataccgatattaattggggttatacatgtcctaagcatagatcaaatataggtagcactcgctgatagtttagtaaaacacaattattatgtttacagaaaatacgattatttggcaaa

SEQ ID NO: 27893 - DNA, 1700 bp, Zea Mays
gtcgaacacaaacagcaagaaccaccaagcgaccaagccaccaagggagcccgatctgagtcaagcgtcttcccatttcatcgcctggaaaaaggcgagaaaccccgaagtgaaggaacagcagcacgagtgctagcagcagcagcgattccttcgccataccgttcgccgcgctcgctcactcggatcgaaccctccctagggtttcgcatcgtcctcccgccaactcctatccctcccccctccctccgccgcgcgcgcgcggggagctaccaaaccctaggacggcaaatccggtgcgatcgcccacggtggaggcctcgtcggccgccgagaggagccgctcggggctcgggtcagggttccggtacttcgccggcgccgcctctgggtggtgggaccggtggatggtcatgggagccagcggctccaagcttgagaaggccctcggagaccagttcccggaaggcgagcgctacttcggcctcgagaacttcggcaacacttgctactgcaacagtgtccttcaggcactttatttttgcattccattcagggagcagttactggaatattatgcaaataacaaaactccaggtgacgttgaggaaaatcttttgacttgtttggccgacctttttatgcagataagccaagcaaagaaaaagaccggtgttattgctccaaaacgttttgttcagagagtgaagaaacagaatgagttgtttcgcagctacatgcaccagaaaaagctccaaatggcccagttcaacctttagccaatggagttaaaaaagaaccaccagttactctggtccataaaaatttccagggcatattgaccaatgaaacaagatgcctaagatgtgaaacagtaactgcaagggatgaaacgtttcttgatcttagtgttgacattgaacaaaatagttctatcacaagctgcctgaaaaatttctgttctacagagactttaaacgcagaggataaattcttctgtgacaaatgctgcagtttgcaagaagcacagaagagaatgaagatcaagaaggctccccacatactggtgatccatctaaagcgtttcaagtacattgagcagcttggccggtataagaagctttcataccgggttgtattccccatggaactgaagctcagtaatacatctgacgatgtagacactgagtattccctctttgctgtcgtggtccatgttggaagtggccccaaccatgggcactatgtaagccttgtcaaaagccacaaccactggttgttcttcgatgacgaaaacgtcgagatggttgaagagcagaccctacaaacattcttcggttcctcacatgaatactcaggcaacacagaccatgggtatatcttgttttatgaggggcttggtgggaagagttagatgggtttattcatcttccttgtttcttttctccttttctctttggagcttgcaaattcactcttgtgcctacacagctactatttcattacctccatgggaaacgggtcaatcgaaggggtgttgtatgaggtgaggacgccagattttgggtggtttcagtgtacaggggataatggaatctagctccaacgatgaaataaggtgtattttttttaacttctcagggctaaagagttggactttactattgagcacaacgtacatattttccagtgatcttgtg

SEQ ID NO: 27894 - DNA, 2419 bp, Zea Mays
ctagagattcgtctacattatgagatcccaaatacatcggagttatttgttcacagcaagggagaactgcacgagcagggaagaaaggcagtgcaattctaatatacacgtatgaacagactagagctgtaagggtcatcgagcaagatataggatgcaggttcacagagcttccgaagatgccagtttcagacgaggctgcagacatgtttaatgtcatgagagatactcgctctagatcagttggaagcagaagaacaggtggaccttttagccgtgaaggttatggtgactttgaagaccatcgttccagaggcttcggtgattttgagagatttggtggttcctctgaccgcggcggtggattccgtgactcaggttcaaggtaccacggtggatctggaggtttcagacgatcttccagtgactttggcaggcctagcttcagtcgttctgatagatttggcgactttggagacagtgatttcagcagacgtggtaacgctgactttgggcgttcccggagctctgatgattcaggctcctcacgttatccaagaggctatggtggttctggcacgtcagattccggcaacttcggtggcttcaagggttccaagtgatgaatcggatagggttttcttgtacagttctgaaccttttctaacacctgttgttaaatcttaaatcctcccggggagcctgggaggccagatatttttaccaacgaccacaagcgcagatgggctagcccaaaatcgtccagggcccaagaaaacgaacaaaagtgcacgggcttcctctttcctgccaggagaggcacccacgacggcgacgcattggattggcttgggacagaacgagcgacggcgaggagacggcgataagatttgctacacctcggactgtagctgggagactgcacgaacggcggcgtccacgagtcacgaggagcccagaggcttcttcacagcagcagcggcaggtccgctgatgccagactccccccagctccaccaaccgcctccccctcccgcgccgccgccggccagcgcaacaccagccgcgccagcggcagcaaatgcgcaacccaagctgactgccgtgaagctgaggatgatcatcaagggcgtgctcgggcggtaccagcgctggaaccccgtgcacccgacggccggcaccttctggggtgtggggctcggcgtcggctgtggcgtcggctggggccccggcttcgggcctgaggtgattgggtacgtaggcgccgggtgcggcgtggggttcagcgttgggttcacgctcgccggcgtcggcatcggcctgccgcagcacagcctcatcaggaaccacgaccacggtggtaattagtcatgctctgttattgcgtccccttcaataaataatccatgtgcaccacggttggtattggtgtactaattcttggatccagtgtgagtttcagttagtgtagtgcagtagtgcttttattatctctacctgattgttgtgagaaatagaatggaaatatttgggcaagtagcaatcaattaattggtgatttggtggaaacaaatgtctgtagttggatattcagtcaaccatgcttcacctgtccttgccagtgttagttggtgcacatgatttagcaacctgacagtatgctatcattactgatgcacaattagcaggcctcaccgcctcagtgcaggcccgattatttgttgctattcccgacctttgtgtacaagcatctgacacatgaatgacggacagatctgccttctgaatttcacctacaggttttgcgagcagcgtccctgttgattcagcgagattctacgccctaaccatcatcagaggtctggtatgggacgccatcagctacgtgggcaatgcagcggctatgaggaaagaatctcgacagaagcttccgaggttccaggacagccctcaggttccaggaggagttgatctgccgaagctggggaagggcgtgtcgagtagcatccggtccacggtagaatgcatcagggccttcaaagatcagcgttggcctccttaaaagactcgttggaaatcaaagctggtttcaagttgaatggtaccgccatgggaacttaaacatggtgatatacaagtttttgttttttgttttgttttgttttgatatggaaggggaaattagttgttctagctggaaatgttagtctgcattctagatattatttttgttatgtggatgcatctgtaaatatgactgctgctcttttgctccctccttattcaagcactgtgaaacagggattgtagcacgaaatagaatagaattcccctcttaaattaaccatgtagccctacatctgtgctggtctgtggatgccatggaagtttgaaagcgtataattgaggcatgccttcg

SEQ ID NO: 27895 - DNA, 2064 bp, Zea Mays
atcattggccgctgtaattcctcatgcagagtggcacagtagtaactcgggacaactttctcgtgctgcaaacgctgattggggccacggtggtcaacagcccactgctcccgggcctgcggcagctctgcctgtgggacccgcgcgggtgggccgtcgccctgctgctgcatgtgggcttctcagagccggtcttctacctggcccaccgggccctccacagggccccgctcttcgcccgctaccacgccgcgcaccactcctcgggcgtcacccagccgctgacagccgggttcgggacgccgctggaggtcctgctgctgactctggtgatgggggccccgctggcaggggccttcctggtgggggccggctccataggcctggtctacgtgcacgccctcgccttcgactacctgcgcgccatgggttacagcaacgtggaggtcgtgtcgcccagggtcttcgaggcgttcccgctgctcagatacatcctctacacgccttcgtacctgagcctgcaccaccgcgagcggtgtcgcaacttctgcctgttcatgccggcgctggacctggcgggcgggacgctggacgagcgggcgtgggcgctgcagcgcgcggcgtacgacggggggccgggcggcggcgcgctggggacgccggagttcgtgttcctggcgcacgtggtggacatgatgtcgtcgatgcacgtgccgttcgcgctccggtcgctcagctccaccccgttcgccaaccacttcatcctgctcccgttctggcccgtcgccttcggcttcatgctgctcatgtggtgctgctccaagaccttcgtcgtcagcttctactacctccgcggccacctccaccagacctggtccgtgccccgctacggcttccagtacttcctgccggcggcgaagaagggcatcaaccagcagatcgagctggccatcctgcgggccgacaggatgggcgtcaaggtgctcagcctcgccgcgctcaacaagaacgaggctctgaacggaggcggcaccctgttcgtgaacaagcacccggacctgcgcgtgagggtggtgcacggcaacacgctgacggcggccgtgatcctgaacgagatccccagcaacgtgagggaggtgttcctgaccggcgccacctccaagctcggcagggccatcgcgctctacctctgcaggaagaagatcagagtcctgatgttcacggtgtcgtcggagaggttcgtgaagatccagagggaggcgccgccggagtaccagcagtacctcgtgcaggtgaccaagtaccaggccgcacagaactgcaagacttggatcgtgggcaagtggctgtcgccgcgtgagcagcggtgggcgccgtccgggacgcacttccaccagttcgtggtgccgcccatcatcggcttccggcgggactgcacctacggcaagctggccgccatgaggctgcccaaggacgtgcagggcctcagctcctgcgagtacacgatggagcgcggggtggtgcacgcgtgccacgccggcggcgtggtgcacttcctggaaggctggggccaccacgaggtgggcgccatcgacgtcgaccggatcgacgtcgtctggaaggcggcgctcaagcacgggctggcgccggtgtgatcatatcgcatcgtcgagccgcaccgcgcgcgcggtttgttttgcagcggctacctacctagctgcatatgcttgccaggccggggtccagccgccgcggttctgtgtgcatgcatgcaacagcccagcagaccacgggctaccgtgcgtggctaattcttgtactagtactactcctgctgtatgtaccgtgccgatggggcgatgggttaattaaagtcctctcgactacgctacgacgatgcatggcttctttcgtgccaaatcgctggtttaaatcctcaccagaataagaaattaaacacagaggcttaagaaacaaattatttatatacaaaataatttcttgttcataatctttaaacaagccattaatttttttttccaaacaacgtctggtttggtaaaa

SEQ ID NO: 27896 - DNA, 1858 bp, Zea Mays
cctctcggctgcccaccaccgcagacaagtccagtcctctccctccccttaatctagcgccgccactcacgcccaccacgccgctggtgaacggatccgtccatcccgtacaccgcccaaccgctgttccagtacccgcctcgtcgagttgagctgagtttagggcctgcgggagctgagccggtggcccatgcttcgcgaagggtagggttgtctgtctagctagctgctgcttggtctgatgagctcagttccggcgtcccgcctcggcttccccgcacgcttgctccgtcggctgcccagaacccagcttgcccgctccggcgcttctcttcgcttcttcgggaaagggtggagctttgaggtggtgcgggtgctcagccgaggactccgggcgatgacgcccgcagtggcgcgcgtttgtcgcgacagtcctgggttcggatagcgagttcctcgagcggatttggctgctgctgcatcctgcgtgggaaggggaggcggcggcagcaacagaggaaggggaggggttgctctgaagcggagggggagcgggctgacattgctgctgggagcatggcgagcttctaaggacgctcagctcccgtagcccagccattctcatcgcagaggagcaaagatatatggtcttttgtgctttctcttcgagtccgtgtgctatttgacaatgcaaaatgggcatatccttgtggattctcggaagaaaagcaggtatgtgtttaagatatagataaaacctgagtcatgttctttcaagaaaaaaatattgagtctccaacattgtgattccaaagaagtcattataggaaattttctgtgctaagtagccacctccagttccaaatgagtgttctatctttaggtggagttaagtctgttaatctgtttgttgttatgaatggaagcatgatgatttatatcacttggggctgcaaagagaaaggattcactttctactatacatgtgagtgggctaaaaggtggcttacatgttgcagaaagttcgaaggcagaaaactacttcatggctaagagagcaagtattacagcttggcccaacgtttattaagctcgggcagtgatcctccactagatctgatttatttcctagagaatttgtggacgagcttgctactgaaatgtaaagttaccatgtgctcctgaaatgtaaagttaccatgtgctccaattacttctgtgctaaatgagaggactaagtacaacaacatggagccggatgctgttgatttctttggggaatgtatgaatagtccccgaaatggtcgtactccgcttgcaaatgagatatatgagcaaatggttgcagagaaggaaagagagctagaagaaggagaagcacaaaagtcaccctccaagctcaacaggccacacttgaagaaaaccaaagtttgctgcgccagacccaagaggaagtgaaggggttgcataccaagtttgaagagaccaatgcactgctacgagctgtcctgaaacttcagaaagattgaggtagggatgcataccaagtctgaggatgatgcctttgcttaaggtttttctaccttgctagaacatattttgtggttagaactttgtcagaactacgtgcaatctgtttgaatgcttcgaacctttgtggtggaacctttgtatgtttgaacctctgttgtggaagaactagtgtgctggaattgtgtatgacttgtgatgagaatgttgtgtatgatggcttttctgtgtattatgattctgtgagctatcatgagagcttagtgtgtcgtcactgtatggtcattgtatgtgggtgccatattaaactaaacaaaacaaagctgtc

SEQ ID NO: 27897 - DNA, 1276 bp, Zea Mays
ccactttaaatcttaaagatacaattgataagactgataggtctaaacttctcaagggctcctcagatgagttcatcgatgccaacatccagcttgctctcgttgttgctaggaagctcaaagagctcaaggggactaggtcttgtatagtgtttcctgatcaacctgaaaaacgtagggcatcagagttgttcaagacagctatagacacgattgagggtgtaaccatcagctccctggatgatgtacccactgaccctgtcaacagcttcttcaaatcaataagaaacaccctggattttgacttctcagatgacaatgaaggtagatggaaatctgatgaaccaccatcgttatatatcttcatcaacagcagcacgcgtgaccttgcttctatagagaagaaaagttcgccacatctgttccagcccttctattcaatctcgaactagatacattgcgttctgacctggggcttctcgggttccccccaaaagatctgcactaccggttcctttctcaattcaccccagtattttatatcagacagcgtgactattccaaaacaatcgcagttgctccatacatagtgaattatagtggagctgtattccgccaatacccagccccctggcaggtcatgctgaagcaggctgatggttcctatgcatgtgtcgctgagagcgaagctcggttcactttgggacaggcgaaagaagaactattgagagttattggtttacaagaagaagagggaagctcccttgaatttctcagaagaggatacaagaatgctacctggtgggaagagaacgttgatcaggagacgtcgtctgcctggcgaacttgagatgctatacttgctggatggatgcttttctaacctggaactgggaatggataatttggccaacgagtgtccatgtcttgttgtatggaactaaaaaatctgaaattacagaaagagaagtccatgtacagcgtaataacattgcctgtgatgatcgtattattattattgttgttattattatgcgagtacacagagcttgtgagcactaagaatgtttttttacaatggtgatttgtacatttgttctgtttgtggccttgggcacttcagcttgaatgcgcagttgtaaaaaaaagcattggattggtttgagtattagaaattgttgaagtgtataagtggattgactaccttcttccatcagcttgagcttttgggtcgtccactttaacatggtattaaagccagaggtctcgagttcga

SEQ ID NO: 27898 - DNA, 1350 bp, Zea Mays
cctgccacactcggcgccgcgcctataagtagcgcgcatgcgccggcgcagcactgcacccacggctcgagctcgcagcgacaggcacaggcagcaaggctggtttccttcctcgtcgaacgtctgccgctgctcgcgatggccggacgcggaggaggtagcaagagtagcctgtacgcggcgctgggcgtggccagcgactgctccgacgccgagctgcgcagcgcctaccgcaagctcgccatgaaatggcacccggacaagtgcgccggcgcagggagctccggcggcggcgcggacgccgccaaggccaggttccagaagatccagggagcgtacgccgtcctgtcggaccccaacaagcggatcctgtatgacgtcggggcctacgacggcgaaggcgacgatgacggcgccggggagatcctcggagacattctcgaggccatgagccaggcaggccctgccgccgacaacggcaagggggagagcctggaggacctgcagcggcagttcgaggagctgttcctgaggccgtcgccgtcgtccttctcgccggtgggtatccttcttacgcggctctgcttcctttcggtcgcctcgctagctagctagctgcctaggactcggcgttctcgtcggcgtagcgtagatgctcctggacctggacctgggccacgcctgtcgcctgcttgtagccaggccaggcgacggtgacaggccggccgggtccgtccggccgtcgacctccgcgtcgctttccagcggcgttatttatttacgtcgtgcaaattgcgtgggccacatgatcgcccgccaggcgccagcagggttcatgagacgagtggctcgagatcggcgaggcggggctcttcttgttcgctaacgacgcagctgggaagtcggcttccaagagtaggcctgctgggaggaaatagacaggacactgcggcgaataggtcggtccagctactcctgttccagataagctacgacctacgaggtaccgatacctggccaggagcccaggacagcgacctgcgacggcgacgaggctgccagtgctgcacgctcaagtacatgctccgagttgtagctactactgtagatcggcacggcagtcgccagaatggtaccataaggcggccgtacgcacacacgcatgaacgctgtttttaccatctcaggttcgctgcaaaatttccagcgtgttctctgtaaaatccctgcatgattgctataaagaaattcttcgtgggtactaataaatggagtgctcagtaatggccatcgtatgagaggcatatgctaaacagcaaaaaaaaagttttttttttggcaaatatcctc

SEQ ID NO: 27899 - DNA, 975 bp, Zea Mays
tctcccacgacgtgcaactgcggatgtcgttccctcacaccttccttcagaatggccgagccgagcgcatgattcacaccaccaccaaggcaccaacatgctgcgttgcctccttttctaggcttcgatccgattccctgatccaatatcaatggtagatgatctccattccattggttgcaaagcaatctggatgcttgacccagggatcaagaaggaggagggttactttgtttatgatagtggctcaaaaagcgatgtttggattcaaaaggcagatggcagtccattcgttggggaggtgtggcctggtgattgtgttttccctgactatacatctgaaaaaacacgagcttggtgggctagtttggtaaaggacttcatctctattggtgttgatggaatatggaatgatatgaatgaacctgctgttttcaaaactaccacgaagacaatgcctgaaagcaatattcataggggagatgctgatattggtggtgttcaaaatcattcatactatcacaatgtctacggaatgctaatggcaagatctacttataaaggaatggaaatgggcaatgcagctaaacgaccatttgttcttacacgagctggttttattggaagtcagcgttatgctgcaacatggactggtgataatctttcaaattgggagcatctgcacatgagtctaccaatggttcttcagttgggtctcagtggtcaaccattgtcaggtcctgatattggtggttttgctggaaatgctactccaaaactttttggaagatggatgggtgtgggtgcattgtttccattttcacgtggccatacagaaactggaagcattgaccacgaaccatggtcctttggtaaagaggctagatacgttcataggtagcttgtccttgtgggcttagccttatttctaaaaaaactcggccggggagggaaagaccgccctcccggtattat

SEQ ID NO: 27900 - DNA, 2567 bp, Zea Mays
ccccacgagccctaggcgcgcccacgacggcacgggcccggagatggaggagagcgacgcggcggagggggtggcggtgcagctgatcgatggcgagggcgagttcgcggccgcggcggcggagcgattcatggcagccgcgggagtcgccggatgcgggctctcctacgccgtcgtctccatcatggggccacagagcagcggaaagagtaccttattgaaccaactatttggaaccaattttagggagatggatgcattcaggggaaggagccaaactactaaaggtatctggatagcacgttgtgttggtgttgaaccttgtactgttgtattggatctggagggtactgatggaagagagagaggagaggatgacactgcatttgagaagcaaagttcgttatttgcacttgcaatttcagacatagttctaattaacatgtggtgccatgatattggccgtgaacaagctgccaataaaccacttctaaagactgtatttcaggtcatgatgcgtttgtttagtcctcggaagacaacactactatttgttatacgtgataaaaccaggactccacttgaacatctagaaccagttctaagggaggatattcaaaagatatggaattctgttgccaagccagaggcacacaaagacacccctatcagtgaatttttcaatgtacaagttactgcattgtccagttttgaagaaaaagaggagcagtttagagaacaggttcaacaacttaggcagagattttcaaattcaattgcaccaggaggtcttgcaggtgatagaagaggagtagttcctgcttcaggttttctgtttagttcacaacagatttggaaagttatccgagagaacaaggatcttgatcttcctgctcacaaggtaatggttgctacggttaggtgtgatgaaattgcaaacgagaagtttggatgcataacctcggacacagaatggttagatgtggagagtgctgtccaatctggtccagtacctggttttgggaaaaaacttagcaatatcgtggaagttcacttgcaagagtatgacaaagaagctttctattttgatgaagctgttaggaaaggaaaacgacaacatttggagtccagaatactgaatcttgtccaacctgcattccagaaaatgttgactcatctgcgcatgaaggctttagaaaaatttaaagctggtcttaattcatctttggagagtggaaaagaattcgcgatatctgcaagagacaatactgaatgctctctcaaagactttgaacaaggatgtgctgatgctataatcaagcaggcgaactgggactgctctaaaatactagagaaagtacggcgtgatattgaagatcatgcactttcaattcgtgaaagaaagctatcagaattgacaacccatgctaaggagaaactaagaaaagcactagctgaacctgtggagtctctatttgatgctgcagaccaaacaacctggacatcaataagaaacatttacaaacgcgagacagaggccatcctaccggagtttctgaaaaccatttgtggctttgaaatggaatatgctcaagcagaagaaatggtatccaaattaagggattatgcccggagtgttgtgcaaagtaaagctaaagaggaatctagcaaagttcacaacagtgtttagccatgacaaggattcaattccaagggtctggacaggaaaggaagatgttcatgcgatagcaaaggaagctcgagctgcggctctcaaacttctgtctgtaatggcggccattcgctgggatgatgagccagataggattgaaagcatcatcacttcaacacttctggaaggctctgttgtatcaaagattgcaagtgctgcttctgctgacccacttgcttctaccacttgggaacagattcctccagagcatacaatgattactccttctcagtgcaagttactgtggaagcaattcaaatcagaaactgagttcaccattacacaagcagtatccacacagcaagctcacaggcgtggtaatagtaagctgcctcctccttgggcaattgtggccattgctattcttggtttcaatgagatcatgacgcttcttaggaatcccatttatgtgtttttgctatttgtgggctacttgatggtcaaagctttggcagtacaactagatgtcagcagagaattccaaaatggagtggttcctgggataatctctgtgtcagcgaagctcctgccgacgatacagaacctggtgaacaaagtggcagccgagcagcaggatgagcaccggcaccctcaccagcagcaccctcaggtagcagaacccctacagccacagatgcagccgccgccgctgctcctgagcccgagaagccccatgagcgagctgcggaggctgcacatgccgtcaagcccgcgcaaggtagcgtcttcctcctcgtcgccgtcgtcgtcctcctcgtctgccgtatcgtcccctaggcacgttggcgaggatcagaagccaagaccaggggcagctgcgcctgagaaccagtcc

SEQ ID NO: 27901 - DNA, 3154 bp, Zea Mays
cgccccatcacctctgtctcgagccgtccctctcaatcccccgcaccctctctccctgagcgctcgcgagcctgcggccaccaccgccgtctccacgccgcgcagatccgcccagccggttcggccccactcgagaatacgtgtacggacgcaggccccgcccacctcgccgaggactcgctcctgtgtcgtgcgcgccagcactaccggtggccgtgcgcggctgggccgtgccgattcgaccgaatccggtggaattcaccgtgccgtggtgtcaaatcgagaaaacccactgcattctggtgccagtgctactccctttggctctgaatcgtcatttttgcccatttctgatgaatgtgttcatttaaagctgtctcgtttcccagaacatgaattggaatttgggttgtcacttttcgcaaatgatggtagtgagagcccaagggatgccaataatgagcaagtcgatgatgcagaaaactccggtggaagaaattctgtggatgttggaataagaatggatctctccgatgatttcctgcacatgattttctctttcttggaccagaaggatttatgcagagcaggtgtgacctgtaaacagtggcgatctgctagtgtgcatgatgatttttggaagtgtttgaaatttgagaacactagcgtatcactggagaactttgttaatatttgccgtcattaccagagtgtcacagaactcaatttgcatggtgtcataaatgcagaaacactagttctggaagcaataatgtttttaaggcatctgaagacattaacaatgggcaagggacaactgggagaatcattttttcaagctttggctgagtgcccattattgactgctttaacagtaaacgatgcttctcttgggagtggcattcaagaagtaactgttaatcatgatggactgcgtgagcttcatattttgaagtgccgtgcacttagaatatctgtcagatgttcccaacttcaaatactgtctttgaggcgaacaggcatggctcatgtatcactgaactgtcctcagttgcttgagttggacttccaatcctgccataagctttctgacaatgcgattcgccaagctgctacagcttgcccattgttggcaaaactagacatgtcatcttgttcttgtgttactgatgagacattgcgtgacatagctagctcatgtccgagtctttctgttcttgatgcatcaaactgccccaacatttcatttgagtccgtgaggcttccaatgttaatagacttgagacttctaagttgtgaaggaatcacatctgcttcgatggctgcaatagcttatagccgtctgcttgaggcactacagcttgataattgcagcctgttgacatcagtgtctttggacttaccacatcttaagaatataagtctcgtgcacttacgcaaatttgctgatttgaatttgcgaagccctgtgctttcttacatcaaagtttccagatgttcggcactccatcgagttagcataacatcgactacacttcagaaattggttcttcaaaaacaagagagcttatccagtttgtcattgcaatgccacaacttgattgatgtggatcttactgagtgcgagtcattaacaaatgcggtttgtgaagtatttagtgatggaggtggttgccctatgctaagatcattgatccttgacaattgcgagaatttgagcattgtagaactgaacagcagttctttgtcctgcctctctcttgctggttgccgctcgatgacattgttaagactctcatgcccaaatctgcaacatgtcaatcttgatggctgtgatcaccttcaaagtgcagcattctgtccagtgggtctcgaatccctaaatctgggaatttgtccaaaactgagtgttcttcacattgaggctccaaatatgtctatattggagctgaagggttgtggtgtgctttccaaggcttccatcaattgccctcgcttgacttcgttggatgcctctttctgcaggcagcttgtggatgattctctgacttgtatgtcagaggcatgtcctatgattgaacatcttattctgtcatcatgcctatccattggcatcgatggattgtcctcattgcattgccttcataagctgaccttgcttgacctgtcttatacctttttggacaacttgaagcctgttttcaacagttgtctgcagttgaaggtgttaaaactttcagcttgcaagtacctcagtgactcatcattagatgccctctacagagagggtgctcttccattgcttgttgagctagatctgtcctactcgtccattggacagaatgcgatagaagatcttcttgcttgttgtactaatttggttaatgtgaacttgaatggatgtacaaactttcaagaattggtgtgtgggtcagatgatagcagttgtgtcgatatgccagttgacttttgtgcacctagttcagcaatcaagagtgaagagatcagaagtggatttgacatgtcccaatcttttaacgttaaacttgagctcactggaggtgctgaaagcttgattgccccaagattgtccaatctccagcttctgcggcaggaggccgctccccgctcacttaactggactccggttctgcaagagtggaaccccgacgccgctgggagctcgcagggtgtggaaagggccttgggcgggcaatccatctcttctcttgggttccatgacatgtttggtggtatcctagacgatccccaagcgggtggcagtatggaggttgggtggggcaagctgaacgaagaggatgaagacagagacctgcagaatacaaacatcaagtcaggacaagctctctccttagagctcttgtacatagtacccaagcattgccggtatattgcaaggcatggtatattaggagccaggggcaatgatatcttatttttccagtccattcatgttgctgaataagtatttttgtgaatctgttttgttgccggaggtaacaaaatatctgttcatgtttttttttctgtattccttggaagtgtaccgatggagctatatgctggtttatatgcatcaataatcttgtttggatatagaattttggaaccgctttgctaatgtcatctgagg

SEQ ID NO: 27902 - DNA, 1562 bp, Zea Mays
cacgcagcacagaactgcccacgcagcacaccccactgcgccactcgcgtcgcacggatctctccttccctccaggctccagctccaaagcctcgtcgtcttcttcgccccgccacccgtcctgcacactcacaactagacatcgtaccacccaggttttgctttatgctggttcatttgtctacggacaatggactagttgctgcactgtttctgtgattcaccatgggaagcagtggagcagatacaccgtctaaggagcagcagccacctgctacctcaggtgctgcaataccacctgtttatccagattggtctagcttccaggcatatcccccaatcccaccacatggattcttcccctcacctgtggcatcaagtccacagggtcatcctttcatgtggggagctcaagctatgattccaccttatggaacaccgccaccatatgtcatgtacccccctggagtatatgcccacccatctatgcccccgggtgcacatccatttactccttatgccattacttctccaaatggcaatgctgatgctactggaactactgttgcagctggtaatactgatggcaagccctctgaaggcaaagataaaagtccaacaaagcgatccaaaggaagtttgggcagcttgaacatgcttactggaaagaatcccagtgaacatggtaagtcctcaggtgcatcgggtaatggagtcacttctcaaagtggcgaaagtggcagtgacagttcaagcgaagggagtgaaggaaattctcacaatgattcacatcacaaggaaagtggacaggaacacgatggggatgttcgaagttcccggaatggtgtatcacgtttgcaatctgagggaaaattgaaccaagctatggcaatcttgcccataccatcaagtggcccagcaactgatccaactacaaacctaaatattgggatggactattgggccaacacagcaagctctgctcctgcaattcatggcaaagcgacgtcaacaacagttccaggggctgtggtcccagcagagcagtggacacaggatgaacatgaactcaaaaagcaaagaagaaagcagtccaatagggagtctgcacgtagatctaggttacgtaaacaggctgaatgtgaggaattggctcaacgtgctgatgttttaaagcaggaaaatgcttcacttagagatgaagtaaaccgtatcagaaaagagtacgaggaacttctatcaaggaataactcactaaaggaaaaacttgaaggcaaacaacacaaaactgatgaggcaggacttaacaacaagctgcaacattctggtgatgacagccagaaaaaaggaaactaatgctatcatgcaatgcttgcctacattggtcctaactagattattgggaggaaaatggttctggactatgtcttagatgggaagcatagttcattagtatgtctgccttacaggttcttaagcagggatcgtggaagaacctgtgttgggaggtggtagagaagatgtgccaatgattggtttttggtcaatgtcttctctggtgc

SEQ ID NO: 27903 - DNA, 3795 bp, Zea Mays
ttctacgcaactgaactgcgcagctacactctgaagcaactcaatgttcagttcagggaatgatgtagcgatgcacaagagagatgattgttggcccgaccaaggtgctattcatggacgagatatcaactgggctggacagctccacgacattccaaatcgtcaaatgtctccagcagattgtccacttgggcgaggccaccatcctcatgtccctcctccagcctgcccccgagaccttcgacctattcgatgacatcatcctactgtcagaaggccagattgtttaccagggaccccgcgaacacgtccttgagttcttcgaatcttgcggattcagctgccccgagcgcaagggtactgcagactttcttcaggaggtaacatcaaggaaggatcaggagcagtactgggctgacaagcagaggccttacagatacatttcggtgccagaatttgcacagcggtttcaacggttccatgtcgggctgcagcttgagaaccacctctcacttccgtttgacaagagccgtagccatcaggctgcccttgtattctcaaagcattctgtgtcaacaacagaactcctcaaggcatcttttgacaaggagtggctcctcatcaagcgcaattcattcgtgtacatcttcaagaccttacagcttatcattgtagccctcgttgcttcaacggtgtttctgagaactcacatgcatacgaggaatctagatgatggctttgtctacattggagcactgctctttactctgattgtgaacatgttcaatggttttgctgagctctccttggccataacaaggttgccggtgttcttcaagcaccgggacctgctcttctatcctgcttgggtcttcacactaccgaacgtcattcttaggatcccattctccattattgaatctatagtctgggttcttgtcacatattataccatagggttttctccagaggctgacaggtttttcaagcacttgctgctcgtgttcttgatccagcagatggcaggtgggcttttcagagcaatcgctggactttgcaggtccatgatcattgctcacactggtggagcactatctcttcttctcttctttgttcttggaggctttctcctgccaaaagctttcatccctaaatggtggatttggggatactggatttcacctttaatgtatggatacaatgctctagcagtcaatgaattctattctcctcggtggatgaataagtttgtactggatcaaaatggtgttccaaaaagactggggatagctatgcttgaaggtgccaacatctttgttgacaaaaattggtactggattggagcagcagggctcttgggtttcaccatctttttcaatgttcttttcacattgtcactcatgtacctgaaccctcttggcaagccacaagctattatatcagaagaaactgcaaaagaagcggaagggaatgggcatgcaaaagggacaataagaaatggaagcacgaaatcgaaggacggtagccatgataaggaaatgaaggagatgagattgaatgcgcgtttgagcagcagttcatctaatggggtttcacgagtcatgtccattggcagcaatgaagccgctctgtcaagaggcatggttcttccattcaaccctcttgccatgtcttttgataatgtgaattactatgtcgacatgcctgcggaaatgaaacagcaaggagtgcaggatgaccgactccaattgttgcgtgaggttacgggatcattcaggcctggagtgctgacagcacttatgggtgtcagtggagctggaaagactactcttatggatgttttagctggaagaaagactgggggttatattgaaggagatatcagaattgcaggctatcccaagaaccaagcaacatttgcaaggatttctggatactgcgagcaaaatgatatccattctcctcaggtcacagttcgggagtctttgatatactctgcctttttgcgccttcctgaaaagattggagataaagaaataactgatgatataaagattcaatttgtggatgaagttatggaactagtggaactcaacaatctgagcgacgctatagttgggctaccaggaatcacagggctttcaacagagcaaagaaaaaggttgacaatagccgtggagcttgttgccaatccatcaatcatatttatggatgaaccaacatcaggacttgatgcaagagctgcggcaattgtcatgagaaccgtgcgaaacacagttgacaccggacggacagttgtttgcacaatccatcagccaagcattgacatctttgaggcttttgatgagttgctattgttaaaaagaggaggccaggtgatctactctgggaaattgggtcgcaactcccagaaaatggttgagtattttgaggcaattcctggagtgcctaaaattaaagataagtacaatcctgcaacgtggatgctggaggtcagttcagttgcagctgaagtgcgactaaagatggattttgctgagtactataaaacatcagatctcaacatgcaaaacaaggtactggtgaaccagctgagtcaaccagaaccaggaacatcagatctttatttccctacagagtactcacaatccacagtaggacagttcaaagcctgcctctggaagcaatggctgacctattggcgcagcccggattacaaccttgttagattttccttcactttgttagttgccttgctgctcggctccattttctggaggataggcaccaacatgggagattcaaccactctcaggatggttattggatcaatgtacactgctgtgatgtttgtcggcatcaacaattgttcaactgtgcagccaattgtttcaattgagaggacggtcttctacagagagagggctgctgggatgtactctgcaatgccatatgccattgctcaggttgtcatagagataccatatgtgtttgtccaaacaacgtattacaccctcatcgtatacgccatgatgagtttccaatggacagctgccaagttcttctggttcttcttcatttcctacttctccttcctctacttcacctactatggcatgatgactgtctcaatctccccaaaccatgaggttgcatccatcttcgccgcagctttctattctctgttcaacctcttctcaggctttttcattccaagaccgagaattcctagatggtggatctggtactactggatttgcccattggcatggacagtgtatgggctcatcgtgacacaatacggagacctgcaagaccccatcacagtccctggcgaaagcaaccagacgattagctactatataacacatcattttggataccatagggattttatgccagtcgttgcgccagttctcgtgctctttgcagtattcttcgctttcatgtacgcagtctgcatcaagaagttgaactttcagcaacgataggaacaagatatggcagaaaagctcttgagagtattttttctttttttggaaaatacttccttttctcctttcatttttgagtccctttaatatattgcaatgtatatagggtgtagcttcggtattccacacatcgtcaaatgtggcgaggtcttatacagatttctagccgtttaactgtggaacattgtaatttgtaagagcacatctatgagaaagttttgttcatgcccaattcatttcacatggaatctttcgtgaaaccaactattcaattggaaacgagtataaggttatgtaaaag

SEQ ID NO: 27904 - DNA, 754 bp, Zea Mays
acaaactacaaataatagtattggccagagagggtggaacctgaagctggacctgtggcccctgtggtacctcgtcatccaaaatcatatatggagatcatggaaatgatacaaaggggtgagcggccagacgatatacaggatattaacgatgaccctccaaatcctgatcaaccaatctcagaacctcgtatggcaccgaaaccaaagccatgggaaaagcaaggtcaagggagtttggcctgtgatttgaaatcgctgccaagggaatccgacgtgctgaggtcagaagttcagcacgacgacggcaccaaccaggttacggagtccgccgatggcgccaaccaagcggactcattgctgcaggcaggcgtagctgctggatctgaatctcctggggttccagatgacgccgcttcttcgcttgagtaaccaccgcgaaaataaatgaatgacgccgtaatcagacgcgaaaacaaacgacctcattaccacaacactgttctgatatttttgggtcctgagagagccacttgagttcacaataaatgtagtacccatcactggatgatcttttttagttgctggaaccatatgatatgagcattgttggcacttgctctcagcagcaaggaagccaacaagggtgaacggtggtgacaacagggttacgcgcacgggggcaatagctctgttgatctagcctctcacgggcactgtgcgggggtatttataggtatctgagtgcccagcg

SEQ ID NO: 27905 - DNA, 660 bp, Zea Mays
atcagaaaggttatggctaaaaaaggaactgatgctgaaaagcatatgtatcatacttgtatgctgtagaacagcgatagaataaggcgttgtgcctcaattgtgtctccgtccccagacaaattcaggacaccttggccacggactccaagattagcattagagtgtatcacagatgattcctggaaacatatgagaaatacttatgcatactgagacaagcagataaaaacagtaattaatattggaccaacaagaaaccttcagaactatcaggttgctagcatctaacaaagaagttgcaactatcgaatctccaccgccatcaatttccattctggagttccacattaggagcatctttacagacattctcaaagcaccgaacacctgggggagaaatcaagttaaagcgcaataatttgtacatataaagcagatacaaagtaggtgaataattgaatatcacaagaaacaaacagggaaaaattaccttaattattgagtcactcataagaagctcctcagccatcagttcaaactccgagtatggataaccagtgagaccaaaagttagaatagcaccagaaagaaggctaagttgcccttggacctgaaaattataaataagaagtcccatacttcaaattttagaaagaa

SEQ ID NO: 27906 - DNA, 280 bp, Zea Mays
gccgggtcaatgttacatcaaaggtgtgcagagaatgggaggccacggcatgccaagtaaaccaggaggatgttaggcttgtacttctccggattggggttgttcttggcaaggacggcggtgctctagcaaagatgatacccctttttatgatgtttgctggtggtcctctggggacgggacgccaatggttttcttggattcatctggatgacctagtcaacctcatctatgaatctctaacgaaccctacatacaaaggtgaactcacacattctct

SEQ ID NO: 27907 - DNA, 2650 bp, Zea Mays
ttccgaggtccgagtagcagagtctggccgccttgtcgcgacgcgacgcgcgatcccatcccttcccatccagcgcggctccaatcctgtcgcggccattaaaagcttccctcccctgcctctctgctccgctcgtctcttctggaaccgtccctcgctcgtcatctttccgccttcgctacgcaattcctgtccacgctgcgggccagttgtgacgaccgcgaagctcgtcagagaaagaagagaggccggcaggcgggcggcgatcggagatggcgccagagaagccccggaaggagcaggaggaggaggaggatgagttgatgctggaggatggaggcatcgaggagagcccgcgccgcagcttcgaggactgcggtgattccgacgaggaggacgatgacaacgatgaggagcgggacggcgacggcgtcggttcgccgcgctccttccagtcccacaagtggccgcagagctacagggaaacaactgatacttacacaatcgctgcatcaccgagctttggttacttgggcccttctacaagcaaatactcactcctcgatcttggtcgtagcggtctgggttctgacctgaagttgcctctattgtcggacaaggctgacggaaagcaagattctgtcaaaaccctgccgaaaacccttggttcaataagagatgagagggtctcatttcaattgcaacacacgggagaactctacattactcaagggtgcaatgtgacgcaaacagtcttcaatgggattaatgtacttgcaggcgttggccttctttccaccccgtttacaattcatgaagctggatggactggccttgcagttctagtatgttttgcgattgtttgctgttatactgggattcttctgaaacattgttttgagagcaaagatggtatctcaagttatccagacatcggagaggctgcatttggaagaattggccgtctgttgatatctgtaagttttggtgtctttagatgaaaggggtagcttaggagttaggactatctttcaatagtatgtagacatgtctgtgcacttatcatactcacatgcctccatctaaagtagtctgttgatctgcacctaaccttcacttccgtatctgaatgtttgcggtttggcaaaaatagacacctactcaaactctccactctccttttctcttttttgaaatgctaacacctgttcattatgcaaatcacatgaatgaatctaagattttacaatcaataattggcacctcaaggttagaaaaattcgcatccctctttgtttttgtttcatgcaagagatcttttctaaccttaattatgataagtgtaggaaagaaaaactaactgatggttatttttcgtgcagattattttatataccgagctatatacatattgtgtggaattcattattttggagggtgataacctcacaacaatttttcctaaagctggaattgattggtttggcattcatgttgatgggaagcattttttcggagtgttaactgctattttagtgttgccaacagtatggctgcgagatcttcgagtgctctcttacctttcagcgggtggtgtgattgcaactcttctcgtattcctgtccgttggtttagtcggtgctaccgatggtataggcttccattcaactgggaaggtagtaaactggagtggcatgccctttgccattggtatttatggattttgctactctgggcattcagtatttccaaatatctaccagtcaatgtccgatcgctctaagttccctaaggcactgttcatatgttttgcaatttgtacagctatgtatggatcttttgctgtcattggctttctcatgtttggagagaacacattatcccaaatcactttaaaccttccaaagcattcgattgcctcaaaagttgcactatggaccacggtgatcaaccctttcaccaaatatgccttgctgttaaacccactagctcgaagtttagaagagttgcgtcctgaaggttttttgaacgaaacatcatgctctattatactgaggactgcccttgttgcgtcaactgtatgcattgcctttcttctgccgttctttggtcttgtgatggctctcattggatctcttcttagtatacttgtggcggtcataatgccagccctgtgcttcctgaagatcgcacaaaacaaagcaacctgtccacaggtgatcgcgagcgtcggtatcgtaatactgggcgtcgtcagcgccgcgctggggacctactcgtccgtgaaaaagatcgcagaaaactactaggctcttgggacagtttctctccgcagaggctactaccacacggttccacgtacgtccggccggagctggggaatggtcagggtttacgtacacgatctcaaagttttgctagaactaccgaaattccctgtagattattactgttatgattcggaccacaatagtctacttatacaaacaaaaaaaaagaactgcatcatcacgtcacttggaataatgtaatcatgccctcctttttttagccgaggtccctaccatctcgctgtactgtagcaggttgctgtgctggcgactgttccctatacaataaggctctgctttgtgcaattgccaattgaggt

SEQ ID NO: 27908 - DNA, 1746 bp, Zea Mays
acgcgagggcgagagcgaggcgccgaggcggcgcacacacagacacggcacgcgcgacgcacgcggcctcacgccgtcacctgctccactccgctccgctccgctgccgtccagccggtccaggtccatttagcgaggcggaaagggaggggggcgcgagcccagcggaagccccgaccccgaccccgaccgcgacccggaagaggaggaggaggaggaggaggaggaggaggagagagagagagagagagagggagagggagggacagacggggcgcggcgaggaggccggcgccggcggcccgcgctcgcggcgccggcgatgggggaggtggccgcgctgcgccagctcgtcggccaggttcaggagctctgggacctctacggcgccaacgcccaccccctgcccaggtggtatttacttgactttgaacatggttcaatcatggatgattattgtggaggaaggtctggatacaactcagaattactgaagatcatggaagctaaccaatctccccctcgcaagcgaccgcggagagatcgaaaccgtgaaaaggcaccctcctcaaacaagactgaagtaatgcaacaagagatctggagagatttccctgaagatctttttgaaactgtcattgcaaggcttccagttgctgcaatttttcgattccgcactgtctgccgaaagtggtcttctcttttgggctcagacagtttctctcatcagtactctgaagctccacgtgggctgccatggttctatacaatcacccatgagaacgcgaacaacaatgttgcaatgtatgatccttcgctgaagaaatggcaccacccatccgttcctctcactcctacaaagatagttattccagtggcatctgtgggtggccttgtatgtttattggatctgagccacaagaatttctacatttgcaaccctcttatgcaatcactcaaggagatcccaccaagatcagtccagggatggtcaagagtcgctgtagggatggtgttgaatggaagaagttctagtgatggctacaaagttatgtggtttggaaatgatgggacttttgaagtctatgactctacaaagaacatgtggtcttgccctggaacttttcctccaagcatcaaacttccacttgctctaaatttcaggtcacagcctgtggcggttggcagcacggtatacttcatgtgtgcagagccagatggtgttttgtcatatgatgtaagcactgggatttggaggcaatttgccatcccactgccaccgcatctgaccgaccacacacttgccgagttccagggaagggttatgctggtgggtctgctgtgcaaaaatgcagcgacctgtgtctgcatttgggagttgcagaagatgactctcctctggaaggaggtggacagaatgccaaatatctggtgcttagagttctacggtaagcacatgaagatgacatgcctgggcaacagtggtttgctcatgctctccttgaaggcgaagcgtatgaaccgccttgttacatacaaccttctgaaaagggagtggcaaaaggttcctgattgcgtgctaccatacagccgcaaaaagcaatggatagcgtgtggcacagcatttgatccggtcccctgcgccttggcctgacatggaatttaccttctttgcccgagtaccataatactatagtgaattcgtatcattggcctatatttttagatctttctaatcttgttatt

SEQ ID NO: 27909 - DNA, 1300 bp, Zea Mays
ggacacacgcacacacggaagaagccactagctctccgcagtccgctctcgcctctcggccttctccttgtgccgccgaacaccctcacaagagtcggcctctcgatttctcagtccagcctcagcagtccccttccctccctccatcaggtgttgcctcccgcagatccaaatcggaattcggtccttcgtccccaaaccaccaatccggtaaatatatatgcgctccctcactccctccccccagagtttcttgcgccgttctctctcgcgcaaattattatgccgggaaagattatattcttcccctttagctttgagcccgaaaggccgaagctttcgcgttcttccccacagatatctggagccgtagcttctgtttggtatggccgtgggttgaaataaatagtagtgtgcgggacgcccaccaattggcacgctgcgctttccatccctgcagctgcaagatgccttctttttagatctgtgctgccgtgccttcctcttcatggttgcattctttgggtttgctcacagcgcacacaaagccattttactgctgggaatggtggctggcactattagcgtctccggctcttgagtgatctccaagggaagtgaagtgatgggggagtgcgaggacggcaaggagtacaggtgctgggaggagctgctgccggacgcgctgggcctcatcttccgcaacctgccgctgcaggaggtgctcaccgtcctgccgcgggtgtgcaagtcctgggggcgggtggtggccggcccctactgctggcaggagatcgacatcgaggagtggagccagcagcagggcaagccggagcagatcgcccgcatggtcgagctactcgtgggccgcagcgccggctcgtgccgccggatcagcgtctccggcctgccctgcgatccgcgcttctccttcatcggagacaagtaattctgaaacctgagcgatgcttcttgctgtttttgatcgattcctgtggcaagtgaatttttttctgcaattttttttttttgcgtggagtgttagattagaattatacgctcattctaagcctcgccgtcaggtttaagccgtgatgggggtgtttgcttgcagatctgctgagaacgtgagtgtctgttcagaatttctgacgtgcaaatccaggtccatttgtttgtctatgctggcttggagaccattctgatttttctgattagcagggctagaagtgggcctagttaaactttgatgagatttggtctggatctttggagcaaataaaaacctgctatcgcagag

SEQ ID NO: 27910 - DNA, 808 bp, Zea Mays
gaagaaatcagtgagacagtgacaaacatgccatttttgagtaaaatgtgaatagattactgaagttatacaagaacgagaagtacatcctcttcttcgagcagtttggatcaagggagccgacatttctagttactttcaaggaatcagcaacaagtatgtcagtcctaaggagcctgtggcaagcacattggcttcacaagaatcagctaaggcaggacgaggttttcccatggttagaagaaagcatagtcgcattggagaatggattcactgacttcctcgagcaattggggagtgctggctgggaccaggacctgatcattttgaaagtcccaaaagagcccgtcttggtgttggaacatctagaagaccaagaggtgtaagatgccacggctggtctgttgctaacctagaggacaatgtagagtcttcttttctattgcgtgatcatgacctgctgaatcaattgcaactgagcatcgcgaaggagccgagttcccatgtggcagatgcttagtgatctaacaagaatagaaactgtctggcatgtgacatgatgtttatgctttaaggagtgtttggtttatagggattaatttttagtcccttcattttatatgattttagtctctaaattatcaaatacgtagtttctgtatttcataatttagaaactaaaatagaataaaatagaatgactaaaaatagaaaccaaacactcacttagtctttacactcaatattatgattataatgcatcacctgctgtcaattgagttgatgcccaaagggcaaaggcactcgc

SEQ ID NO: 27911 - DNA, 2291 bp, Zea Mays
tttgaggttcttagccaggaatcaacagctggattagaatcaaagagatgcatgtcacgaactgatctcaaacttgttggatcatttgctgatatgattcttattcctgatactagggttcctgataaaagaagaacttctgcactttttattttgacaaatcctgggcagctgaatttttatgatggtggctctctattttctgtgcaaaactcaaaagagggaaatcctcttcctgaagcacagaaatttccagtcgcaattcctacccttgatcccaacataacggtcactggtctttattcgctaaccgaaagtgaatttccaaatatttcagtgaaggtgcattatgctcaaatttggatattttactctatctagacatcatcattacttatgtaagaccatatcgctgtggatttgctgtagaaatttgatgctacgaaaaatgttgggcatttcatatcagagaacatgaaatggcctttgactggtggggttccaaatgagttgtcactgaacgaagatcatgctgttgaaagaatataaattgaaggctaccaagatggttctctgagaatatgggatgcaacatttcctgttctaatgccaaattttttcttggttggaaatgtcagtctcatttgtatatttgtagtattacttgcattattcctcattggtttataactaacggattaaccccaatcaagctgtaactattctttactataggttgctgatgttaatttggatggagctaatgcttttgtatcatctctagccttttgttcattaagcatgactttggctgttgggacaacaagtggtctagttagatcttgttggtcttacgaattggtcgaaagggtggtcatttgtatcattttagaatatgttttcataccattttttgtaggtgcacatctataaactccgagaacacactgagggttcaagcttccattttgtgagtgtgaatttaagcaagaaggctctttcaaatggcaagcccactgttgttgagttttatgcaaactggtgtggggtctgcagggaactagcttcagatatctacaaagctgaacaacaatacaaagactgtggaattgtggggtccgtccatgctgcctgctagaaatggaaaatgtgttagtagtagaaacaagtgttgtgggcctttgatcttctggaagtcatgtggttgcagttctaccgatacttgttctacttgggcaaaattaggacaattcagttggagtacactgatgctaaagaaagcctcctgcaagctgctcgtaaggcaccaacaacagcccatggttttcggatccagtgcaacaaatgggttatcatagtgaggctgctgcttggttggaacagaacaagacattgtgattttctttaactgttttgtaaggaattagtgaagcaggctgaattatggaatactattttgatgaacacagtgaagcaggctaagttgttgcgtggctctggttctggtctcagggagttacttgggaggggttggtctctccgactccactgttgctttttaggcactgctttttttcaagcacacattgctatagctgaaacctccataatttcttcaccagttttctttaatctcttgtttcaattataggtgtacacataaactgatttttcatttgcttctattactaaaacttaatttcacaatcagccttgtagcactttgagattctgttgtttatttcttgtattagatattcttctgagtactggaataaggttaatttatcatttttcatcagtaacttcctaagaggctgcttcttacatacaaacctgaagattgagaggaaattcttgagcctgctcctcttgaagaggaaatagcaccagttgaagatcatgttcttgtaccacctgttaatgaagttgtttcacctcctcccaagactgaggtgtcctgatactggtgacttactggttggaaaaataacacattaatattatggtctaaatcttatgtgcttgattctaaaatctgaagttgtgttcctggtgtggaaataaagttgttgggctatttgtgtggggtgggggttggcatgttcggagctgttcctggttggaaccagtgattttgctactcattttgacggataatttgagttcgaagtcgtcgaattttgaaacaagggagtgggtttacatgtaatgttggcaaacggggtctgaattattaataaagccagactgtttcgctgatattttcagttccaatctctacttctaac

SEQ ID NO: 27912 - DNA, 4467 bp, Zea Mays
acgcccccgagcccggaaaaccgaactgaagcgtccagtctccaagggcgcgaagccgcgcgcgtgcctgcctggcgctggcggacaccctcccgttcaccacttcccattccactccaacctcctcctcgggagagatccgctccctgcctcccctgcggcctcctctttctccgcgcaaactcgccgtggcagagtaatctcgcgccggcccctcgctcatatcggggggaaagaaaggttcttgggatgcccggggccggtgtgaagccgccggcgccgccagtcgaggccgcgacggggctaccgccgcgcaggttgacaccttcgagagtctccgccaagcggtcctggccgcccgggtgcggtcggttccctgcgcctctgcccgcgccggcctctccggccgcggcaggtcctgaggtgaatggcgttgatggcgccttcaccatcgtcggcggcagggccgacgacgaggccgcccccgctgtcatttcgccttcggctcagaacggatgcccggataaggtggaggaggccgtcgccgccgccacagtttcgcctctgcccgagaacggcgccccgcctcggccgcaggggtcggataaggtggaggaggccgccgccacagtttcgcctctgcctgagaacggcgccccgcctcggcagcagggttcggataaggtggaggaggccgtcgccgccgccacagtttcgcctctgcctcagaatggcgccccgcctcggcagcaggggtcggataaggtggaagaggtggctgatcctgccgccgtttcacctgtggctcagagttgcggcctgcctcaccaagaggatgataaggtggacgatctctcagctgttttgcctgcagcgcgcagcagcgccctcccacatgccctgcctcagtcagggccggagagggctaggcaggatggagacggtggggagaacggagaggtgcaattggtgggcggtgcagtcaagctgtcatcggatggtcagcaaggggacagggtggtgcaggtggcagggccaacgttagaagtactggggagctgtaccactgttggtgctagttctatgcagaacggtggcgagggggatggcttgttggtggcagcagagaagggctgtggtggcagcagcgatatggggcaggaggttgctgctaatgatttcacagagattgaaaacaaaacaggcactggtgagttacagggaaaggaaaatggaattgcaggaagcagaacaaaacggtggtcgtcggaatcgtctctgaatccgctgcctaagaggagggcagtctcagccgtacgcaaatttccacctggctgtgggaggactattgttaccaccgcagacagtggtgttttggaggtctcacctatacgctcatttgctcctagttttgggatgtctgctgttaataccacaggcagtggagatagggagtggttgccttcagaagccacccctgtcaacaatggtgatgccttggtggcaattccggttttagttttaggagaatcggcttttccaacttcagcaatagaggcatccaataagaaagtggaaagcaagaaaatagtggatgaaggacatagcaaggctcacaatagggtccaagttcgagatgattttgccggtaccaaacaagacggtgaccagcgaaatgttgtttcaaaagctacacagaggaatgtttctgatgagaagatgaatgggaaattctcggcacataaaggggagcaggtagcacaagaaatggtggatcataagatgaaaaatgaacttgaaagtagcttgcaaagaagtaatcttaggacacctttgagcaatcccattgatgtaaaggtaaagaggttggatagtggcaagatgaatgctggattgcttggtaatgcaaggtcctctgcaggtgggaagatgcaaagtaagactctgagtgctaaaaaggaagtgtcctcaaatatgaacacaaagcaaaataagtttgctcataagttgaagagtgatgacacaagcaagggtaatttgcatttgtccgctagggagtccaagcttggaacacatgttgcaatcaatcaaattgaagagcctaaccaaataattgtacaagcattgatggctcctgataattgcccttggacacgaggaagaaagtcatttgctagtgcttccaagtctcttgttcctaggaacaagcttaagggaaaggatggtagtgcttccaagtctcttgttcgtatgaacaagataaaggaaaaggacaccactcgaaaagatatactagcaagaaaagtgacctctaatgaatcgatcaatgatgagacaatggatgataatgagacacgaggaagagaacctattgatagtacttccaagtggcttgttcctgtgaacaagctagatgctactccaaatgatataccagtagggaaagtggtatcttgtgactcgagcaatgatgaggcaatggatgacaatgatggcattatcttggaagatgatgacaactctagggcgctagttgtgtatggacaaaaacaagaaatgtgtctcacggttcttccggttgttccttccgggtcacaccacaagcaatctcgggaccatgatatagatgctcgaagcaaagttaggaagttgctccagttattccaggcgacataccgaaagcttacacaagttgaggaacaaggtaaacgcaaagttggaaggattgacattgaagcagctaaggcactaaagaacgaccctatttataaaaagcttggggctgttgtgggaaattttcccggtgtcgaagttggcgatgaatttcattttagagttgagctgtccataattggtctccatggcccacttcaagcaggtattgccacttctaaggtgaatggtatcaatgttgctataagtatcgttgcctctggtggctatcctgatgaattatcaagctcagatgaactaatatacactggttccggagggaaggctggtgggaataaagaaggagatgatcaaaagcttgagcggggtaatcttgccttgaagaattgcattgaaaccaagaccccggttcgtgtgattcatgggttcaaaggccaaaatagaagtgaaattggtcattctaaaggcaagcaaacttcaatatttatatatgatggattgtacgaagtgttggaatgttggcaagaaggcccaaaaggcgagagggtcttcaagtacaagttacagaggatcgcagggcaacctgaattagccctacatgcagttaaggcaacgaggaagtccaaagttcgtgaaggtctttgtttgcctgatatatctcaaggaagggagcggatacccatatgtgtcatcaacacaattgatgacatgaagccagcaccatttaaatacattaccgaagtcatatatccagattggtatgaaaaagaaccaccaaaaggttgcaactgtacaaacggctgctcggactctattacatgtgcttgtgcagtgaaaaatggaggggaaatcatgttcaatttcaacggtgcgatcgtcgaggccaggcctctcatatatgagtgtggtccatcatgcaggtgcccgccaacatgccacaacagggtgagtcagcatggtgtcaaaattccactagaaatattcaagacaggcaagacaggttggggtgtaagatccctcagttctatatcatcaggcagtttcatatgtgagtataccggtgagctattggaagatgaagaagctgaaaagagagagaatgatgagtatctatttgatattggtcataactaccatgataaagaactttgggaggggctgaagtcagtggttggtctaggatctgctacctcatcttctgagaccatggaaggcttcacaatagatgcatctgagtgtggcaatgtgggaagatttatcaaccatagttgttcaccaaacctctatgcccaaaatgttctctgggaccatgatgatatgaggatgccacatgttatgttttttgctgttgagaatatcccgccactacaggagctgacctaccactataactataagataggggaggtctacataaatggcgaggagaaggttaaacattgctactgtggcgcctcggattgctgtggaaggctctactgaaacattattgactgttgttagctctatgttttgaacacctctgtcctgtctctgcggtacccttctattctcagttcgccttgtcttgtcggcgttctgatgtttacagcaagctgcatttgatcttgctgttttcatttagaaaaaaaaaaacattctgcttcgctctactgtgttttgaattgtgaatgaattttgaatggaaccccgttgtaccatgtgttcatgtggcaaaaatggacgatgatcgtgtcagcatgctggggcgttaattttttttccacagagctgactggtggcattgtaaattgg

SEQ ID NO: 27913 - DNA, 2083 bp, Zea Mays
ctccttctcacatcacatgggactggactgggagtgccaatgcctccagcccagcttgcctgccacctggtcttgaccctctcctggataggaggagcagcagccagagggacatcaaactgtgctgcctgcgtgtgtgtcttctttcttgcctctcccttcttcaacctttgctagcttgccagggagggagtccatgaattccagcagaagcctcctctcttcgcccctctttgctagctcgtctccaaacttcaggagcagtgcttccgtctcctcctccccatccccatcccgcaccacagttccaatgatacatgacaccagcagcagcagagcatccacggcgtgccactactcgccgtcgcttgtggcagaggagcagcttcacggctccaaagacaccttgaccttgaagggcgagaaggctttgctcgagttgcttctaggcatggctctggaccagcacgttgacggcaggaagctcattacccaacaggaggctgaggatagtgatttcgagagctatttgagagaagcaacaagccgagtgctttaccagccaacattcatcagtgaagaggatgatgatgatgattctgtttcggagagctcttcagcatcattggccaaaccagctggaacattggatcttggcaagctgacagaggaaccacagcagtgtggatccaaaccattcgtatgatcaagtgtttattagatccactcggttactggagaggagatccaagaaacgcaacggcggccacagggctttggataatggtgtggcgtgcagtggtgtgaactcaaagagaaaagacaagtttggcagagttcttgatccagacgagccttttaggttgtttctacgggatcgagagacgacagagttcttgacagcgaaagaggagaaacagatgttcagtcaaatacagaatcttatgaagctggagggggctcagcgtaacctgcaagctcagtgtggtcgtgaaccaacagttgaagagtgggctcaagccgtaggaatgagctgcagggagctgcaatcctgtgtgcgcaccggaagacggtgccgagagaagatggcccgctccaacttccgccttgtgatacatgttgctaggaaatatgaaggatgtggccttgacattcaggacctggttcaggatggatgctgtgggttgatgaaaacctttgagaagttcaacccgagcaagggatgcagattcccgacctacgcgtactggtggatacgccagtcgatcaaaaagtccatcttcaagaattcaagactaatccggttgccggagagtgtgtatgcacttttgaggaaggtgggcaaagcgaggatggaatgcataatggacggggagcagccgacgaacgaggtggtggcaaggcgtgctggcatcacgattgaaaagctggcgaaactgagagcgaaaaccaggaaagtacggtccatgcaggatcgagtctggtcagacgacggtgtgacataccaggagatcaccgaggaccccaacattgaaggtcctgaggtgagcgtggacaggctgatgatgcggcagcaggtgcgcagcttcctgacggggatcctgagcccccgggagaaggagatcatcgagcaccggttcggcatccacgacggccagcccaagaccctgcatgtcatcggcgacatgtacggcctgtccaaggagaggatccgccaggtgcagaacaaggccctggacaagctcagaaacagcatctcagcacagggcttccacgtctactttgatttgctaacttaagactcttcaacacgcaaacattacatgtacaatgacattccattctgccaatgggtatattatgtatagatagacgaagaattcatgtttttttcctttcccttttgccatttgacattcattcatccttgtactcaacaatggatactcatacatggttgtttgaggagcaaagcttactttaaatgtatggatgtacgtttaagtgcacatatgtttatgaaacctctctttgtttcagtgtttctgcacagcacctaatggcaacattgaagaaactcgca

SEQ ID NO: 27914 - DNA, 2021 bp, Zea Mays
ccaagcgctccaaccgctcgcagccctaaatctaatccgtcgtcttccgggtcgccatccgccctcatcccctcacgctcaaaccaaaccctagcaaaccctagcagatgtcagcccacgacgaggacggcggccgccgccgcaggacccttgccaaggtttcactctcgttggtctcgagcaccatggcggaggcctccacctactccttagacgcagttaagacgcgccacctctagctccaccacagccccggcggcgcgggcgtgcgcggcgtaatccgggtcgcggccgagctcgtccgagatagcggggtttaacggggcttaaccccctccgttctccgccacctgatgtacacccgctttgcatcgtggggttccagcatcttcggtccaccctcgctagcaactgggggaggatggcctttttgggaaggcgctcgccggtggactttcaggtgttgctgcacagtcactgatagggcagccgttctgggtttcctatgagaaactgcaccaaacatcagggccgacatgttgtgttgggcgcctttccatggttgcagggccggcacggatgtatggttgtcgtgctgagtgagcaggccggaagatgctcttttagtactttgtctgatcaagtccatttagattttccctatgtcaaactattttacctttgactatcaatttttaaacttgacaggctgatgacacaattcacattattactaggtttattatgaaaaagacagcatattcttgacgatattgctatatgaagtgtcatactaagagactactgatcggatggacgagtgtattattttagtagttagtggtgcttgtttagaactaagattgcaaatacactgagatgatttgggtattataatacaagccaagctgcaaatatggaaccatgcaacttccacaattagtcaagttatctttgggtcctgcttttaattcttgggattccaaactcatgtttggtcaagacaaggacattacgacattgtatattctacatacttttattctctctaataatatgttattatgtaaatgttataatttcaagctgaggactgattatgctctggtttactgagttatgaattcccactttgtcatgaaaattacttcggttttaccatggtcagaactgtatgtaaggttgactccaatgttgagcaaaaagttggttatatactctgacttcataattagagttccatattgaaaaatgcatatagtaaaataaaaatgttgtccacattttaattctccagtctctcaaccatgcaaaattgaatgtaatcttttacaactctttgtttgtacacatcattctttatgcatgttttgagttatgttgaaattgaccactatctttggctttttgcatagtgagaataaaacaaatagtagtgtctatatgtctgttctttactatcatgtaagctgtatatacaccaaaccaatgtatgatgcacctaaggcttgggtttttactttttgagtattaatccatgtaaacaatgaactaaaacccttcttacctgtcatgttttgcaggtgcaatgggctggcttttgataaactcgaatgtggaggtggcttgctactgcaagccttgttactggcttataaatctggcttccaagtgtgggatgtggaacatgtttatgatgtaagatagctagatacagacatgatggctctatttcatttattcaagtgctaaaggatccaattttcacaaccgaatctcgagacagatttgtagatgtacggccatcgctagctcttgcatgtgatcgtgtatgattgcaacaatcctgacaaaatatggtggtactttatattttggcatattgtgcacaaaaacaagtgtcttctatgaccaccgtgatttatgtattttcaaacgaaattttatggcacttcttgttgtgttttacgcttctactaaaaaacagtcttactgcgttttacaccaaatttatgacactt

SEQ ID NO: 27915 - DNA, 1831 bp, Zea Mays
caacgctaaaaaaaccacccccagctccgttctcttccaagtggccagtgccgtctccggccaccgcccatggctatgccttcctccaccacggcggcgctctcccgcctcgtcgaccgcacccgggttccggaccccacactgcaacgccatgcggttggggccgtcttccgccacctcctctccctccccgcgcccctcccagcggccgcccacgacgccacctcagccctcctcgcttcgccccaccctgcagtcgccgcgcacgctgcggcctccatcgcccgtctcaccgccacccgccccgatctcctcccctcggatgtcgccctcccgctcctcatcgcgcccctcgcggcctcaccgtcccccctgctcgcctcctgcctcgtcaaggcagtctccgcgctcgcaacctgcgccctccgctccggctctcgcttcccggcccacgaccaccccttcatccaggcgctcgcgtcgggggctgacggcgctcgagcggagctgatgcggcaggcagccgggatggttgccgaccgggtggattgggtggtcaagtttctgaggccgttcgtgatgttctccgtggtgaggaagggggacgccgcatttgccagggatttgatcggtgcattggccgcagcagccgtggcagcagggaaggctagtgtcgcgatcccggttctgaagatgctccaagacagcatgctgcatttcggccgcggggacgatcaggaagtgcggctatggcttagttccgcagagtgtttggttgatgcttatgtcgtgctactgaggaagttagctcatggtcaaatgcctacatatgatgctcaagcaagtagtgcgacattgatggaaacactcctatcacaatattcatttcatcaaaaatttctgggaattgattcaacaatttttgggttatcaaaacatttattcttggtgcaaaaggatcttggattatgctatatacctgagatttctgttgtccttagctctctttcttactctctcactgggctagagtttgaacatgaacagctagctgccttgaaacttctgagctttttgattgattggaaatatgaaaatgtgcttgacagtaaagaacaaacacatcacgtcagtgtggagcttctctgtgttctggcagttatcaaccttaccatttcaccatccaaatctgtgaaagcagtggcatatcatgttctgtcaaggttcagcttgtttgttttagacttgccagcttctcattcatcagaggaacaagatatttcaacgagttaccacataagcaaacctgcacttcttcttcctaaacttttgcatcatctatggtccaagccatcttcatcatgcttcagttttatgaagtacatagctaccaaggcctcacctgattctggccagagtgacttggaagcaaattattggactcatcaaataaatgcctatctgacagcccttcacagagaaaagcatacattagatgtcaggtcttcaaaaacgacttcagtagccatatcatctctgataagctctgtagcatctgttttggtaatgcatccaaaacttggtacttctgcagcagaatctttggccatgcttggcacatcggacccaagattgggtatgccactttttgtagttatcctcttctacagcaagattctatgcagcagcggtaaattttcagcggaaatctcggaacaggcccccatacatcagagaatacaagttcaagaggcttagatgaaacactagttgatataggatatgggagctgatggctctttgtctattgacatgcattacagaccgattc

SEQ ID NO: 27916 - DNA, 3207 bp, Zea Mays
ccgccgtcccgtgcgccattgccaagtcgaggcacgcggccagtggtgccctcgtcatcgtcaatgagcaccgacgccgcgcccctcctccactccacctgcacagcgccgctcgcccccacaccccaacccaaccatccgctccttgtcgccttccgacgctgagtttgctggtgtcgatttgcgccgtcggatgctcgatctggcagccgcctgtgccgacctactcgtcgaatccgttatctaacgtaatggatgggcaaggcacaaagcacaggattttgatggtgtctgactttttctttccaaactttggtggggtggaaagccatatctactacctgtcacaatgtctacttaagcttggccataaggttgttgtcatgacacatgcatatggaaacagatctggagtacgatatgtcacaaatggtttaaaggtctattatgtaccatggaggccattcctgatgcagaatacacttcctacactattcttgacgtttccaattatattgatcaggcaatatgtgtctcacatacaagcaaagagaacactgtcttgaggtctgggatatctccagagaaggttttcatggttcctaatgcagttgacactgcaatgtttactccctctcccaagcgcttaaactgtgatgaaatagttattgttgtggtcagtagattagtataccgaaaaggcgccgaccttcttgttgaagtcattccagaagtgtgtcggctatttccaaaggttcgctttattgttggtggtgatggtccaaaacgtgtgcgccttgaagaaatgagggagaagttctcccttcaggatagagttgagatgttaggagctgtacctcatgctcaggtgcgatcggttctgatatctggacatatatttttgaacagaggcattttgcatagccattctagaagcagctagctgtggactgttgacagtgagcactagagtcggtggtgtccctgaggttcttccagatgacatgatagtacttgcagaaccagctcctggagatatggtaagagctgtcaagaaagccatcgacatgctacctggaatagacccccagattatgcatcttcggatgaaagaactttatagttgggacgatgttgccaaaagaactgagattgtttatgatcgtgcaatggaatctccaacaacaaatttactagatcgccttcctcggtatcttacttgtggatcttgggctggaaaactgttttgcctagttatgatcatcaattacctactatggcgccttttagaatttctacagcctgctgtaggtattgaagaagtcccagatatagggccactacatgctcatttaggttcaaggaatgatgaggctcaagagaagtgaaacttaaatctttgacagttttgaaatggttggggacttgaggtggcagtcatggtatcttctgcttgtcagcattcgttctgatccacatgcagtatatgcctttatgatatggcccccgcacagcattttctcttgaagcttcccgtctccgtagtcgcagctgaaagagagtggaacgccttgatttgtaggatttcttgtcatgctggttaaagctatggtccgagtctctgtcattgccagcttcttttttttttcttcctctgcgtaatgcgtagtgagtggatggcctgcgttttaggcacgtcatcaaaccaattatctgctggaacgttggtactctcttgccaccatattgcaactagaagtcttgattggcatgttgccacacaaattcctactatgtttgatgtcttgtatcatgtcggagcaccaattcctgctgtgtttgtgatgtaataatgccaattccaaccagcgacgtgagaccaatctgcatggatccagtcgataatactttttgaatataaaataagtgcaatctcttttcggcactgtttggaattcaagactggccattcgctttgtaagaaactgcgggtttgctgaaattctcctccactttcccaagcaaagaacaaagaaccgcccttgttctctgcgactctgcccggccggtctccgaggcgggcggagggaaccagagagcaaggcgaggagcgcggaagggctgagggaaggggcggcggggcatggctcgccggccggcgtcgtgggagcagggcggcgacgagtacgactatctcttcaaggtcgtgctcatcggcgactctggcgtggggaagtccaacctgctctcccgcttcaccaagaacaccttcgccctcgactccaagtccaccatcggcgttgagttcgccacgcgcacactccaggtggagaacaagattataaaagctcaaatctgggacactgctgggcaggagaggtaccgagcaattacaagtgcttactatcgaggagctgtcggggcgttgctagtctacgatgtcactaaagtaatgacatttgagaatgtgaagaggtggttgaaggagctccgggaccatgctgactcgaacatagtcgtaatgctcattggcaacaagactgaccttaggcacctgcgctctgtcgccgttgaggatgctgcaagctttgcagagagcgaaggtttgttcttcatcgagacctctgcgctcgatgcgacaaacgtcgagaaggccttccacaccgttctagccgagatctaccggataatcagcaagaagcccctgtcttcggaggagtctggtttggggtccggtaacctcagagagggacagtccatccaagtgtcagccacaaattctggcgcccttacgtcgcggtgctgctcttcttagagccacgcccaccaggatcatctgaagaacaacagttcgtcaagaaggtcctctcttccgagtcgaaatatttactcccctttgtgtgaacaataagcgtagatttaaagaatgtcagactcagacgctgactatatatacttgacctgcatagtcatgttccgtcgagaggtgctgtgggagaaaagttgtattgctctcgagcatagaagaaggctgtgtgtatcagaccccagcaaagctgcttgctattaaccgtggcagggtagtctctgtgattttgcagctataattttgttgggggttagttactatgactgcggagggtgtcgtggcttgtggcaacttgattcccgacgtattatagaatcctctttgctatccgtttggca

SEQ ID NO: 27917 - DNA, 850 bp, Zea Mays
attcctgcccccttcgcctccggaccgaaagcgaagtgagcagctgcagggggaggccgccattatcgcagcacgccgccgcgtcatctaatcgaggcgagggggagacagagaggaggaggaaaaacgggaaataaatcttcatcaagcaacaggtagcgggagcggacgcgaggtgaaccactagctggccagtgccggccgaggctagggttccggggatcgcgggcgcgggctcgggctcgactttcgtagcctagccgccgccgccggccgcgcgggggaaccggatgctatgctgctgagctgcgggtcgctctcctcctgggtgcgccgcttcgtcgcctgcgttgggtcttctactatggcaccagactagacagcagtggattggaaaccgaaggcttaattctcagggtcaacaaagtcaagaaccaaaaataagttgtaatgctacatacgaaagcctgctcggaagctcgaagccgttcccacaaccgacccctcttggtgaaatggtggattttctcgtggtcagctgggagcaggaaggcttgtacggttagagctggttattggaaggtgccgttggttagagctggttattggaaggtgccgtttgtaatcacgttattattcgctgaaatgtacgcagcttgagtaggctgcagaagtctgtgtcgtgttgaatgtggattgcctcggagacaggaacaggatgacaccccttttaagcaaatgtataaaatattcgttgtttttattactagtataattgtttgtgttcacagcgttcagtttacgagttcattgttctacactacagtactatgtataaagttcgttttcg

SEQ ID NO: 27918 - DNA, 2324 bp, Zea Mays
acagtaggttcattccccccaccacatcgaactgtgcgcgcgctgcgcggtcggtcgctcccctcctctgtccgcgatctcggctggccgcctgggcttggccctcgccaccgctcccgtctccggttccggcggccgagccaggtgaacgatctctccagtccgcgacgatgaaggacaagcgtgggctcgaggacgccggcgacgggcgccctgatgccaagaggccgcggcctccggctctggccagtgttattgttgaagcgttaaaggtggatagtctgcagaggctctgctcatcattggaaccaattcttcgtagagtagtcagtgaagaagtggagcgcgcactgggcaaacttggccctgcaacaatcggtggaaggccttccccaaagcgaattgaaggtccaaatggaagaactctgcaactcgaattccgaacaaggctgtcacttcccctttttactggaggaaaagttgaaggggagcagggagctgcaattcatgttgttttgtttgatgctggcactggctgtgttgtatcctctggaccagagtcgtctgccaaacttgacatcgttgttctagaaggtgatttcaacaatgaagatgaggagggctggaccggagaagagtttgacagtcacgttgtgaaggagcgtgagggaaagcggcctattttaactggtgatctacaagtcacactaaaagaaggtgtggggacagttggggagcttacattcacagataactctagctggataaggagtaggaaattcagacttggcttgaagattgcctcaggattttgtgagggtgttcgcattcgtgaggcaaaaacagaagcctttatggttaaggaccatagaggagaattgtacaagaagcactatccacctacactgaaagatgaggtctggaggttggaaaaaatagggaaggatgggtcattccataagaggctgaacaaatctggaatatctacagttgaggatttccttaggcttgtggttcgggatccacagaaattacgcagtatacttggaagtggtatgtccaacaaaatgtgggaaacccttgtggagcatgcaaagacttgtaccttaagtggaaaatattacatatactattctgatgagactagaagtattggtgctattttcaacaacatctatgcattctgtgggttgatttctggcgagcagttttattcatctgagagtcttgatgatagccaaaagctgtttgctgatgcattggtaaagaaagcatacgataactggatgtatgtcattgaatatgatggcaaaggtcttttgaaccctaaaccaaagaaaaagtctgcatccactggtcaagtggagacacatgctcctgcgggtggcccgacttcatatcaacaatacctctcttcgatgagcatgccagggccatcaccatcaggtggaactgattctgcagggtatggcgtcgaccaaagcgcaacacatccatctcagctgcagagttcatccgccaatgtccaggcaccatatgatgacacattttcgttcttaccacctaacatgctgacagggtctgcaaatgatgccatgggtctggaactgggccagttgcagcaagtaacttctcaaggccagacaattcagccagcaaacgtgggatatggtgattggcccaggaaccgtgacagtcagtatcctgatgacttcactgaggacattcgcgttaagagccaccagttgctcgagggcgaggacatgcagcagctgctgagggtcttcagcatgggtggagcttctggcagtttgccagacgacaccttcaatttccagtcctacatgccctctccgttgcccaacctcgggttcgaaactgagcgtagccattcgtctggcaaagctgttgttggctggctcaagatcaaggcggcgatgaggtggggaatcttcgtcaggaagaaagctgccgagagaagggcgcagctagtcgaactggaggattgacaccgtggctttacaatggtcaaggttgccttgtagattactagtagttatctgcccccataccttcctgttaccgtttaaacaagtttctgaaactcttttctgaaatgtacaacgagtagttctactattttcttgtacagaattcaccttgttttgattgtgttagttgtggaacattgctctgctaagtttgacacatgactggacccgtatgcttgtgtatcttattttccatagctcttcagtgcagaatgtaccgcaacgatgcgaattaatccaaagattatgtgtacatgttgatgccttgccttt

SEQ ID NO: 27919 - DNA, 2026 bp, Zea Mays
cgtgtctcgtgcccgtgcctgtgaacctctcacgtgccgtgccggaatctcgcagccatcgatcgatccagcagatgtgccagccgccgcggccgcgccaagcccaagccgagctgacgatcctgatgcggttgaaaatttccacgaacatatagatcctcatcgtcgaccccatccgtggtgctcccggtgcgccaggctaccagagtccgacgcagacgtagctcccggccacagcagagcccacgccttgagcccttgacgcgctccgtgtgagtggagcgtacgggcgccggccggcggccagagaggaaacggatctaggaggctcagctgagtcgaggagatggaccgcaaagatgtcgggatcctcgccatggacatctacttcccgccctcctgcgtgcagcaggaggcacttgaggcccatgatggggcgagcaaagggaagtacaccattgggcttgggcaagattgcatggccttttgcagcgaggtggaggatgtcatctcaatgagtttgacggttgtcaattctctgctgaaaaaatacaagattgatcccaagttaatcggtcgcttggaggttggaagtgaaacagttatagacaaaagtaaatccatcaaaacttggctgatgcagatctttgaggaaagtggtaacagtgacattgaaggtgttgactccagcaatgcatgttatggcgggacagcagccctactgaattgtgtgaattgggtcgaaagtaattcctgggatggccgttatggtcttgtcgtttgcacggatagcgcggtttatgccgaagggccagctcgtccaacaggaggtgctgctgctatagcaatgctcattggtcctaatgctccaatttccttcgagagcaaatatagagcttctcacatggctcatgtctatgatttctacaaacctgatcttgttgttgatggtaaactatcccaaacatgctacctaatggctctagactcatgctacagacagttctgcaacaagtatgagaagattgcgggtaaacaattctcaatttgtgatgcagaatattttgtgttccattctccatacaacaagctcgtgcagaagagtttcgctcgactttattacaatgactttttgcgcaactgcagctctgttgatgatgatgctaaagagaagctccagtctttttcaaatttgactggtgaagagagctaccagagtcgcgacttggaaaaggcctcacaacaggtcgcgaagcacctccatgacatcaaagttcagccatcgactctgcttccgaaacaaattggtaacatgtatactgcatccctttatgctgcattagcatctgtgctatataacaagcatgatagtctgaatgggcaaagaattgtgatgttctcttacggcagtggtttgacatccactatgttttcattgaggctaaacaatggccagcatcccttcagcctatcaaacattgcttcagttcttgatgtcaccgagaagcttcagtcaagacatgagactttgcctgagaaattcgttgagacactgaagctgatggaacaccgatacggcgcaaaggacttcgagacgagcagagacacgagcctactgcagccgggcacattctacctcaccaaggtcgactccatgtaccggaggttctattcccagaagctgtccgaggaaacaggcggcgggaaaaccaagtgctgcaacggcctcgcaaatggccactagtggtcgcccagcactgttgctcatcattctcagtattttgataatgctcatggttagcgtttagtctagcgtgtttctgaaataatataattgttctttgaagctgtcccaccccacctagatcagctagttttttattttaatattttattcttctgaacattgaaattcatcagtctctacattgtttctctttgtttcttcttttagtactctcttcgttccaaattctaaattacgtacataatgtttgctatgtctaatagtaaaaaaaaagtcaac

SEQ ID NO: 27920 - DNA, 1319 bp, Zea Mays
gtactgaacaagtcaacaacaaaaacaaactggatcgctgccgttggcgccgccaccgccgatgtagggtggagcactcagcgtgccgtcgtcgcatgcggcctcgaacatttacgtctggccgtgccggtgctgggaaggaaggggatcgaggggcagcagaccgcagagagacgacagccaccgaggcaattccaactttttaagcttgccccctttgatccaaccaagaagaagaagaagaagaaggttgtcatccaagagccttctgatgaagtggacaagcttgcagagaagacagaatcgctagcagttgcagaacctgctgaacttaacttcactggaatgaagaagaaaaagaagaagcaggtggatcttgattcatctattgatgaccttggagatggggaggacactcaaggtgatcaagttgtagaggaacaaggggacggtattgtgcttggaggtggccctacatatccttgggaaggaactgaccgggattataaatacgaggagctgttggacagagtgttcaacattcttcgtgagaacaacccagatcttgctggtgataggcggagaaccgttatgaggccacctcaagttcttagggagggaacaaagaagacagtttttgttaattttatggatttgtgtaaaacgatgcataggcaacctgagcatgtaatgatgtttttacttgccgaaatgggaacaagtgggtcacttgatgggcagcaaaggttggtgatcaagggaagatttgctcctaaaaactttgaagcaatcctgaggagatacatcaatgagtatgtcatctgcaatggatgcaagagccctgatactattttgtccaaagaaaatcgtctgttcttccttcgctgcgaacagtgtggatcttcacggtccgttgcaccaatcaaagctggattcgttgcgcaagttggtcggcggaaggcctaagcgcaaaccaaattggtcctttgcgctgcctgctctgttttggtcgtgtatttcttgttttttttcgtgtcatgttaatgcagctgaggttcggtttatgattgtcctatctttgtgtggctgaaatttgaggccataccaattcgacaatattacattattttgccggatggacattctgccgtgcaatgttgagagcaagatgtgtcaacagttacattttgtcttgcattcaaaagatccatcgaatgatggcgcagtcctgtggcggctggcgagtgtcactcatgcatcctgcctgataagcgactccctgcgatcgtaacacctggctattgtcaaacaaagtcacc

SEQ ID NO: 27921 - DNA, 1298 bp, Zea Mays
aggcggagcagcacaggacaggacagccagaggccgggagcagaggaggcggtcgtggcgagcggcgagccacaggcacgggcacctatcgttgaattgaacgaaaggagagcgggagaaagcgactcgtcactcgtcagtctctcgtcctcatgccgtcgccgctgggtggacgaatccaattcgggcctggcaaggctggcatgccgtcggcctccctagctcgccgcctcctctctactatatcatctccagcgatcccttcacgcagtaccagcaccagcgccagcaacagcaacagctgtggtttcagcacaagaagggccaggaagaagcgcagctgcgtttcttggacggtgagcgcggctactccggcggacatggcgaccaacagtgccctggcgaagctggcgccgctggaagccatcctgttcgacatcgacggcacgctctgcgactccgaccccatccacttctgcgccttccgagagctcctgcagcaggccggcttcaacggcggtgtccccatcacggaggagttctacagcgccaacatcagcgggggccacaacgacgacctcgccaggtcgctgttcccgggcatggatcaccagaaggcgatgcggttcatggatgacaaagaagctatgttcagaaagttggcgcctgggcagctgaagcccgtggatgggctgcaggagctgtgcggatggatggaaggccgcgacctgaagcgcgcggcggtgacgaacgccccgagggcgaacgccgagctgatgctgtcgctgttgggcctcaccgacttcttcccggtgctcgtcatcgggagcgagtgcgaccgggccaagccgttccctgacccgtacctcaaggcgctccagctcatcggcgcatcgcctcaacacaccttcatatttgaagtggaggtcgaacccgcagcggcgaatgcgcaaggctgatgcgtcggtcactgcggacaactaagaaatgaaatgtcgtgctggactagccttcagcgattctttcagagtggaatagctgtgtaactgcatcgtgtaataaactaactccggtcggttcctcggctggaacctggagactagcttcttggtggattcaaacagggcccaaatagaccctaagttaagggaggtttcctgtgcccaacaataatgccttactagtaattagcgcgcgtcttacgcgcgtaaaaagaattcgtaatttaagtgataataatattatattattttaaataaaatgtacataaatattttataatataagtgataattcag

SEQ ID NO: 27922 - DNA, 768 bp, Zea Mays
cgggcgcgtctggaataccgccggatggggcaaagcgagcgctgccatgccgtgctgcccgtgcagcttgcaggtggctgtgcgagcgcccggcctcccacgcactcctcccatccgaaaaccgaaatcccccactcttctcacccgtttccccactcgctcgctgacacatcgcacattcgcaccataccagataccaccgccgctgcacacaaacccagaaaccaccggcaataaacaactcccgctcccagtctccgatccgaggaagccggaagaggggatttcgagccgcggcgatcggggctagagtggccctcgacgcgtccgcgggtggaattgccgagaagccgagagagagggcttggagcggagttgcgggaggtgggagagaaggcggcgatggggcgcctgttcctgatgcacctggacggcaacgtctacagctgcaaacactgcaagacccacctcggcgttgccagcgacatcatctccaaggccttccagtgcaagcacggcaaggcgtacctcttccataaggttgtcaacgtgacttctggagtaaaagaagaccgcatgatgatcacaggaatgcatactgtttctgatatcttctgtgttggctgtggatccatagttgggtggaaatatgatgcggcacatgagaagggccagagatacaaggaaggcaagtttattctggagagattggtgcatcgattatattgttaatctggtggaatcagactcactgcaacaagatttgtc

SEQ ID NO: 27923 - DNA, 2908 bp, Zea Mays
aaacacacaccggcctcgcagtcgcagcctcgctccggaggcggagcgccggagccccgcccacctcccctaaacggccagggcctgaccacccccacctcagtccctctcctgtgggcggcgtcctcccgcgcccatggggatctcgcacctccagcccgtcctcctcctcctcatgctccgggctctcgcgtcgcttcccacgcaggccgccgcgagaggcggccacgatccgtcagatgatggagcccacgggccattttcacgtaaacttcttgaagataagcctcagatcacagaagaaatggtccgtggatatatgagcaacactgagcttgagactgctgtacatgcctttggaagtcgttgttccaatatctccagggtgtacaggtacacgatgtataatgttttacttctgtgataattacatttggagcttctaaacaaacttttaagaccatcagtttttaaggacatgtaaatgactgtgtcattggtgggtagtaccgtagtaatataaggtcaggagcgactgcgtctttgacagacaaaggcccagcatggacagcatcgtcatgagagcgagagaggagagggagctttgggagatggctggaggctggagctaagagcatgtctctccttatggctccgactccagggttgtagggcccccttagtagcgatgtggtcaccattatttgtttagtcgtatgaggtatgacccccccttttttgtattcttgtttttggccatcgtaagtggttttatcttgtaacggccggcttggaccttaaccactttcttcttaatataatgacgcgcagctctcctgtgcttccgaggaaaaaaaggatttaaaatcattatcaaccatgagagaaacaacattgcatgcagtcatgttgatgggtaacaccgtaacagcaaatggataaaatgaaacatgtatctttttgaaaagaaaaccaatcatgaagcgccaacttagggcttgttcggttagagtgagattgggtgggtttaaatcccaagcaagtcaaagttcttctaaattttttccaatcccatccaatccatgtataatgtgaataaccgaacaaggccttatagcataattatatccataaggtacatgtattaattctgttttacttcagattgttttttgaggagaaaaatgtaggttttacttcagattgttgaaatgttccatgttcattggtcatgattagcaattttaagcatttcctgagtaacagaatattttggtttcaatctctttattctgttggtttgttatacaacttctgtactgtccttggatatctcattttttaagtgcactgcttctttctttattttgtgccctcctgttttctcatatgtccacacttcacttacattttatttcttctctctttgagggataacacaaacctgctatcagcattggaaagagtgtgaatcattttccattgtgggtgattgaaatatcagacaagcccaggcaaagggaatctgaaccagcattcaagttcattggaaatgttcatggtgatgagcctgttggaagagaggttcttatgcatcttgcaaattggctgtgtgataactatctgaaagattcactggcaactctcattgttgagaacatgcaccttcatatacttccgacgatgaaccctgatgggtttgctcttagatggcgtggtaatgcaaacaatattgatctcaacagggattttcctgaccaaacagcctgaaactagagccattatgaattgggtaaagcaagaacacttcacggcttctgctagcttgcatgggggggctcttgttgccaactatccatgggatggaactagagacacaagcaaacactactacggatgtcctgacgataagacattccagcacatggcatctgtgtatagtcggtctcactataacatgtctttgagcaaagaatttgaaggagggataacaaatggagcattctggtacccaatatatggtggtatgcaggactggaactatatacatggaggctgctttgagttaactctggagattagtgacacaaagtggccaaaagcagatgagcttcctatcatctgggaacacaataggatgagtatgctcaatcttctagcaagcctaataaagtcaggggttcatggaaggatatttgcagcagatacgggcaggcctgtacccggctcagtgatgataaagggcattgattccaaggtaagcgcgagcagcacttttggagattaccatcgaattgttgcgcctggtgagacatatgaagtggtggcatcgatgcgaggcttccggcaaaaatctacacgcatcaggctggagcaggaagccgtcagcctggatttcatcctggacccggatggagccgatgggcagacgaagctgctgccccgtagtaacgaccggggctgccgctgcgacaacgacaacgccgccaagccgttccatgtccacgaagctcacctctggttgtacctccttatcgtgtccgttctcctggccctctacgtagtcttcaagaggaaaacggtgccgaggctgctggcgtatagacactcatcgtcactcagacggcctgttgctgtataagaggaactaattttgtggtctaggcggatagttttgtactacctctgttctcgaatagttgttgtccgctagttaatttttatagctagttcatttttatactaaaatgtgacaaatagaaaagaacggagggaaggagcaactgaagttagtcttctctttgccaaaacggtcggttgctgtataagttgaaggatgggtaatgtaccatggaaatgacattttttttgaatcaatgaaatacatgttgcgttgatgacaaggaaa

SEQ ID NO: 27924 - DNA, 1004 bp, Zea Mays
gatctatgtatgcacaactatcaaatatgtttttggatctctttggtgatgcaaagtcaatcaggaaggcttcaactcggcatacaactcttttttcatgtaagagaagcattctgccatcaaagaaacggaaggctgatgatgctgttgtgtcagacagggacaagtttgctaaaactgggtctgttcagtcagccacaggaactgatccaaatgcttccaatcctcctgtttggcctgcgacttctgaaacatctggacatcaatggggagcttcttatgctcagctgcatatcctgcatatggaacttatgactacagccatcaaatgccacagcctgctcctcaaacagctgcctatggcgcttatcctccaacatactctgttcaggcctatacacaacaaagctacacacaacctgcagcaattccggcagcaccagtgccagcagtggtaccagcacctacaccggcgtcagcttaccctcagcaacctgcggcagctcctcaaccttattatggaacaacctactactgacaagtagagtaatcttcgatggcgatctgacgagcctgttaatcagcaggtttgtcgatacgaggtcaaaggcatcacaaaaccctctgtactgccattgtttagccccccttcagacagatgccgtcgacgagatgatcacttgagaacaaatttgagattggtatagtctgcatttttgtcgttagcatgtgtcgctagggattgctattgtttttcttgtaatagcataatctttactgtagaagaggcagcgggtgctaaccaatcctatgaacatataattaacattattcactgtttcatgccacctttcggagtgctttttttttcaaccactgatgatagcgggattcctgtcaagcacgctcactggtgaagtcctcggaacaaaattgtcaagatctgcgactacacagttcactgatttctactgtcactgtaggtcaaactatcttgatttgac

SEQ ID NO: 27925 - DNA, 2299 bp, Zea Mays
caaagatctcatccccatcgcgattcgcgtcgtattggggaattaaaactcctcaccaacgccaccaaagacacacagtccccagatgtacaacctgtaggggttgcagcgcggcgccggcgcgtcgggtcgtgcccatcacgttgtctccactccgtcgcctctcctctcctctccgtccctgcgccacgcgggggagattaaagcgaagcgcctccccgctcacctctcctctcgtcgtgcgttggatcaaagtatcaaaccaatctcccctcgccgtccggccggcgtgcgcgcggggcctctttttttggagccttgcgccgcggcccgttcctcctgtccgaaataatccgcctcgacgtgttcgcctccccctccccctccctctctcccctcccctcgcgactcgtctcgtgcgtgactgcgtgctcgctctccttttcgctgcgctcatctcggtatctgtgccagcgctcgcctctccccgccggcccgccctccttcctttccttgtctagccgaaggccgaagccactgcgcgcgcgtgcgtgcgacgatgtcgtcggcggtggaggccatctcctgccccaaggtcgacgtccccgccggcccggagccgggggagccggccaaggaagcggcgccgcccgcggagcactgcgacacggcgcccaacggcaagtgcgcgccgcgttgtcacggggaggaggaggaggaggaggaggacgaggaggacgaggagaaggcccccaaggccatcgacctcggtcccatggtcagcatcaaggagcagctcgagaaggacaaggacgacgagagcctgcggcgatggaaggagcagctcctcggcggcgtggacttgaactccgtgggagatgtggtaatttgaatcctggaccctagaaatgcaaccgtaggataccaatgccagcatccttcaatcctgagaaagtggcatactactgctggtagtcgtcgtcgtagtcgttgctattctgaacttctggtgtagttttatctggtgcttttgctgcttttaagatcagcatattttgcaggattcaggcattcgttcatggagcacttgcctttttggcttagactttagcacacattttcacgtttagtgtttacaataacgctgatttaaaccttctgagccgtttgaatgagcgggagatggaagtgctatctcgaatcagaccgagacagagagtgaaagtgaaagagacgctcaatttaatgagcatgtccaatttaatgcaatgtaagaagcagatctgaaatttgaacatcctgtgcgtgtgtgtgtgatgttcgcagagacgctggagccggacgtgaagataatgagcctgtccatcctgtcgcccgggcggcccgacatcgtgctgccgctgccggtggagcccaacggcaagggcgtgtggttcaccctcaaggaaggctccccgtaccggctcaagttcaccttctccgtcagcaacaacatcgtctccggcctccgctacaccaacaccgtctggaagacggggctcaaagttgacagagccaaggagatgctcggcacgttcagcccccagctggagccctacacgtacgtgacgccggaggacaccaccccgtcgggaatgtttgcccgggggtcctactctgccaggaccaagttcctcgacgacgaccgcaagtgctacctggagatcaactacaccttcgacatccgccgggagtggccgtcgacgagctgaccatccttccctccctccatcggtggcctgagcagaccagtcgtttcgttctgtgttcttccttttctatgttgcctcgtcctgtcctgtcactaggttttttgtttgttcaccgtcagcttgttcgctgcagcagtccaaacagctgcaacagtgtcggcttgtagccagccgaacacgccccgtgttgctgcgtgcgtgacgcacggtgcgtctatgtgccctttcccatgcgccagttgtctgctgtgttgacaccgttactagacagtgcaaatgtcaggtcggtctaccggactgtgcgtgcgtcagcgtgttcaacttgtcgatcagggtctcgttttttccgaaccgcctgttgagttaagacttcagagcaatgaagctgcgttctgcgtagtaatgccaccgtgatcgtgacctgttgtgcttcgagagttcgactgtagcattgaaatcaagtgtagcatgcttcgagtcctatttttgcgatcaatgttacaaatggccaaaaaaacgaagtatattgtttggagtccaaaaaatcc

SEQ ID NO: 27926 - DNA, 249 bp, Zea Mays
tttgaggccgaggagggaggggatgcagacttcgcggcgacggtgcacaagggagcgtcgaagcagcgatgtggcgtttgagaccagggaggggagggcttgctgcgctcctgctcccagttctgctgcgcgtggcggccgcagtggggaggggccgagggggcttctacaagacatgagggtggggacgtcggacgctcacgactgaattgctggtgacgggaagcttcgagagaaggcgtacggtcg

SEQ ID NO: 27927 - DNA, 294 bp, Zea Mays
aaatgagggagtaacacctgaatttggtgaatattaggaaagaaattttatacccccaaatttagggtgttacattgtggcgtcccaatggacgagggttgcaatcaacccctctcaagtggtccaaagacccacttgaataccacggtgttttgctttgcttatctttatcccacttgcgaggaatctccacaaattggagtctctcgcccttacacttaaagttcacaaagaagcacggagtaagtgagggaagcaacacacacaaatccacagcaaaatgcgcaaacacac

SEQ ID NO: 27928 - DNA, 1197 bp, Zea Mays
aaaaatcttctcatcgcgctcctcaagcgctttcctggcgtcttcgaggttgtcgaggagggcgtctactccccgctgtcgtcgctccccgccttgctctgccgcggccgtgcctcgccgccacaggtccaccgctcgagatcccggtcgacgctccggcctgatctccatttttggccttcggttggagatcggcacttctcggtgatgtccctttggctgcacggccacccaatcgggtgtttgggtcttcgatttgggtctgtagcgttggagatacccccttcaaactgctgccggtccggaagccgtgcctcctagccgcccacgctcgccgtccgtgatccgttctcgactgttggtgctccggactcacagtccatattgatggctacattatcatggtggatggaatggtcggtggagaatgttcgtgaggcatttttctcctatttcggggaaaatcagcacgtgaggttgccatctaccccagtgatccccgttgatgatccgaaggtgccccttcttcatacatgtttgcaccggttcaaggggacccttggtggcagagagaggcatcgcacctgcttttcgctgaggtgcattattgcaagtggtgacgaagatttgattgaccgcttcagaattgacgctactttccatcgattcacggagatccttgggagttggtctcatgggtactatttcaaggaggaagctatcggcttgttattcagtcttctcaccgagaaatacaagttacctcagtctagaatatatgcctcatactttagtggtgatatgtcctcttgtttgagttcggacgacgagtcaagaaataccttgcagaaatatataggagcagaaagaatcttgccttccatgtccaaggttgatttttggatgcccggtgaaactggtccttgtgggccatgtattggttttttccttgattgttcggacaacaatgatggtgttgattccgtaaggaacataacggatggcaagcttgtcgagatatgccgtcttgtgtttgttgagttcgatcggcaagcagatggcgtcttggagcctttccaagctaagcatgtcttaacagggattaatcttgaatgtttagctgccattcttcaaaagaaagaaagccactatgacttagatgtatacgcttatgtaattcgtcaagtctactgcgta

SEQ ID NO: 27929 - DNA, 1233 bp, Zea Mays
ctgctgctgatcgtcggcgcgccgggctcatgatcggaaattcggaaccagatcccctcactttttatcccatctttggctccggcgagctatgcgagcatgcggcaccaccaagcctgcagccgcgctcaccaggtcaaggtccaccaatttcttctaaagtcaaggttcagaacatttaacaaggatcacgcaaatctcttctttgttccgagctatgtcaagtgtgttcgcatgacaggggcactaagtgacaaagaaatcaatcagacctatgtcaaggttctgagtcagatgccatatttccgtagatcaggtgggcgcgaccacatttttgtcttcccaagtggtgcaggcgctcatctgtttcgttcatgggcaatatttctgaatcgatctattatccttactccagagggtgaccggactgacaaacgtggtacgagtgcatttaatacatggaaagatattattatacctgggaacgtggatgattctatggggaaagcaggacgccttcaactggtggagcttgcaaagcagtatcctgacaagctggaatctccagaactcaagttataggacccaaaaaattgggaaggatcgagtacttcaagcacctgagaaatgcaaagttctgcttggctccacgtggagagtcatcttggacacttcggttctacgagtccttctttgtggaatgtgtgccagtgattttgtcagatgaagttgagcttcctttccagaatgtgatcgactacagtgaaatctcgataaagtggccgtcgtccaggattggacctgaactccttgagtaccttgaatcaatatcagatgaaaggatcgaggaaatgattggtcatgggcgtgagatgagatgcttgtgggtgtatgcagctgatactgagccgtgctctgccatgagcggtatcctgacggagctgcagaagaaagtgcggcggttccatcaatcgccggaaacgttctggctgcacaacagaacaattgtgaatagagatctgattgagttccacagctggaagacgcctgttccgttgccatgaaccatgtattctgatttcaactatagccggcatctgtttctgtaccatgttagacatttttcttgtgaagctgtgtttgttgttgttcttgctaatcttgagaataaacacatacatcgtgttaaggattgacaatagtacgctagatatatttttttactttatcggg

SEQ ID NO: 27930 - DNA, 1127 bp, Zea Mays
gtcaggggtacgtctatctcccctccagacctccacacgccgcgatggcctccgccgaaatccccaactccagccctgatgccaccaaccccgccgccgccgccgccaccgccaccgccactgccaccggccccgacatctcctcttcgccgccactcccgccgcggaagcgccgcctttcgccttcctcatctcccacgcgctccgcgtcacgctctcggtcgccccgctcccgctccccgcgcggccgccgctcccgctcccgcagccggagccggagccggagccgcagccgcagcccgcagtacccgcccgacggcaagcggcagcggcacaacgaccttaccgtggaggcgtgccgcgacttcctgcgcgataggtgcacccgctccgacctcgagtgcagatacgcgcaccctcacaactcagcttccgtcgaccgggacaacaaggtgacggcgtgcgcggattctcttaggaacaattgcttccgggggatgacatgccgttactaccacccccctccacaaatccaggagcaattgctgagatcaattggtatggaagatccaaatgtgaagacgatctgcagagattttacacgtgggaagtgttcaaggtcagcaaatgagtgccgattcttgcaccattcatctgttgaagatgctgcaattgtttgccaagattttttgcgtggacaatgcaatcgcatagcatgtaggtactctcatgtagtagcacatccggtgccaccaatgagccatgttcctatgccataccctgagatgctttacatgccaccaccaccaccaccacctcttggagtaccaatgatggggcctccgccttcaccatttgctgataataagaacagggttgaagtttgtagggacttcttgaagaacatgtgcaatagagaatcctgccggtttttacaccctgggacacatacagcggctgcgagcgccaatgttgaagtatgccgtgattttaaacgaggagaatgcaatcgacctgcctgtcgctttttgcatccatatacaagttgaagttttctgttagctaaagcctgccgctgtttcaaacaggcaccgccagagaacattctgatgtgctttgtgttacta

SEQ ID NO: 27931 - DNA, 3591 bp, Zea Mays
cgcgtgcgctgtctccccccaggccccccacctctctggctctctctctctctgcgagtctgcgacgacggggctaccgccgcctccgtacgccaggtgccgaggtcttcgttggtcctttcgccggcgacatccaccagaaattatatcatcaattcattaccgggtgtacatttgtacacagtacacccatgtccttcactggatccgcccctgtagtgaggataatatctttggagtttcggagggggcgcgctagaaggatggtttccaaaatgagatttcggaatgctctcggttctagaccatttcagtgttgttcgcgtgagaatcatacatatgtccggaagctgttggaccgagtgtcggagagatcaaagctccttaaaaaggtgtctgttttggtgggttacagtaatccacaagatttagttgagaaacaaagagcccctggggaatcttctgcagagttgattagtgccttgaaagaaatcgatttcccagaaattactgcaaagtttccatgcataaaagttggtgatgcatcacctgttgaactgtatgaggattctactaacatgaagtttaaagaagctgcactttctgaaaagctcacaaatttcatccaaggctcagctcgaaatttggagtcagcttatgaattccataatgactgtcatccattgaatcaaacacccacaactgcaggtgatctttcaatcagtgaagagatccctctcattgaaccaatagttgatacgaagtcccccgagtcattgtcagatgctataacctctgacaatagtatactggataaaagtataaggtgcttgcctggaacaactagtaggcaatatcgccagctagaggatggtggtttccatacggtccgcaaattattgcagcattttcctcggacttatgcagatctgcaaaaccctcaaggccccatagaatatgggcagtatattatgttatctggtactgttatatcttccaggggaatcaaggttaagtccactttaggtcttcttgaggtggttgttggttgttccataatcgagtctgaattgagctcttcagttgagagtagtcactctggagcagagcaaaagagaattcacttgcacctcaacagatttttcagtggcgcacgtttttcttcccaacattttcttaacttaatgtcagcaaagcacaaagaaggggatcttgtttatgttagtgggccttgaagatattgagcccagatgttgatccagtgcctcccgatgttctcgttgaattcaacttgcctaatctctttgatgcttacatgggaattcacaaacctaaggatcgatctgaagctgattttgctcgaagaaggcttatatttgatgatttcttttacctccagttaggaagactatttcaaatgcttgaagcagttggtacgcgggttgagaaggaggaattgttatacaagtgcaaaagtcatgagctgaatactgttggtgtagatgattggtctcctcttacaaagaaattgttgagggctcttccttattggcttactcctagtcagttggatgctgttcaagagattatatgggatctcaggagaccagttcccatgaacagactcttgcagggggatgttggttgtggaaagaccattgttgctttcctggcatgtatggaggttgttaattcaggatttcaggctgctttcatggttccaacagaggtgcttgctgtccagcattatgaacacctaacttcattgctagagaagtttgatggagatgagaaaccaaatattgccttgctaactggttcaacgtccacaagggagtcaaggataattcgagatggtctgaaaactggagagataggcatggtcattggaacacactgcttaatagctgataaaactgaattttcagctttacgtatctctgttatagatgaacagcagcgctttggagttgtacagagaggcaggtttaacagtaagctatatacttcttcctcaaagttgagtggtgaaaatacaagttcagacgaggcttctgattctgaaacatttatggctccacacgttcttgcgatgtcagctacccctattccaagaacattggcacttgctttatatggtgatatgtctcttactcagatcacggacctgcctcctggaaggcaacctattaaaacccttgctcttgaaggaaatgatgtagggtttgaagctgtcttccagatgatgagggatgaactgatagacgggggcaaggtctaccttgtgtatcctatcatagatgagtctgagcacttgccacaactccgtgctgcaacagctggatttgattccataaagcaaaaattcgaaggctatccctgtgggctattacacggccgcatgaggagcgatgagaaggaagaaactctcaacagttttagaagcggagaaacacgcattctcctgtcgacacaggtgatcgagatcggggtcgatgttcctgatgcttccatgatggttgtcatgaacgctgagcgatttggaatctctcagctgcatcagctgcgagggagagtaggtcgcggtgagaggaaatccagatgcatattcctggcttcaacttcgagcacgctgccaaggctgaaggtgctcgagaagtcctccgatgggttttacctggctaatgcagacctgctgctccgtggccctggcaatctactaggtaaaaagcaatctggtcatcttccagaatttccaatagctagattggaggtcgatggtggtattttacaagaggcccatcttgccgctctgaaagtgctggtcgcaagcaacgacctagcgttgtatccacggctgaaggtggagctcagcatgaggcagccattgtgcattcttggagattgacatgtcaacagtactgctcgtaggctcgtagcattgggcgacgcgtgtactgtggataactattggtcgtaggctcgtagcgtcggcaaagttgacatgccgtctggtgagcgaggcgtgtaccatgaataactgttagactgattgtgtgagtgtgtgtgggctggtaccattgttaggctgccggttcattagggttagagttgagtctatatattgtaaccccttctctatgcaatacaatgatccacttcactattctacatgttattagactaggttagggttttctgaaacccacagtagccaccggtcgcctcccaccccacagcagccgccaccacctgagccgtcgtcgccctccaggaggctcctccctctcggggcggcacttgcccctggcgcggctgtgcatgggcgcggcccctcgtagctcggcgcgggagtggcagcccctggcctcgacggcgcgaggcgcgaccccctggcagtgtggacgcgacggtccgtccatggcggcgcggccacgccggccccggcgcgggaaacggctcggcggcgcacgacacggagcctcatcacgaggcaatggtggccacggcgccgccctggcggctggctcctccggcgaggtacagcctcggcgcgacctaggcgcgagcgtaggctcgtgggcctcctct

SEQ ID NO: 27932 - DNA, 3817 bp, Zea Mays
aattccaattttctcctacctaccactgccggactgcggaatccggaggtatatccgcaaaacccaaggagaacccccacccgcttggctcgccatggacctgcagctcgcgccaccaccccacgctaacctccgcctcctcccccgccgccccaaggccgcctccgcctccgcctccacctccgctgtcaccgccgcgccctccacctcctgctcctcttccgcggagcccctcaagccccgcccacgcctcccgcgccagagccccgcgcccaggcccaggcccaaccccgctcgcctccccgccctctgcgctgccatcgagcggcacgcggcggctggccgccacgctgaggccctcgacctgttccgcctcgcccgcgcggcggctcccttcacgcccctcccggcccgcacctaccacgccctgctccgcgccgctgccgcgctgcgggagcccggcgcggccgcggcggtggcctggcacgtcgagagctccggcttcgagctcgacctgtacacgcacaaccacgtcctgaggatgtacctcgagtgcgggatgctcgccgaggcgcgccaggcgttcgacgggatgcccgaccggaacggcgtcacgtgggggatcatgatgggcggcctcgtcgaccggggccgcccccgggccgcactggcgctgttccgggagatgtgggcggaggccggtggggacgctccgccgaggtccctcgtggtggctgtccgtgcggctgcgtcctcggggtcggcgcgagccgggcggcagctgcactgctgtgttgtcaaggcgggggcgtgtggtgacgtcgctgaccggtacctgacgtgcgcgctgctcgacatgtacagcaagtgtggccggattgacgaggcgaggcgggtgtttgacgggctgccacgtcctcatcggacgactgtcgtggcatggaactccatgttggcggcgtatgttctccatggccacagcgaggaggcgctggagctgtaccaaaagatgtgcagcactcatgtcgccatggaccagttcacgttctcgaccatgctaggggtgttctctaggctggggctgctggagcacgcgaagcaggcgcacgctggcttgatccagagaggattgccactggacattgttgggaacacggcgcttgtggacctgtactgcaaatggggaagaatggaggacgcgagaaatgtcttcgagaggatgcctaggaggaacttgatctcatggaacgctctgatagctggatacggctaccatggcatgggagataaggcgatcgagatgttcgagaggctgatagctgagggtgctgtgccaaaccatgtaacttttctggcagtgctgaatgcatgtaggttttcaggtcttgttgacgaagggaagaggattttccagttgatgactgaaaatctgaggataaaaccacgggccatgcattatgcatgtgttattgagctttttggtagagaaggtctacttgatgaatcctattcaatgataagaagagcaccgttcactccaactgcaaacatgtggggagccttgcttactgctagcaggatccacaagagcatgcatcttgcaaaattttctgccgagcagctattggcaatggaacctgagaaaataaacagctatgttgtgctcctcaacttgtatgttagctctggtagacaggacagcgcctgcaaggtagttgaaacactgaagaggaaaggtttatatattggtaatgcctgtagctggatcacagtcaagaaaacggatcacaggtttttctttaaagatactttgcatccacaaagtgctgaaatatacaggaggctggacacattaatgaaggaggtacgagaagctggctttgttgctgaggagaatgaattgctccctgatattcatcctgacgagcaaaagatatcaagagcttaccacagtgagagactggcaattgcttttggccttatcagcacagccccacagactcccttgaggatcagtcaaagccatcgtttgtgcagtgactgccacaatttaattaagtttgtgtcaagagttaccaagagggaaatcattgttagggatggtagcaggttccaccactttaaactcggggtctgctcttgtggtgactactggtaattggctaatgactccaatgtttcaagccaattatctggaaattactttgattaatgaggataaagcagattggtcgaccatgatgctccaatgtttcagtgctacatgcaggcttggtaagtttggagttattttttttaagatgtcgaaagagtaatttagaagtttcactcacatggatgtgtccattaccccttccttttccttttaattaaaggggcagaacgaatgttggaggctctcacatgagtagggtctagagaagggataaaccgaggcaaatctttccctgccaaatgcagagagactgcttcgaatccgtgacctggccatttagcgagacagctctccccacacaactaagcttgcccttctccttttcctgttaactgtcggcaaaaagttttagtgtctttattttgataagcaacatcttgcgtgcctttatctcggtagaaaagatggcttctgtgatgtgttcagtagaaatgtttttttatatgacaatcagatagattgcttttccctgcgcttccactctctttacaaaccttgtgtaaaagcagatctttaaaagtaggctgaatatgtgtcatgtcatgtggctttcacattggagataccaatccttaattgtgtcctataaggaaggaataaagctctgatgtaaacgaaggatcaaagggaagtataaaactttgagcatcttgggacagctagtttcttcttgcttcatgactgcatcctggtgatcttccattcagcaaccttctcagctggtacaagtccgagagcacgctacaatggcgaggatgggagttgctattctggtctgcgtagtggttttagccctggacgtcacagctggcatactaggaattgaggcgcaggctgctcagaacaagactaagaaggtgacgatcctcttcatccagtgcgagaaaccagtgtacagagcgtaccagcttggcctcgcagctgcagtgctcctggtagttgcccacgcggtagccaacttcctcggcggctgtgcctgcatctgctcccagctggagttcatcaaggcgtccatcaacaggaagctggcagccaccaccataattctctcatggatcgccctgattgccggattctcgctgctgctcgccggcgccatgtccaactccaagtccaagacgtcgtgcgggttcactcacggacacaccttggccctcggagggatcatgtgcttcgtccacggcgggatcaccgtcgcctactatgtcaccgccactgccgcagcgcacgaggttccttagtcgagcattttgcccgagagatcaccgctgttctttccttggtccagctgctccttgcttttctccttgtgatttgacatctacaagcatccgaagatatatgccttttttccgttcaaaaaaaaagaatacatgcctgttgtttgatttgttgctattgctgaggaaaaaacatgtcaaagttagcgtcagtgtgccacagtaatttaatttacgttgttgagaaagacaataacgccgctccatcttgtctcctggtgagggaggctacctcaagcagaccgtatatacggacagtgtataaaagaccacactgttttgcactgtagtagagtataatgtttgcatagtgaaatttaaa

SEQ ID NO: 27933 - DNA, 3588 bp, Zea Mays
cgccgcctgcatgtgggacccacccgccaagccgcccctctcctgtttatcttctctgaatcgtctcccctgcctaagtcgcccacgacgcatgaggatcggcaacaacttccaccggccacccctattcaaacgcacttgtctacccccacttctttgtaccgcagccgttcctcctctcgcctcgcagcaacacgctcttgccgtcacgtggtgcctcggccttgtagccgtgtctaatctccgtcgagcagggaaccagcgctaagctcgccgcgatgtcgccttgccaagtcgccgtcgtccatcgcgatggagttctttatcgccgttcacattttgtcctcgccgtccgagcttcgcgttgaggttttgggtgtagatatatgcaagttggctattctctcctcatggcccacgtgggtagattggatggagaaagacggaccactgttcaaactgcctcagagcttttatgagaacttctctagtgttttctagagctgaaggcgcaaagatggaacacaagtgcttcagtgaaatttgatttctgcagctaacttaaatgcatcgatgttgtctctgcatttttcaaagctcacattagttattcagtgaacccagattattttttaacatcattaaaatcaaaaggattccactagaaacgttgcatgtgaaaatttcctgctttatttcgtgtctgcaaaggtacgtaccactgattccaccataaatcttctccacgtttggttttaggtactaatttttagtccctctaatttagtcctaaattatcaaacacaatgactaaaagagagattatctctattttagtcaatattcttgacaatttagggattaaaattaaggcttagaaaccgaacgccccctaactctgctgttgtttattatttgtaagaattattgatagtttgtagcaatttaagtgtattatttatgagaattattgacggtttctagcaatttcaagatgcaaattctgcttgcgaagctgactcgtgtgctctgtatttgtggatcttctgcactgtacacacatttgtcaccatgctagatggcactgatgatagtacggaaatcagttcataaagtgttgtcgttgtctcaaaggggaaaatagaacccaagagaagatggcagatgaacacattttgggacatgtctgtgacagaaaatctgtcaaccagcctagctccaatggccgacagcgtcccattaggtactgaggctaaaaatggaaaacaaatgccaaggaggggggagggcagcggctctcgtcctggaaatgtggcatggcggtgcggtggagcactggaggttgggcaatgtgacgctttgaagcctacttccctttcctccgtctctgtggtttggtttcaaccccttcgcttcttccgcagaagaacaaggagaaaagggaggggttcgtcacgaggaggaggaggaggaggaggtgcgtcgttccaatcgaaccccggcgcacaatctagaggccggggtggatcatcatcctcaccaagacagaactccatccccgttaaggtgttaaacattaatcatggccacaccgccagacggggcgcccgctggacctgatgacacgtcgccgccgccttcttccaactcgtcgacgccgcctccttccgactcatcgacgccgccacccaagtcctccggctcgggctcgccgtcgccatcgccacccgcaccgtcgttgtcgccgccaccaccggcgtcgccgcaggatagcacggcgccagcggccagaggctcgccggccgcgccgtcgagggactccccgtcaccaccggctccaaagcgcagcgacagtgactccgataatagtggcagcagcaagagcggaagcggaagcggaagcagaagcagaagcagcgggtcgacgcaggtggatgtcatcctggccggcgtggtgattggggtcctggcatttagcctgctgatgtgcatcgccgcgtgcgtgtgctgcgccaagaagaagaggaggaagaagcccccgcacatgaacatgccgtactacaccgacgagcacgggaacgtcttctacgcgaacagcatgcccaagtggcagagcagcgcgatggaccacggctggcacgcgccgtactcgcccgcaagcggggacatgagcggctcgcacgggccggggctgggccagatgccgccctcgccgggcatgccgtcgctgggcttctccaagagctcgttctcgtacgaggagctagccgcggcgacgggcggcttctcatcgacgaacctgctggggcagggcgggttcgggtacgtgtacaagggcgtgctcgcgggcagcggcaaggaggtggccgtgaagcagctcaaggccgggagcgggcagggcgagcgcgagttccaggccgaggtggagatcatcagccgagtccaccaccgccacctcgtctccctcgtaggctactgtatcgccggctcctcccagcgcctgcttgtctacgagttcgtgcccaacaacaccctcgagcaccacctccacgggaagggtgtgccggtgatggcctggccggcgaggcttgccatcgccctcggctccgccaagggcttggcttacctgcacgaagattgccaccccaggatcatccaccgtgacatcaaggcagccaacatccttctggacgagaatttcgaggctaaggtcgcggatttcggacttgccaagctgaccacagacaccaacacgcacgtctccacgcgtgtcatgggaactttcgggtatttggccccggagtacgcgtcgagcggcaagctcaccgacaagtcggacgtgttctccttcggcgtcatgctcctggagctcattaccggcaggagaccggttgatcccacgaactacatggaggacagcctggtcgactgggccaggcccctcttggcgcgcgcgctgtccgaagacaacttcgacgagctgctcgacccgcggctggagaacagggtcgaccggctggagctggagcggatgtgctcctctgccgcggcggccgtccgccactcagccaagcggcggcccaagatgaaacagatcgtccgtgctctggaaggggacgcgtcgctggacgacctgaacgagggggtgaagccagggcagagcatgatgttcagctccggatcggagtacgacggggccaactacgcggccaacatcagcaagttcaggaaggtggccttcgagagcagcgagttcagcaacgactacagcgggacaagcgagtacggcgccgactccggggaagcggcgacccagcggcagcaacatcgctgacctcctcgtccgagatgcgtgtgtggtgtacaatatttataccaaggggtcgatgtcgactgtcggatactatcagagatacccaaccctcgatcgtgacagctttagtacatgtaatgatgctcataaaatgtcatgtaacgtacgtatttgtgtgtgacatgttgctgcttgcttgactggcgaatttcgctgcttagttgtgcaaattttgctggcgggtgtccaaatgcgccgagggattaggaactttc

SEQ ID NO: 27934 - DNA, 1630 bp, Zea Mays
ttatacttcgattgagtgtctattacatatcagaataatttcatcctctgctttcttgagtgagttgcgctaagacaaagctgacaatggtgtttttactgaaggggagattcatatttggtcctgatgcaagatccttgtttgtcaccatgttccttattgttgcgccagtatcaatcttctgtccattagttgcgaaggaattgatggataaattctcttatggtctgggattaccggttatgattgcagcagttctattcacagcatatgatctgagtcttctgcttctaacttctgggagagatccggggatcatacctcgcaatgcacatcctccagaacctgaagggtttgatgacaatgcagaggttggggctaaccagactccacctgtgcgtttgccccgagtgaaagatgttgttgtcaatggaattactgtgaagataaaatactgtgacacttgcatgttgtacaggcctcctcgttgctcccattgctctatctgcaacaactgcgtggagcgttttgaccatcactgcccatgggttggacaatgcatagggcttaggaattacaggttcttctacatgtttgtattctcaacaactctgctctgcctgtacgtctttgggttctgctgggtgttcgttgttaagatcagaaatgcagaacagataacaatttggaaggcaatgacaaagacccctgcatctgttgctttaatcatctacacattcattgcggtttggtttgttggtggcctctctgtgttccatttgtatctcatgagcacaaatcagacaacatatgagaacttcaggtatcgctatgatcaacgagccaacccatacaacaggggaatcatggtaaacatcaaacagatcttatttaccacgatccctccttccaagaacaacttctgtggtagggtccaacaggagcatggtctaaggcctcgtccaacaaatggtttcatgagtccaaacatggggagagctgttggtgacatcgagatgggtagaaaaccagtggcttgggatgagcctaggatggcagctgagattggtgatttaggagcaggtctgagcaacctgctggaggacaaggatggcaggtttcgtagcgcatctccagatctcagccgcgacgcccttgcagttggaggaggcttagaagaggaaggctcctcggcgatgaacgctgggcgttcaagctggggagttgaagcaggtcgatgatggcattgaccgtgtaagcggctgtagtgagacgctctgggttgttagtgccagttcgctgctaatctgttgttttgtttgagatttgaggtcactaatgttattagactcatgacctgtatggcggttgtttctggactttcttttcttctttctcttaatttgagatgtctttcgtgtctattatttgaaccagttggtttgtgacgtctcccggtttggcaagttatgttttgtctgtatataatcggacagtaagcctaaaataggatccagctgcttggatttggatggtaatggttgtgaataatgccctaccttttgcattgcagtaactgaacattgctcggtcttggtgcccatgtcaagattaatttattgctttttcg

SEQ ID NO: 27935 - DNA, 1619 bp, Zea Mays
ccgaaaaacaagaaccatcgtacgggtgacgtggccaacacttccgtttttgttccggccaggcggctcgtgtccccgcagtcggcaggagcgcggacgcagatccgacggcctaggggcactccggggaggccacgcaacgcgcgcggcggcaggcaagaactccgaagtcggcacggccgcacggccgctacgatacggcgccctcacaattgggccgttataaaacgtcacaggaggaggagataggcacacggcgtgccgcggtgggcgaccttttttgcaccgggagataaatcgacagcaccctgacctcaagtcctcaacccgcaggccgcagctgctcccgcccgccgcgcaagcggccaagcgccgccggttcttctcgagcaattgggaagcactaccctgaaggacggccgcaccatcaatgttattgatacaccagggttatttgatatgagcattacatcggacgaggctggtaaagagattgttaaatgcatgaacatggctaaagatgggatacatgcagttctgatggttttttctgccacatctcggttttctcgagaggacgcaagtacagttgagaccattaaagtcttctttggtgaaaggattgtcgaccacatgattttagtcttcacttatggagatttagttggtgaatctaagttgaagaaaatgttaaataatgcgccagagtatttgcagaatgttgttgagctatgccaaaacagagtggttgtcttcgataacgtgactgaagaccgaaggctccaagcgcagcaacttgacaaattgctcgatgtagtggattcagtttgtgcaaaaaatggaggaaaaccattttcagatcaaatgttcactagcatcaaggaggtgcatgatagagaaaaagaggtgcatacctcgggatattcagatgagcagatatctgaattgaaaaaggagattcatagaactagggatgaacagcttgcgcacataaccaacatggtcgaggaaaagttaaactgcactgtggagaagttgcaacagcagctcatggaagaacagaacgcaaggctggaagctgagaaggtggcgtacgaagctaggctgaaatcagaagcggagatccagaagctcaaggagagcctcaagaaagctcaaatggaaaatgatgagttccggaggatggcgcagagccagggcagtaaatgtgctatcctataggcattagtacttgctagaaattggtggagctatcgtgctgacgcgtctcttgtacgtagtactttctctgttccaaaaatatatagttcaatacaccttagtagagatgactacgagagtatccaaacaagacctcgtcggacatgttagcctgaagcttgcttatggacatattggatatagtttttgggtgagaacttttgaacaacttccttgtttttttctctcatgttctaatgcatcttttctctagctgtatgcgcacaacattggagttgttccccaccaaatagaagcattagggatcatccgacaaagaaaacgagtatcctctttctcactagaattatcatgacgaacagcaaaaggatgaataacaccgtcttcgtcttcattgc

SEQ ID NO: 27936 - DNA, 323 bp, Zea Mays
cgtagacctccacaaccccgtagcgccattgtactccctgtccacatcaaaccggtcgaaggtgaggaccgccgctcgcaccaccgcagatccacgcttttgttgtcaatccgtgccttggtgcgtgtcgtcgtcctgcgatgtgaggcggtgaagccatccaaggcgctaccgggcaggatcgccgaccatcccgcctccaatttctcgccgacgaccacgaaccgcagctcaccgaggccagtccagacgaccccacggttcacggtaaatcatcctccaacggttttactacagtggtggcaagcgatttaacctagtat

SEQ ID NO: 27937 - DNA, 2716 bp, Zea Mays
agtcgtccccgtccctccactcctcccgtcgagcacttggcactgccaatggcggcagccgcccacaccccttcgatgcgcgcaagccgcctcctttcctcctgagatcgacgcacctcctcctctcgtactccattcccgctccaagttcgtttcttcggcaccgagccatcgcacggccgcccccgcatctcgtcctgctctcaggtccttggcctccgccgttcttcgacaggggcgcgccccggtgcccactccgcgaaatccgagtcccttgtgcagctccgtagggtggaagagatccatcaggcggtgagcggtaggaggcgcccgtacaactgaggggacgggcaatggcggccgtggcaggcccactctgcacgtggctcgtcgccgcgtgcttgtctgcggcttgcgacgcagaagagtacaagcagaagcattgctgccccggcggaagcggcgctgggggcggcgtcatgctcggcctgcgccgccgcctcggcgcgcggcgtcgcggcttggcgcgctctggaatggctatggctgttgccttacaagctgaaagaagtgtcattgaaaagaagaaacccgatatcaaacaaaggagggtggttgtcactggcatgggtgtagtgacaccattgggccatgatcccgacgtcttttacaacaatcttcttgatggtgttagcggaataagtgagatagagaggtttgactgttccaacttccccacgagaattgcaggagagataaaatccttttccactgatggttgggttgtacctaaacttgcaaagcggatggacaagtttatgctatatctgataactgctggaaagaaagcattagaaaatggtggactcactgaagaactgaggaacgagttggacaaaaccaggtgcggggtcctcattggttctgcaatgggcggcatgaaggtttttaatgatgcaatttgaagcactgagggtctcttacaagaaaatgaacccattttgtgttccttttgcaactaccaatatgggctctgcaatccttgcaatggatctgggatggatgggaccaaattattctatttccacagcctgtgctaccagtaacttctgtatccttaacgcagcaaaccacatcagaagaggcgaagctgacgttatgctctgcggtggttctgatgcacctcttatcccaatcggattgggaggttttgtggcctgcagagcactttcacagaggaacagtgacccaacgaaagcttctcgaccttgggacatgggccgtgatggttttgttatgggggaaggggctggtgtcctcgtattggaagaacttgagcacgccaaggaaagaggtgcaacaatatatgctgaatttcttggtggaagcttcacatgtgatgcttaccacatgactgagccacatcctgaaggaagagggattactctctgcatagaaaaggcactagctgatgcaggggtagcaagggaagaaatcaactacgtgaatgcccatgcaacttctacacaagcaggtgacctgaaggagtatgaggctattgtgcgctgttttcgccagaaccctcaactgagggtgaactcgaccaaatcaatgactgggcatcttataggagcagctggtggaatagaagcagttgcttctatacaagctataagaactggttgggtccatccaaatttgaatttagaaaatcctgaggacactgtggtaagctccttggcttgtgtagtctgtgtggcgagtattctcgtggtgttttgccccgcaaggagttgtaagagtcgtctagactcctttttctttctttttaatataatgatgcgtaattctcctgtgtgttcgggaaaaaacaaatcttctttctacttctactaaataagctagatatgaatgaaagagcaaaatctatatgttgaatggtgttttaaatttttaatgttggtcttgatgcaggatgtgggcatcttggtaggatcacagaaggagagatgtgaggtgaaggtggcgttatccaactcattcggcttcggtgggcacaactcatcaattctctttgccccctttaaggaactgccatcttcctcatcgtccaaatagattcatatatctggatctccacatagaagacaagtggactctgcaacttcctcggtgccatagatattacagggaggtccaaactgagcgtatctgagcgaacaaaacatcagcccccctacatgtttcatctatatcacgaagttgcagatatgtggtaactatcaaaaggatttaccgtacctgggccagtgttttcgccttcaccatacctgcccattgtcagtactatttcctagatttggagtagtcccgtagctaatcctcttccctgcggaggtgatgggattttatgttgtattgatgttgtcaacaatgtcgttcttagccatgaattgctggttccactgtaagcaccgctggatgtttatcgctttggctgtttttctgctgttcataactgagttaaagatttgtaaatggcgacgctgttcggcctttgatcatctgtgaaacttgagcggagggagcaacaagtatggcctagcctagcagtacgctagtgcctttgaagaaggcaggctagctgctgctcctcaaagtttagcacctagccgaccatagtctctttctcttttacagtcttctctaaaaaatc

SEQ ID NO: 27938 - DNA, 986 bp, Zea Mays
gtgagttttatctaaaacttaggtgacgtacaaaactctcctggcagcacgcatcaattatggatcactacaggaggtccaacagtgtttagcgatatatcaggagatgaggaaagcagggtttcaggcaaatgattattatctcaaggaattaatagtggaatggtgtgaaggagttctgtctagtcgcagtgataatcaagatttttacaatttggatctacaacctgagactgagaggaaagaatcgttcaacctgtttcttgagaaagtcgtaacagtcttgcaaaaagatactgatcagaaccaaattgtcgatgttcgtggcctttcaaaggttgaagctcgaattgttgttctctctgtccttcggaagatcaaagagcaatacctcctaggaagagtggtccaggatgatgtggttatcatcacgggtcatgagaagacatcaacaactgaagctgaaaccacaactagtgcagttgacgtcgtgcaggcaatagttactgttttgacggatgatctgggtcttgaagttttgattggacctggaagctgccctcccgtttcatcaaaacccaaagcaccgactaaatctagaagtaatttagagcaaatatccaaagaatttactaggagaccacagggaatgataaaaatccctatcaactcacttaaccattggttaaggaagaaagccgtgaggattgcagagtgacatttccttaaaggcttaaactacctttttggtccatttagtataccagtaaatcagcacagctattccaggattgggtgtacatatgaaaacaggttactgctcctggtattccaggcacactgacacgacttgaaaagggacttgttggcaggcaataaactgtgcttctgtgttgatttaatggtcgtgtttctaaaggcatcaagcattcatactgttatatatcaatgtccagttcatttccattcaaaccgggttatcccat

SEQ ID NO: 27939 - DNA, 1476 bp, Zea Mays
gatatgatttcattagtgttgaagagaacctagaagaactgtccaagcttgaggaaggtaaattagtttgtagtttttatttcataattgtttctactatgttcttattgatttcagattttactaatttgtttactccttactattactgcaaagttttgtgacctcactgtttctaaggaggcaacaaccacccctaccaattcttgagcatgaaaatttgatgaatgatgaatggtgaatggagaatatgaggctatcaaagtttaagctcaaatatgtgatctgtaatctcaaactatcattaatgggaagttatgtaatgtatgacttgaagagttgaagtctggactctggaccatttaaatttgttgtaatgtttgttattgaatttgtgacttgctactagttattgtggacttatattcattgttgagtgttgtgctgctggttatcagtgcatgtgtgctgctggttagtggctatttgctgctgtttattcaattttgaatacagtcatagcacaggagcagccaaacaaagctaactaagatggatttcggatgtttagtttaaaccgaacaccgaaccgaatagctcggttttcttttgtgagacacggagatcagtctgctctatctgtaaaccgaacttctacgataccgaaaaaaccgaaccgaaaaaccgattgcataggctagtaatggtcccgcgccagacggcccagcagtggctgcacctcggtcccagctgtcagcgaacggcaacgaggtttctttaatggaagagcaaaggcaagaatctaccaaatctgatgatgagaacaaggctaatgatggagatccatcttcgaatgaaactgagccatcaaatggaaagactgatatcaatgatacacctatggatgaatctcaggcaacagatgaggatggtcgagattctggtaaaaacggcggtggaacagacctaaatttgaatttaggtttgaaagacccggatggtgataatgaagttgagacatcagagaaacatgtagcggcaaacaatccgcagacagagaatagatccaagaggaaatccgtaacccctgaccttgagatgacaatgtaacccagaaatttcatttgtcttaattttactatttgccatgagcccatgaggtgtgtaactggggtacgttctcatcgtagaaacatttaagtaaaatcgattacaggacatacaatagtgtgaactgaagaaacctttttttactcgaacatggagaattgtctaaagtcattgtcaaatataatttaattttccagagatgttgggaattggataacatgtcttcagaacttatttgcaaaatgttcttttattgcaagtgtatcttgattgagaaaccggaaaccgagggaacttcccgcttaggccttgttcggttaatcatgttactatgtattggatgaaatggaaaaaaaataataagaa

SEQ ID NO: 27940 - DNA, 2656 bp, Zea Mays
ctaaggcatgtcgaacacgttccacatcgaaggaaatgcaagatggcgccgccgctcagcctccctccgccccaccactccctcccccacctcctccgccaccgccttccgctgcgccgcctcgtcgcggcccacgctctcgccgccgtcgccggccacctgtcgctcccggatccgcgcccccataccatcctcatcgtcgcctactcccgcctcgagcgccctttccccgccgtgctcctcctcttccgctcctgcctccgccgctccctcgcgcccacccgccactccctcccgctcgccatctctgccgccgcctccgcgggcctccgccacctcccgctcgcgctctccctccacgccgtcgcagtttaccgcaacctcctcccgttccagcatgtggccaacgcgctcgtctccctgtacgccaggcacacgcgcctgggcgacgcgcgcagggtgttcgaggaaatgccctccgcccctgacgtcgtctcgtacaacacgctgatgcacgcttacgtgaacaccgggagtgtggccgtcgctcgggaggtgttcgaggggatgcctgtgcgggacgccacgtcctggggcactgtgatcgccggctctgccaaggcggggcagctggaggaagcgatggcactattcgacaggatgctggaagaggggttcaggcctgacgatgtagccctggccgcggtgctttcatgctgtgcgcagctaggggcgctggacaagggccgggaggtgcatgggctcgttaagctgagcaggccccggccgaacgtgttcttgtgcacggggcttgtcgatctctatgccaagtgtgggtgtgttgaggctgctagggagatgtttgaagcatgccaggataggaacgtgtacacatggaacgctctcattgtcgggctggcaatgtatggccacggaacggtggcgctggagtacttccaccgtatggtggctgatggaattcgtccagatggccacgctggccttgtggacttggcaaggcgcatcttccatgacatggagagtgtgcacaatgtgccacgggagctgaaacactatgggtgcatggcggacttgcttggtcgggctggactcattgaggaagccatgaacatggtaaggaagatgcccatggaaggggacaattatgtatggggaggtattcttgctggatgtagaatgcatgggaacgtggaggctgctgagcttgcagctcggcatttgttgcaactgaacccagatgacagtggggtgtattctgccatggctgggatctatgcagctgcaggtaggtgggaggatgtcgtgaggattaggaagttgatggatgaaaggattgtcaggagaaatgttgcatgcagctcaattactacagagctcaaagatggtactattatgctgagctgattcatacattgtgctatgccagtggactgataaatcagaattcagaacactgaaaatggagagcagttcggaaaagagaactggcaagaattgcaatgacaagcctcacaaacatagttgttaaaatcacgattctatcgtgtggtgttacatctttacgatcttacttgattgggttgattctattctgaaaaaaaaaactacgattttgcaattatagtattcatgactccatgatttatgattatcggagttccaattccattcaggatcatgattttgacaacctgctcacaaagactcaagatgcaggcatacattcatttattctgccaaatgtgaatctgaggaagcaagggtggagagtcatcttacagtgtgacatataacgtgatggttgctttccttcatgaaatacggagccatgaaatttttgggaactgggttttcttgtcaaatcaaatgctcattctgacaccagcaaaggtagctcataagtgaaccgaagagaggtgtggaaaaattcatggtgcagtgcaactaaatttctttgatggctactggacccaatgcaatatatttcgcaggaattcaatcggaaagttgaacatagctctggacagtgcacagttcacattttatcccacacaaaaagtaccaactggagacaagaaaacaataaagtttacttgttctaccattgatttacttcagcacatctctactcctataaagtactagattcaaccgtcgtcgtgtatcgtctaatgacgacctttacctctcagatgggccatgatggccccaacacgacatggagatctacgtagcacagcattcccgaatagtattatcatgctagctaatgaaggacgagtgactgaacgagttataaaaaaagagtgtattttcttttcaaatcatatcttttttggtcttttaggtaagataaagtacactatatatgagccacatatccactttatttttaaatttatttttgtagggatggtccatcatattggcttgtcattagagcctcatgtgtcgtatcgttgttgtaatataccattaaatatgattggtgtgccgttgtaatgtattggcattgtactactgatttatccatgccacaattagtgtcttcagttcatttgtatgttttttaagccaaggcactcttgcagatgtaagatattgaagcttggaattgagaataagaatctggtct

SEQ ID NO: 27941 - DNA, 3275 bp, Zea Mays
ggagagacgcgacgcgaggggagtggaaaaaagcagagcacagatagagagagaaggggagggaaagagagagagagagagagagaaaaaagatccccgtccaccgcccacccgctgcgccggcgcccggctgtgcacgcacggacggacagacggacctccccccaagcggtgccggattcagtgcggtgggacaggggctgggacggagtgggcgacagatcgagcgctagcgatgccgcacccgacggacccggaggcggggtccgagcagaaggcggaggcgccggcggtgcctttggcggctgcggcgccggctccggtcaagaagaagcggaacctccccgggacgccagatccggacgccgaggtgatcgcgctctcgccggggacgctgctggccacgaaccgcttcgtgtgcgaggtgtgcggcaagggcttccagcgggaccagaacctgcagctgcaccgccgtggccacaacctgccctggcgcctgcggcagcgcggcccgggcgcgccgccgccgcgccgccgggtgtacgtgtgccccgagcccgcctgcgtgcaccactcccccgcgcgggcgctcggggacctcaccgggatcaagaagcacttctgccgcaagcacggggagaagcgctgggcgtgcccgcgctgcgccaagcgatacgccgtccaggccgacctcaaggcgcacgccaagacctgcggcacccgcgagtaccgctgcgactgcggcacgctcttcaccagacgggacagcttcgtgacgcatcgcgccttctgcggcgccctcggggaggagaccggcagggtgctggcgccaccagcgccgccatcgcctcggccgcctgatttggaggctgacgaaaatgttgctgatttggaggctgacgaaaatgttgacaaggacaacgacaaggagggggaggaggagaatgaggattctgccgtggccgaggtggaggagcctcggcgtgtggaggtggtgccagaggagccacagcgcattccatctccacctccattgccgaaggagccaccgtgccgtccgtccccacctccattgccgcaggagcaactgtccccacctccgtcgccaaaggagccaccgtgctgccatccgtctccacctccactgccaaaggagccacagcggcttccatttccaccggagcagcatgcagttgtggtggcattggtgccaaatgtggatggtgtgctcctcttgcattctgttcgtgtgcttgtcttattgcccatgcataagatgtgatgagacttaaagcaagttcttgctcttcaagtcaaccttcccatgcaacaagaaagcaatagccagaggtggttgctgtgccaagtgtgactgccgaattagaggatgaaaccgatcaagacgaagatgcctgtttccaggaagctgatcagtacaaggactcggagcttgaggtctccaatctgctggacaaggacaccccgatgcttccttgcttcctcgcgtcgccctcggaagccattggcaccgatggaagcggcacaacaacctgcggcgcaggtggcagcgtctccaattccatcgcgccgtctacaaccaccaacaccttcgccggcctcttcgcgtcggccacaacaagcaccacttcccacagcacatctctgcgcgatctcatcggcgtcgatcccaccttcctctgcctcgcgatcggagcgccgtctctgttcccgcagacgagcgcgagcaactcaggcaccttcgccctgctgccgccggcgccgcacatgtccgcgacagcgctcctgcagaaggcgacggaggctggagcgacgcagtcgagctcatcgttcttgaaggagtttgggctggcctcttcctcctcgtcgtcgtcgtcgcaaccttcatcgaagcaggtgccccaaggaagggtcggcgccgccgataccagcgcggaaccaccatggccgtaccggagtaaccagcaagtggatatggagcgtcgccagagtcatcaacggagggagatggagtcatgttcgcaacaatggcacccctctagtacccagcaaacggagatggagcgccgccaccggaatcatcatcaagagagggaaatggagtccagttcgcaacaatggcaccgccaccaccggaacgaccggcagatggggtcggagagctaccggagtaatcagcaaatgcagatggagtccagctcgcaccaatggctgcaacacagaagctctgagcaaatggtggggcggcggcaccacctggagagggtggaatccagggggatgctgctgtctggtggtggccttggtctgggcctcgcatacgaaagtggaaaatcaggcttgcctgatctgatgacgggaccatcgccatcgccatcgccactgttgggtcccaagccagccacgctggacttccttgggctcggcatcggcgggaccatggtcggctccacgggcctcccggcattggtggctggaggagagctggacatggggtcgtcggcgcaggtgcctgccccatgggacgacgcccagaggaaggccaacggccgcacgatcctgtgaggttttctccttttttttgggtgacctgaccttcttagaggagttcggtttgcccattctttttcagtcgcagctttgcttttggtggggctagaagctctgtgaggtgtagcagtgcagtgcaggcctgtacatagctcgacctcgacgctcctcccgatcctgcatctgtgttgtgtctgaaaaaacaccgagttgaggctgctattatagccacaattcgatcccggcaggatggatggaaatggaacctgactttgatttgatgccccgacgctttgggataatcggatgtgacggggcaacagggttattataaatcttgcggtgataattcattaattcgatactgctgttggaaagatccgagattagaacagcgatgctgacacttgaaatgtgccttttttttactgttatacctgctgctgctgctaagtcggcagtcggcacggttacttatacctaacctgccggtctgcaatcttcttccggagccttgctactttggagaagttttcgtgtacttttctgtctaaaataaacctgtttgtcggactacagttgaaaaaagaaaagaaaagaaaagagaggctatgacaggctctctccgtgccatgtaaatactagtacctttcacagctgttgctgtcagccggagctttgtcgcaaaacagtaacgactagtaaca

SEQ ID NO: 27942 - DNA, 1949 bp, Zea Mays
agcacacagattcaagcttgattacatttgaaacattagtatattcaaaacaaactaagcaaactggatttaacattctcgcataggacttcattaacatggattatcttttttgctgagaaaggtggggcccagagcaataagataagaggacaatggataaatcacatgtcccctgagcatgcaaaggttgcaagaaacgtcccaggtgtacatgttcaagtcggcagaatggtattcccactagatgatggtaggcttggggaactacattttcctgggatggggggtactgattttggtccgagtgcccaaagtaccataagaagaaaactatcaaacaagtacgagtggtccatcctagacgcaccagaaacagaaggttggaatgcagaatattgcaccgaagagcacggtccgacaaattgtattagtggagcaaagaatatagctgcagacacagaatcaaatgacttgagcaataacccaccttccaggaggcgtaaagtagaagagaagcagcactacctaaatgttaacagataccagcagagtgatgaaactgaatcatacaactttctatcaaggaccattgatcttaacttccacatgcgggtgatgcatgcagacagatcgcttttccttatagcagacaatggattgacttttgaatatctaaacagcaatggtgtttggttgtggttaagacatgaacatgttacagccatgaaaggaacactaggaagctacaatggcagtttgtatcttgtcgacgtgcatgggaacttacacattagagaaagaaatggagatgaactgttgtggattaactgcacagcgatgaagaagggaagacaggttgcaagtgggtctccatgggatggcatccctggtttattgcgcagagtgacaacagatgatgcactcttctttgtcaacaagcgaggcaggctgctacagttcacggttgcgctgcggaaattcaagtggaaggactgccacagtcctcctgacaccaagattgctttcatagtggaccaggaggtcttcagaagaaacatcatcttcgtgggacggccatgcggccatcgccgctgtccctggccggctccctgttcatggtgtccgagcacggggggctggtggagtaccacttcagcccacaggacgggtgggagtgggtagagcacgggacgccccaccggggcgtgaccctcgtcggcgcccctggcccgtgcttcgacggctcccagctgttcgtggtcggctccgacgggcacgtgtaccggcggcacatggaggggaggacgtggaggtggacgagccacgggcacccgccgtcggagccggccgccgttgacgaacagagctgcgccacaccggacacgggcgccggcgcgcactacgccgacgggttcagggggagctgcgacgggaaggtggcagccgtgcggccggtgccgttctcggaggacgccgtggtcttcgagctgcgagatggccggctggcggagctgcggcggccgccctccgcggacgggtgcggcgggtgggagtgggcgcggattatcggcacgccggccagcgcctgtatgaccagctactggacggccgtcgccacgtagccgccgccgggcgcgactcacggagctggcagtccgctggtcgcttggctgattgaggtctccttggaagttggaaatgatccacaacaacagcggtcacgtccatgtttcctcgaaagacggccacgtccacatgggtctaggccgtatgatggccagatttgggcgcccaaagaaaggcagaaaggaactctctcgaaaaaaaaaacggctaaccgttacattacatttgattgtctgtttggtaatgcatttttagaatactatagttttaaagcatatagtactatagtttacaattgtatataacataagtattacaat

SEQ ID NO: 27943 - DNA, 2189 bp, Zea Mays
cccccgataccttctctccccgacttttccttcccttcctcgcacgacgagtgacgacgaccatcccccaaccccacgccgcggagccgcaccaaatctcaccccgcatcctttagggttagggttctgcccgcacctgtgaattccgttgcgaaatctctcatctcctgagtcgagaatcgcagtttcccgctcggctcgtttggggaaatcggttattttcgtccggccgcgtgggctctctgaagcgtttgggctgtcggctatttgccccgagttttcaggtttgaaaaatcgtcgtaatttgttcatcacgcggctgccgaactttaagtggtggtggaagtttcgtgcctcggcgtggcccccgtgctccgattcctgatcacctgcccgccccgcacgctatgagcgcagggcgcgcgggctggggctcttgctgctcgggcacgcgcgcggggtccccgtgttaatgcctcggttgtcctgcaagttcgcggaccccgacagcgccgtttcctccgctccggtggcgcgccgcgtgcggtcagacacgatgagctgcggcagcgacgtgtgccgggacggcggcagcagcagcggcagcgaggagttcaggcggccgcggcccagcaaggtcgccgctgatgattcggtggcgcccgcccggagctcggatgccgcggcgccggcgtcgtggatcgacaggaagctgcttgttgatccaaagatgctgttcgttggggacaagattggggagggagctcatggcaaggtctacaaggggaagtacggtgatcaaattgtagcgataaaggttcttaaccgtggcagcacccctgaagaaaaagcaacacttgaagcccgtttcatccgagaagtaaatatgatgtgtaaagtgaaacatgagaatcttgtcaagtttattggagcttgcaaagaaccattgatggtgatcgttagtgagctactaccagggatgtcactgaaaagttacctgcatagcatacggcctagccaattagatacacacactgcaataagctatgcactggacatagctcatgcaatggactgtttacatgccaatggcataatacatagagacctgaaacctgataatttattgcttacagcaaatcgcaagaagctaaaacttactgattttggacttgcacgtgaagaaactgtgactgaaatgatgactgctgaaactgggacttaccgatggatggccccagaggttgtaaacactatctttctgcattaacttaaagctagtgcaattacatactgaaactaaaaccacagtaaaactttgctcctgtagcaatgtgctaggctgctagctgtatcatcttggttcttggtaccatttatttaacaaaaagggatactctaggactgatctgtgcaaagggtagctcatattctttctttatgtgatttgcagctatacagcacagtcacacttcgacgtggtgagaaaaagcattacacaaataaagtggatgtgtacagctttggcattgttttgtgggaattattgaccaatagaatgccatttgaaggcatgtcgaatctacaagctgcatatgctgctgcttttcagcaaaagcgcccagctctccctgaggagaccccccaggagcttgtgttcatagtacaatcatgctgggttgaggatcctgccatgcgacccagtttcagccagatcatccgaatgcttgaaactttcattatgacaatacatccacctccgctttcagagccaaacgaaggcgaggaatcggaagaaacgaggtcgtcactgagcagtaggagctcctctggctcctcgctcgtttctcgcgcgacaagcaagctctcggtcgtccgccacctcttcgtctcaaagaagacaggcaatgggaaggcgtgatgcgccatgccctgagacgcttttcttcggtgctgtaaagatgctagcctaggtgatgcgcaatacaagagggaacttgttcagtgtagagtagctgttgtattgatgttacaaaaggggaaagttgaagtgcagcttttgcaagctatgtatagctcgcagctcctttactttactgaaagtccaaacagccggctttaatccgaagcgaaccgagatatatattaaatcaaacaaccgactttaattcgaagaacagagatatata

SEQ ID NO: 27944 - DNA, 1733 bp, Zea Mays
ctagaccaccccactcatgtggtggaagcctttgacactagctgcaacacatgggaatatgtcgtttagcctgatttctgcagctgatgctcttctgggctcatctgcaagcaagtacagtgcattagactgtcagaggccagaactattgaataagaggaaagttcagggaaaaattcttttgtgtggctattcattcaattacatttctgggacagcctcaataaagaaagtgtctcagacggccaggagtctcggcgcagctggctttgttgttgctgtggagaatagttacccaggaacaaaatttgaccctgtaccagtcagcatccctggaattctcatcacagatgtcagcaaaaccgaggatcttatagactactacaattcttccaccgtaagagattgggctggaagggctacagcctttaaagcaacagccggtattgcagatggtttggcaccaacactatacaattcagctccccaggttgcgctgttctcttctcgaggacctgatgtgaaagattttagctttcaagatgctgatgtccttaaaccagacatacttgctcctggcaatctcatatgggctgcatgggcgcctaatggaacagatgaatcaaattatgctggtgaaggatttgcaatggtttctggaactagcatggctgcgccgcatattgctggcattgcagcactgataaagcagaagaacccaaagtggagcccctcagcaataaaatctgccctgatgacaacggccaatacactggacaaagggagccatcctcttagagcgcagcagtacaccgcatcagaaatgatgacactttcacgggccacaccgttcgattgtggcagtggcgctgttaacccaaaaggcgccctcgatcctggccttgttctagacgcaagccatgaagactacatcacgtttctgtgctcgatccccgacgtcaaccagagcgaagtatcaaacatagccggctcggcttgcaactccaactccaagggacaacgccccttcgacctcaacatcccctcgatcgccgtctctcagcttcgaggcacggtggtagtgaagcggaccgtcacgagcgtgtccgacgaaaccgagacctacaccatcatgacaaggatgccgccagaggtcgccctggaggtgacgcctccggcggtgaccgtggtccccggagcatcacgagagataactgtgaccctgacggcgaggtccgtgaccggcacctacagtttcggtgagattgccatgaaaggtgaccgcggtcacctcgtcagaatcccagtcgtagctatgggattcaagtaggtagaagacgactgtgacatctcctagggagtagaggataggaagagcgagttgtgcctctgtaatctgaggtcttgagctgcagaggaacgttgtataattttttcataggttgtagagaataagagttggcacaatgctgtaagtgttatgcatgccccctccaggttgtaaaatatatttgggtgccctaaatcctctgacatggtgactagaggacctcttgtattgtagtccagccttgttctgattctctaatgcatgaaggtttgaatctcatctggttttcttctatgtcgtttcatccagaattttaattcgtattgtgggcttaatattaaaattccccaaatatgggagatgtgaaatttcttgtcaggatggcacaatttttgggactttg

SEQ ID NO: 27945 - DNA, 3303 bp, Zea Mays
cccctcccaacggcgcccttcctccccgcacgctacgacggccgagacgaacgcgcggcttcctccccaccaacggcgccctttccaaaagcctcgacccgctgctctcgccgagatcccgcgcgtagcacgcgcggcttccttcccaggctggcgagatgcctccttctacgctcgcgcatgcactatgcccctgtcgttgtccacctcccacgcccacgcatgcacccatcccctcgtcacgcaaaccatagtctcctccgcccccgtgctcgccaccgcgtcgacttcggtggagtccagcgatagggcgaggtcgtaccccgacgactcccccccccccgacgtgtcgtcctagcccgcacgctccgcctctggcaccgttgcacaccacgccatcctcacccttcaactcctaaactgtccagtgggagacgatgccgccctcggttcgcgatgccgcccactcccacacgtcgtcgcgcgaagccggcgctcacttcgggccagatctacctgcccgtgtggtgttgtgcgtacgaccacctcgtgaagatgctgcaacaggcgtacgcgcaggtcgaggagctctccgtcgagcgcgagcacctcgtcaatgagctctagcttctacagagccgcttccacaagcgcaagatctgccaggcctgcctccagaagatggatggatttgatcaaacagtgaatgtgaaggttgtaatggcaactaatagggcacatactctagattctactttgttgcggccaggtagacttgacaggaaagttgagttctctcttcctgattggcggtagaagaggcctgtgttccaaggacttttgtcctgcgctggccaaagctgtcaaaactatgaaaaaggcagagaagctgctccttatatatagtaaagccattgtgagattctatttcaaaattcgattattcttctataactttcatgtctaatttctctgaattatgacacttcgttaaacttcctcgcttcaaatgcaaatggatctggtgagaagggtagaccaacagttggagaggaaggtgttctgatgagcatcatcttgttctgcatcatcactaatcaacttgttatgcacagtgtccgatgtgcctgtctcaactcgattggtattatgttgtgtgtttagtgattctggtttatcctttgggatgcttatgtgataatatgtttgtaatgtgtttttccagctaaggcatataattgacctaaaaaggcacttcaagcgggtaggaaaattcaaggtcgttctcaagtacttccaagtcggtacggtcgttgagcctgcatctgagttctactcaagtaggctgaaaaatagggaacgcaaggcaacattggttgacgagctgttatcagatcaatctctgaagagctacaggtatgctcatcatacttttgccattttgcatgtgcatcaatggacagtggcttgtttttcagtgcaagattttctataaaaattgcatatggtcttttgcaagatttcctggtgccttgtttcagagtccaaccatcataataattacacggttgtggtgtgtatatctaaatgggtttcactggttacaactaaggtgcatggttttaaagtcggctgactaatcgcgattagtcgcgattagtcggccttatcgcctggcatagcacgatcagcatggacgactcgatcagggcgactaggttacgactaatcgtcctggtcgccgactaatcacgattagtcggccgactaggtgccatgtccgactagcttgtgccaggtttgggcctgtaaaaaaatgtgtcctctgttatatgggctggcggcccactatctcctgtccacagtagaaagaagctctactgccactgtgccgcacagtacaagcacagtagaaagttagaaaccctaaaaccctaagccgccgcctctgcctcctctgccccggtggtcctcagctccggtggtcctcagctccggcgactgtctgctctctgctcccgtgctccgttgcgctcgcctctgctcagctccggcgctcgcctctgctcactgctcagctccagcaaccgtctgcagccagtctgttctgaactctgttcagagttcagtgctcacttcagttgttaatctcactatctgcaccctctgttctgaacttaaccgaaatgagcacctctacagatggtaatctccaaggtaagtgatctttaccttttacttttagtggaaacatcctttattttgattgcttgtactgctgtcctgctagacagctatagtgtactgctgtcgtgctacagttatattatattatatacatagggtcctgttataggtggacgactataggacgactaggagtcgactaggctcgactaatcgagtaaatcgacgactaatcgcgattagtcaccttatcggtggtcaggcgactagagtcgactagccgactttaaaaccttgctaaggtgttacataactgatagttaattagtatttttttatatgtcaagatatcagtccaacaggtttcttcgagatgcaattagcacttataacaacaacattgattttcttattagaccattaaattggtttcacggataaatttgttatcattcaaaattgtcttatgttgacattatgtatatatgctattcacaataacagagtcattcatgttggtgggcgtcttggatgaactacattttcttcaacaaagatggagctcatgcagattgatttagtccctttttgcaatgtaacatatatgtttcatacaaattttttactcctgttgcaacgcacgggcactcacctagtcatcttttaagagtggtatagcgcctttgttgcagcaggcagctacgtgcccacgtttggcgaggcgccatttccggccaccggccacgtcgccgcgcgcaggagagaagctaggcactacatgatgtcagccgaccaagatttttaaaaaaagatacgaaagcttgctacaaaataaaccggtccagtcacaagctagctagctagccagattaagtcgatgccgcactgcttgtatatgcattggattccatattgttctcttcagatggacatcaaatgttctgttcattaattaaggttaatcagtggcatcctatgtggaatcgtccctgcttacatgcatatatagtgcgtgcgtgcattatatgtatccattccacatgcatgcatctgtttcaccatctttaatttggatgcttatgcatgcatgcttctttactttgattattgtttttt

SEQ ID NO: 27946 - DNA, 1440 bp, Zea Mays
acattggaccattgaatgatcacagtccacatcttctaacaatacgtgaacggatttctgttggaaatgatggaggccctgttccagtacgactgttgagtgatctttttgacgaggctaagaaagccattgatgaagcaatagaatcggaaaatggatccctgacacattttgaggtttttactgctctctcatttcttctattctcacaacagaatgttgacattgccatcattgaagcaggtcttggtggagctagggatgcaacaaatgttattcgaagtactgaattagcagcatctgtcataacaacagtagggagggaacatctggttgcattgggtggctccctgcaaagcatagcaatagcaaagtctggaatcatcaaacaaggacgaccggttgtgattggtggaccattttcagaagatattgagcaaattattcgtgacagggcattcttgacacaatctcccgtgatatctgcttgtggtcatggcatcaagagctttacaaaatgcatagattgggataatggtaagccgtatcaacgctgttacatcagcattaagatttcaagggatgtacccttgtcgattgaaatgcatgacataaacctccagctgctgggagatcatcaacgtcagaatgctgtcacagctgcttgcgcagctctctgtctctgtagtcaaggatgggatatctctgacgcttctatccaagccggcttagaggagacccaacttcctggtaggagccagtttctcacagcagaggaagcctcggcacttgggttcgatagcgcatccactgtactaattgatggagctcatactgaggaatctgcaaaggctttatcaggcgtgataaaaactgtcagaccagaagggcctctagcgcttgttgtcggaatggctagtgacaaggagcatcttgcgtttgccgagcagcttctctcaggtcaaacgcctgacgttgtgctgctgacagaggcgagcgtcgccggaggaacctcccgcgcaatgccagcctcgtccctgaaagaagtatggatagccgcggcacgcgatcgtggcatcgagtacgtggacatcggtggcgtcagtggtgctgaaaccccagagcacattagtgatctcttggactgcagtccatcgtcgaattccggaagaaagcccatggtgatcgggtgccaagacgtggcgccgttctcctcgaacctgatcgttgctgcctcccagctcctggagagcagaggcacggctccaggcctcatctgcgtgaccggctccctgcatctcgtcggggccgtactgcaacagatgggacggcattagaggaaacaaccatttcatctttcatgccatataatacactggatgattgtgtctacactgaactcggagtggtgggtggtgctgctgctgacgaatctctagt

SEQ ID NO: 27947 - DNA, 1598 bp, Zea Mays
tgcccattattaactctccctccccccacgcagaagacgacgaccggaagcaaaacagccagccaaccaaccaaccagaccagggatggatggtgcgcaccaagaaagggggcaccgcaccgagccaatgatctgcaagaagagaggtaggatttaggcacggcacctatagcccctgacgagagagagagggagagagatttggtcttggataagagtggagagactggagacgggtgggtggagtgagagaagtcactcggggagcctccagattctgaatctcccgcaacccgtctcatcgccggagtggagttccaggcgagtgattatcgagccagtaagccatttgcaagcactgaactgaaccctcagagcgttgttgcgatggaccaaatcgctacccccgacgaaacagcacatgcctctgcaccttcagttcataagctgtttgatgctaaattaggccaccatagcgtgatggatggcaccttggcatccacgagtcagtcatcaaacatcaagacccagctgatccggtcatcaagcttgtcaaggagcatatcagttaaccttgagaagaggagccctgaatctgatcctgaaagcccacagtctcacgtctcgcatcctaaatttgcagaacccatgttctcgaattcttcgacgttctgcacaagcttgttttcgtcatcttcgacaacagagccatgccgtcaaatgggcactttacctttcctgcctcacccccctaagtgtgagcagcaggtttcagctggtcactcatcgagctcctctctgcttttaagtggtgataccggtttagatgtggctgaacagtcagatgatctgaacgacttgctcaatctttcgggagatgcttctgatggcagcttccatggagaaaacaatgccttagcttttgacgaacagatggaatttcagttcctgtctgagcagctagaaattgccatcactgacaatgagaagaatcctcatttagatgacatatacggcacaccaccacagctgtcatcacttccagtatcatcttgctccaatcagaatctagggtcaccagttaaagtccagcttagctcatctcagtcatcttctagctctgcaacagctaacaagtcaagattgaggtggacacttgagcttcatgagcgttttgtggaggccgtgaaaaagcttgaaggtcctgaaaaagcaactcccaaaggtgtgctgaaactaatgaaggtagaaggtctaacaatttatcatgtgaagagccatctgcagtatcggcttgcaaaatatattcctgagcctaaagacgataagaaggcttcctcggaggataaaaaagcacaattaggaaagggcagcattgattcaagcaaaaacaagaatttacaagtggcagaagctctaaggatgcaaatagaggttcagaaacagcttcatgaacaattagaggtgggtccgtagtaggtgctatgttatcacatctcgcaagtactaccgttggctcatatgcttgagacatatagtaggaattagtctggcgtttggtttcggttctatatggccacttgttttctgttcatcag

SEQ ID NO: 27948 - DNA, 2250 bp, Zea Mays
  misc_feature (2249)..(2250): n is a, c, g, or t
gtcaatctggttccgctgctccttcctcggcaccgccgcctcgcaatccgctcccgcttcgcccgtaaaaccctagctaaaccctagccgaaagaaacaatgtctctcctcccctgagcgcgctcgtggccgccccttgttggccatggctctccagctccgccgcctcctcccgcacggatacgcccagcgacaccgcgccgtcatccacgcgctatcgctgctgccgccgccgcccgcaatgcttcaattcgaggtgtttcagagatattcttcttcaccctggcccttttcacctttccgcccttgtaaaatgtgtggggttgcatttaggagcaattcaacaaggaaaatatcttcaagaaataattttggggttgccttacagcccaaaagtagtgcctttattactcctcggctctttggcagctatagttctgtatgtttcagagccacagccagctgtggaattgctttaaaggctaataatattggcaattcacgaccattctcaactacatacagtaaaaaaataaggtttcttgttaaaaataagatttcattcagtaatctaaatatgagaaggaaagacggaagtgttgcacatagtttgcttcatagatctgagaaatgccaaagcacattagctacatgtagcaccattgttgatgaggcttcaacatctactagtaacaacagcaagagtgttactgatgctaagactgacactgccaagaggaagagttcaagaggaagcaaaaaggaagttgatggagatatgaaagaaaaggaagtacataccaataaaaagaggatatttgctagaactcgtaaagctgcaacaaagacgtctgataatattagcacgaaccaagaaaacaagaagactgataattgtaaattgaaaaggggtgctgatagtttcaaagagaaaaaagtaaataatagggcaaagtcaaaagcagaggtttctgctgcttcttctgtacctgaaatttgtatgcaatcctctattgatggttcagttattgagaaaaagccactggtgccattgtatcctcccagagccaaatcagttgtggttgtggaatcagccacaaaagcaaaagttattcagaagtaccttggggacatgtatgaagtgttaccaagctatggtcatgtgagagatttagcaggtagatctaaatctgtccgccccgatgatgacttcagcatggtctgggaggtgcctgctgctgcctggacacaccttaagagcattaaagttgcactgcaaagaaaatttaattcttgcatctgatcctgaccgtgaaggtgaagcgattgcttggcacatcaaagaaatgcttgaacaacaaggtgtactgggttttgatgtgactgttgcaagagttgttttccatgaaatatctgaggatgcaataaagaaggctttaatgtccccgaggtatattgacatggacttagtcaatgcttatcttgcacgccgttcccttgattatctaattgggtttggcatatcaccacttctgtggaggaagttgcctggttgccaatcagctggacgggtccaatctgctgctttggcccttgtgtgcgatcgagaagctgaaatagaacagtttaaggcacatgagtactggacagtacagacagacttcaaaatacaatcagcagatccttcaaatgccacatgtattccattctgtataaagcatttgaattcaaaaaagctggatcaactttccataccctctcaagaagaagcgcaagctatagaaaagatgattcattcttctacatttgaagttttaggtgttaaaagaagtaaaattcacaagaatcctccattgccatatattacatccagccttcagcaggatgcagcaaacaaactccattttactgcaggatataccatgaagattgcccaaaacctttatgagggtatcaacctttcctcagaagaaacaactgggttaataacgtacataagaactgatgggttccatatttctgatggagctgtggaggacattcgttcactagttaaagaaagatatggtcagaagtacgtttcggaggacattaggaagtatttaaagaaggtgaaaaatgctcaagaagcccatgaagccattaggcccaccagtataaggaggccgccatattcaagtggatgttggcattcctgaaggagagatgaattttcattccactgcatcaaaactggacttcaagggatnn

SEQ ID NO: 27949 - DNA, 1427 bp, Zea Mays
tcttggatactgtggcttgggaaatggttgcaaggccttgagggggtcaaaataaaactgacaaggccactgatgcattgttgacatagcatgccccatagggccaccgatgctacacaagcttcttcctaatatcatttattaactgttgtttaatctatatactatctcgctagtctacatgccgagtgtttataaactagaggcccgtatttttactgtgtttttttctaaaaaaagcaaacaatacaacaaaagtaggaaaatcctgttagattcaaaccacaaaaaagcaactataatgcaagcaaacaaatggtatataaccaaaaaaatccaatcatttgtgaccttgaaaaggagaaactttcagagtaacacttactttttaaaagcagctataatgctggtggttatgatctgctttcattgtatactcatgctatgctggtggtcccaccattcatcctatggtttctttctagaaggagatctagacaggtgatagataggagtattgtatttcttttgtgtttcctggtaccagcaaactctgcaatatagatagaagctaatcctatcttcagctcttctctttgcctgacaaggcgcctttccttgtccactttattttaattttaccaatataatattattggctagtttggggaaatcctcccaaatcagggctaacaaaaagattttttttgcaggttcagctaattgctactctaaagatggttgccctccctaaaagaatacatatagagcatgcgaaagagcgattagatatgattgttctgtaatatcaccttgaattctgttaccggagtattcatgaacttttcaagtaaaccataagctattagggaccatttttctttaggattcagaaatagaagaattaacagataattgacttaccaaaaagcgagtcccacatgttgtatgtagaaggaaagatccctacagttggcccactaagcatccttgcgtcattgaatgagccagatttcgttgagcttgcactgcatgagtacaagtctgcgactaacatgacagagcagtttgctgcattagcagcattatcccaaaatccaggccaagttcgtgatgatgccctcttggatttctataacaagtggcagcatgaatacttggttgtaagcaagttgtttgctcttcaagctacttcagagattcctggaaatgttgcaaatgttcagaagctgctgtctcaccctgctttcgacctgaggaatcccaacaaggtgtactcactaatcgggggattctgtggctcacctgtgaacttccacgcgaaagatggttctgggtacaagttcttgggtgagatcgttttgcagcttgacaagataaaccctcaggttaatgccaagtacttgttctcctgggtatttacctag

SEQ ID NO: 27950 - DNA, 3429 bp, Zea Mays
aaaggcagttcttacacgcgggccctcggcttcaccggaaatcgcctcgggacgggagatctcgcgggccggccggcggcgagaggatgtccaccgcgcccgcgcggcgcgcccgcccgccgctgccgctgcagaacggcgcggagggcgacgacgagcgcgaggaggaggttgatgaggaggaagtgggcgatgacgaagcggaggaggaggaggacgacgacgacgaggaggagccgcggctcaagtaccagcggctaggcgggagcgtgccggcgatcctctccaccgacgccgcggccgccatcgccgtcgccgaccgcatggtcgcgctcggcactcacaacggcacgctccacatcctcgacttccagggcaaccaggtgaaagaaattgctgcgcacacagcaactatcaacgacataagctttgacgcagacggtgaatatataggcagctgctcggatgatggcacagtggcaataaacagcctcttcaccgatgaaaagctaaagtttgagtaccatcgccccatgaaggcaattgctctagaccctaattatgcccggaactatagaagatttgctactggtggtttagcaggccaagtacttgtgctgacaaagaagtcttggggaggttaccataagaaggttttgcgtgatggtgaagggccaatccattcgatgaagtggagggcggatcttcttgcttgggctaatgatgcaggggtcaaagtgcatgatatgagaacagacaaagggatcgcattcatagagagaccaaaaggcattcatcgaccagagttcttgcttccccacctagtctggcaggatgatacagtcttagttgttggatggggaacaagtgtcaagattgcagcgatccgaacagatctatctcagggactcaatggcctacaaagaactatcaccacagctagttctgagaagtatgtggacattgtgggctcattccaaacaggctatcacatatctggggttgctccatttggtgaccttttagtcgtacttgcctatattcctgatgaggatgaaaaagagaaaacatttagtacttctgttacttcacgacagggaactgcacagcgtccagaaatacatcttgtatcatggaaaaatgatgagcttactacagatgctctgcctattcatggttatgagcattacaaggcaaaggactatgctcttgcacatgcacctttctcaggaagtagcaatgcaggtggacagtgggctgctggtgatgaacctttgtattacattgtgtctcctaaggacatagtcgttgcaaagccaagagatgctgaagatcatattgcttggcttcttcaacatggttgccatgaaaaagcattggctgcagttgaggcagggcaaggacgcactgagcttcttgatgaggtgggctcaagataccttgatcacttgataattgaaagaaaatatgctgaagctgctcaacgctgcccaaagttgttgcgaggatccccttcagcatgggagagatgggtcttccactttgctcatctccgccaacttcctgttttggtcccttatattcctacagaaaatcctcagctgagtgatactgcatatgagcctcaccggtcatatctgccattgagccacagctaaactcctcatcgatggctgattcattgaaagagtcattagctgaattgtatgtgatcaatggtcaatacgaaaaggcactttctctttatgctgaactcctgaagccagaagtattcgagtttattgagaaatacaacttgcatgatgccattcatgataagattgtcaatcttatgatagtggacaataaaagaacagttcacctactgatccaacatcgtgatatcattcccccatatgaagttgtggagcagctgttgcataccagtaaaaaatgtgacaagagatatttgttacacctgtatttgcatgctttatttgagatagatatacacgctggaaaggattttcatgatatgcaggtggagctttatgctgactacgagacaaggatgctactacccttccttcgaaccagtcagcattacaggcttgacaaggcatatgaaatctttgcacaaaaagaacttgtaagggagcaagtttttgtccttggtcgaatgggcaatgctaaggaagctctgtcgacaattataaacaaactggaagacatgcaggaggctgttgaatttgttacggaacagcatgatgatgaactgtgggaggaactgattagacaatgcctccagaagcctgaaatggtagggaatctattggaacatacagttggcaatcttgatcctctgtacattgtcagtttggttcctgatggcttagaaatacctcggttgcgggatcgtcttgtgaaaattgtgacggattaccggacagaaacttcattgcgaaatggatgcaacgatatacttaaggctgactgtgttaaccttttggttaaatactaccacgaggctcggcgtggggtatacatggtaagcatggacgaggaggtacacggaaacagagctgacgatggatcatcgcggggacacgagagatcatctagcgtccgggctctagatatcaagtccagaacaagatgtggtgcccggtgttgtttgtgcttcgatcctttgcctatccaggacatatctgtcatcgtgttctactgctgccatgcgtatcatctgtcttgccttgaaggtggcttagactcgatgagatcaaacagtggtcaggatagtgacggaggcatggacgatgaggatggttccccatcaggccagtctcgcatgcgctgtgtcttgtgcactactgctgcttcataattttataccgtgttgggtagtacacactaccttgtgttgtgttgtaagttttgagccatgtaattattgtgttcttttcgcgtgttacacataacacatgcttacaatagcgtaattcttttgagggaggccatgtcctcggcaaggagagttctgtgtaaatttgatgaaccagcatgagcaaagctgtgcggcatttccatctttttttaatgccacgtttgccagataatcaaaagtttattgacattacacgatgcagaactgttcatgtagaatgtgcctgtctatattatacactgttctatttgggactagggcatggtagaattccccagtttcttctcacttcctccaggtcttcatgaaagtgcttctcgcaatatacagaaatcagatcgcttgagaccggcttttgttgcccatgggaagtaatgcgtttctcactgaaccttgagggcaatttgaacaggatactcagcgttcgattctagccgaagtgtttggacggtgacatattgcgctgtagctattggattctgaaggcagtatgtatccttcgctgc

SEQ ID NO: 27951 - DNA, 6700 bp, Zea Mays
cggtccaaccgaaggaaaaaaaagtttgaaaatcaaacacctttcattccccccatccctcctcctgctcatcactgctgctctctggctgctccctctccctccatccccactgctgctctcttgccaaatctgatctagggtttcgttccatctccacgcgccgtcccagtacctatctactctagactactacagtatccaaaaggcaagcttatctgcggagggagtgagctgacgcattcccgtgctggcgagggacagccagacccagacggggagatccgatccgattccgtgctagctgctgcggagtgagtgaggtgacgcgggagcgggatggcggcgccggggcggaggacggcggacgtgtcctcgtcctcgcccgccccctcgccgtccccttccaccggtaggcgcctcctgcgcacgcagaccgtcggcaacctcggcgagtccatcttcgacagcgaggtcgtgccgtcctcgctcgtcgagatcgcacccatcctccgcgtcgccaacgaggtcgaggccaccaacccgcgcgtcgcctacctctgtcgcttctacgctttcgagaaggctcaccgcctcgacccgacatccagtggccgtggtgttcgtcagtttaagaccgcacttctgcagaggcttgagagggaaaatgatcccacgctcaagggaagggtccaccagagcgatgctcgggagatgcagcgcttctaccgcgaatactacaagaagtacatccaggcactgcagcatgctgctgataaggctgaccgagcactgctcactaaagcgtaccagacagctgctgtcttgtttgaggtcttgagggccgttaatgtctcgcagtccgttgaagtcgatcaagcgattttggatacacacaataaggttgaagaaaagaaaaagttgtacgtaccttataacattctcccgcttgatcctgaaagtactggtcaagccattatgcgatatccagagattcaagctgctgtttatgctcttcgcaatactagaggtctgccatggccaaaggaccaagacaagaagcctggcgagaagaatactgggaaagaccttctcgattggcttcaggctatgtttgggtttcagaaagacaacgtgtccaaccaaagggaacatttggtactgttgcttgcaaatgttcatataatgaaagtacccaaggttgaccaacaaccgaagttggatgacaaagctctggatgctgtaatgaagaagctgtttaagaattataagaagtggtgcaagtaccttggccgcaaaagcagcttatggttgccaaccatccagcaggaagtgcagcagcgtaagcttctttatatgggcctctacctgctgatttggggtgaggcggctaacttgagattcatgccagagtgtatttgttacatctaccatcatatggcttttgaactctacggcatgctggctggaaatgtgagcccaatgacgggtgaaaatgttaaaccagcatatggtggtgatgaagaagcctttttgattaaagttgtgactccaatatacaaagttatagagaaggaagctgaaaggagcaagaccatgaaatcaaagcactcccattggagaaactatgatgatctgaatgagtacttttggtcagttgattgtttccggctaggatggcctatgagagctgatgctgactttttcaaaactccaaaagatgcttatctgaatcttttgaatggagagaacagatctgcaggtaatacccattggatgggaaaagttaattttgtggagatacgttcattttggcacatattccgtagtttcgacagaatgtggatcttcttaatattgtccttacaggccatgataattattgcttggaatggtggaacaccaagtgatatttttgatgctggagtatttaagaaggttttgagcatatttattactgctgcaattttgaagttgggtcaagcaatcctagacctcatatttggttggaaagcaagaagaaacatgtcatttgcagtcaagctgcgatatatcttgaagttaatatgtgctgctgcatgggttgtgattttacctgtgacttacgcgtacacttgggagaatcctactggacttgcaagaacaataaaaagttggcttggtgatggtcagaatcagccatctttgtacatattggccatagtgatatatatggcaccaaacatagttgcttctatgctatttcttttcccatttatgagaagattcttagagagttcaaatgttaaggtcataacgatcataatgtggtggtctcagccccggttatttgttggcagagggatgcatgaaggtgcattctccctcttcaagtataccatgttctgggttcttcttttagcaacgaagctgactgtaagcttctatattgagatcaaacctctggtacagccaaccatagatataatgagggaacctatcaggactttccagtggcacgaatttttccctcatggaactaacaatattggtgttgttatatcactgtgggctccaataattctagtatatttcatggacacccaaatttggtatgcactgttctcgacattaattggtggtatctatggggcttatcgtcgtcttgatacggacattaggaatgttgagatctcgctttgaatctttgcccgaggccttcaatgaacgcttgattccttctgatgcaaataagagtaaaggtcttcgtgctgccttttcaagtagacccaaggcttctggtgacgaaagacagaaagagaaaagagctgcaaggtttgctcaaatgtggaatgtcattattacaagtttccgtgaagaagacctcatagacaatagggagatggatctgctactggttccatactgtaaagaccgtgagctcgatatatttcaatggccacctttcttacttgctagcaagatcccaatagcactggatatggcagcagacagtggcggaaaagaccgtgatctgacgaagaggataaaatcagatccatacttttcctttgctatcagagaatgctatgcttcattcaagaacatcatcaatactttagtgtttggtcagcgggagaaagatgtcctagcacagattttcgcagttgtggatcagcatatagaagatgaaactctgataaaggatctcaatatgaggaaccttcctgcactgagcaagaagtttgttgaattacttgaattactgcaaaaaaacaaggaggaagacttgggtcaggtagtcattttgttccaagatatgcttgaggtggtcacaagggatataatggaggaacaggaccagctcggcacactgttggaatctgcacatggtgcaaatagtagaaaacatgaaggaattacaccgctagatcagcaagaccagttgtttgctaaagctattaagttccctgtggatgaatcaattgcatggactgaaaagataaagaggcttcatcttctgttaactgtgaaggagtctgctatggatgttcctactaatcttgatgctaggcggcggatatcattctttgcaaattctttatttatggatatgcccaatgctccaaaagttcggaacatgttggccttctctatcttgactccttattacaaggaagatgttctgttctcattacaaaatctagaagagccaaatgaggatggagtttccattcttttctacttacaaaaaatttacccagatgaatggaaaaatttcctcgaaagggttggctgcaagaatgaagagggactccgtgaagatgaagaactagaagagaagcttcgtctttgggcgtcgtatagggggcagacattaacaagaactgtaagagggatgatgtactatcgaaaagctttggagcttcaggcttttcttgatatggcggaagatgatgatcttatggaaggttacagagcaacagaagtaatgcccgaggactcgcaattaatgactcaatgcaaggctatagctgacatgaagtttacatatgttgtctcatgccaacaatatggaattcagaagcgttctaatgagccttgcgcacatgatattttgagactaatgacggaatatccatcacttcgggtcgcctatattgatgaagttgaagcgcctagccaagatagaaacaagaagattgaaaaggtttactactcagtgttggtgaaggcttctgttacaaaacctgatgagcctggtcagagccttgatcaggtcatctacaagataaagctaccaggtaatgccattttaggtgaaggaaagccagaaaatcagaaccatgcaataatattcaccagaggcgaatgcctccaaactatagatatgaatcaggagcactatatggaggaggctttgaaaatgagaaatctgctgcaagagtttgagaagaaacatggagtgagatatccatcgatacttggagtcagagaacacatatttacgggcagtgtgtcatcccttgcatggttcatgtcaaatcaggaaactagtttcgtaacaattggacaacgagtgcttgccaatccgttgagggttcgttttcattatggtcatcctgatatcttcgatcgccttttccacattacgaggggtggtgtgagtaaagcatccaaaattatcaatctcagtgaggacatatttgcaggattcaattccacattgcgtgaaggcaatgttactcaccacgagtacatgcaagttggcaagggaagggatgtgggtctcaatcaaatatctctgtttgaggcaaagatagcaaatggcaatggcgaacagacgctgagccgtgacatctaccggctgggtcatcgctttgatttcttcagaatgctatcttgctactatacaacaattggtttctacttcagtacaatgattacagtgtggactgtatatgttttcctctatgggcggttatatcttgtacttagtggacttgatgaagcgctggctactggaaggaggtttgtgcacaatgcacctctccaggttgcgcttgcatcggagtcttttgtgcagcttgggtttttgatggcgctacccatgatgatggaaatcggtttggagagaggattcagaacagcattgagtgacttcatactgatgcagcttcagttggcctcagttttcttcacgttctcattgggaacaaaaactcattactacggaaggacattactccatggaggagctgaatacagagccactggacgtgggtttgtggtgttccatgcgaaatttgctgacaactatcgactctattcccgtagccattttgtcaagggcattgagctgatgattctactagttgtgtatgaaatatttagccagccatatagaggggctgtaacttacatcttcatcaccgtgtccatgtggttcatggtgggcacttggctctttgcaccattcctgttcaatccttctggatttgagtggcagaagattgtggacgactggaccgattggcacaagtggatcagcaatcgtggaggtatcggtgtagcaccagagaaaagctgggagtcatggtgggaaaaggagcaagagccccttcgatactccgggaagcgcggtactgttgttgaaatactgcttgcgctgcgtttctttatctaccagtacggacttgtgtatcatctgaatataacgaagaagataactaaggacaaccagagtgtgctggtttattgcttctcatgggttgtaatttttgtgattttgctcgttatgaagaccgtatcagtgggcaggagaaggttcagtgcagagttccagctagtgttccggttgatcaagggtctgatatttataacatttacagccatcgtggtaatcctaatagcgatccctggcatgacggtgctggacatatttgtttgcatccttgctttcatgcccactggatggggtttgctgctgattgcccaagcgatccggcctgtgatccacaagactgggctctggggctcgatcaaggctcttgcccggggctacgagatcctgatgggacttctcctgttcacgcccatcgccttcctcgcctggttcccgttcgtgtcggaattccagaccaggatgctgttcaaccaggcgttcagcagaggtctgcagatctcccgtatcctgggaggacacaagaaagaccgagggacccggaacaaagaatagggctgggctgctgctgattcaaggtttgtgtgcgccactagtatttatgtgtgaatgggtgggtagcatatggctcgagagtatctcctgaatggagattgattgatcctgaagagtagaagagactcgagtgatgtaagatgctgcaggcttgttgctttgttacctaggcgttaggcagaacagatgttttcaggatctctggcctgttaaccacatcttcccctgttcagagtgaattaattcctaatggaaactgatttgtgaattacttcctaatagaggagtgcttccaaactgatttcatgtgtgtgctgtgatattgtttagcatatagtattttaaatgtagctttgaattttcattctttcgcaacaaaaaatgaataggacaagctggtcaaacttgaaaaaaaaagttaaacgggttataatttgggacggagggagtatgatttgagaacctcatcaaatagtcttgcca

SEQ ID NO: 27952 - DNA, 1948 bp, Zea Mays
ggaaaacggcactaacatttaagactccatataggtgcctgctgtagcacaaaacgtttgtggtaatagtttagccctgccggaaacactgagggttgttatcactgatgattcttccttgtgtactgactctggaagagtggggataccggaagcatctgaagatattcctgctgaagttcccagtgcacaaacagaaaccaagcctgaagtgagaatgtctggaaggaccagacggaaatctcaaatgcattgcaaaacaaagcatatgtcatgcaatgaaggttcagataatttacaggcaaaaaaattgctgcactgtttgtcatccgaaccacttcgtagatggtgcacatatgagtggttctacagcgcagttgattatccatggttttcaagtaatgagtttgtgcactacttagatcatgcaaaattgagtcatctttcaaggttgactataccagaatggggtacaattcgaagctcccttggtattccacgtcgattttcaaattattttctggccgtggaaaaagaaaatcttgaggattatcgggagaaagttagaaaaatctatgctcaactcagtgatggttcaagggattttctacctgcagacctagctagaccattttcaattggtcagcaagttattgttcgtcatccaaattctagggaactttgtgatggcaaagtggtgatgatgggtccggattgttacaaggttcattttgatgatcctgacattggtgttgatattgtaaaggacactgattgtatgccagtcaactggctgtataaccgtcctgacaacatgaggagctgcctttcaaatgatgcgtacagcatactggagatggatcacattcctgaccttacagcaagtgagaatgaggatcatgctgtaaacggatctactgtacttgaggggctcaaaagtctgcgcttaacatcagatagacaacctaaggcagaatctattgtaaacagtgaaagaccaccatataggagtacatctgacagccctgcaaaatctagagattgcccagacaataatagtgctggccactacgatgagctagagtcatatatagccgcatttgcagaaagatcactatcacaagccaggcagatggttgacaaagccatgcaggcgaaccctggaggtaatgaggatgaaaaggtatgcacgtcaaatcaagtggcaggttgtgcaggcccaggttttgaacctgcccgtggcgcccaacttccttctgacctgatatcgaacggcatcgccacggttctttcaatcaagagccttagcgactcgcgacatccgtttgctaacgtagcaggcgtcttggatcacgcttgctccatgctgcgtccaagctgtccgcagaacctcgctttgtacgatcaaataaagagagacatcggtatcataaagacccagatatttgcacttatgccaacagcattgggcaattgcagccctcctgtcccgcccatgtaactgggccctgagcaagatacttccgctgccttcatgcaggccctgcagtagtacacgcttcttcctttgctgtgagtacaaaacgcagcgaacttgatgttatggaggaagtcctatgtatatacctcgatggcttaatagtttataggtatacacatattcaggatagttgacatatgattttggagtgaataaagttatgtctgtagtcatttaggatgtagtgaataaagatgtatgcctgcagtaagtggcggacccagaaattggccaaggcctgggtcgaagcgaccaaaaactctaatagtagtatataaaaaaaattgtacggcgaaacaacgttgtcatggatattaaagatgacatacaagttatgatgtagctacttctaaatgtatcatatcaacatcagtgctttttgcttcagaaccttgaaggaaatcatat

SEQ ID NO: 27953 - DNA, 1433 bp, Zea Mays
aaagaatcgtaaacatcagtgaactatctatgacagcgtacagtgctgctcttttagaccctctccaacggtaccctctagactactcgcgtcggtgaactgatcatcccctccgcatccaatcgttcatgcacttgtctccccctccacatcgcgtgagtacttttccctatgcccggtgaactctctcaccctcgccactcggccattggtgcgcgcgggcgtcgaggaatcaccacgcaagcgacaggagtcgggactggcgtcggacgacaaggattcgaattgacgacgacaacgatcgtgtttggtgcgtcatgcggttgagttgttggctaggtgtccctcccccatcgccaccggatcgagcggcggtggtccagggaagcgcggatccggcggagtccatcggctcgcgcgactctgcaacgctagatcctcgacgccgtcgacgtccatgagctgcgtcgacgaccggcgaggtggagcgtagaagaagcattcatcgatccacacgacatcgtcgtagatctccttcctccaacaatcacggccaagcgaaacaccttcgtctcggatggtgctggacaatggaaggcgtcattttggaggactatagaataaaactacaactctcagaaatcaacaggacatccagtccgcacacttaggagtttggaatggaggtaactacagctataaacctttacaatagcatcgaatgcaagcctataatcaccacccattgctgggagattcttagaaatgaggcaaaatggttggatttgtagaggaaggctactcaggtcatggaagagttggtaaagagaaagtagtatatgttccagactccataaatggcgatgacgaaactgatgacactagtcgaggaacttagaggcccatgggaatggacgctgcaaaggctacaaaaagaaacgtttccaatgaaaccttcatccaatctagctcagagtacacgagtttgatgttaaacttgcatctggagcggatttgagcatataaagaagtgcaaggtgttatggctgtgaacgttgaccaacttattacagttcaagagaaatctttcacccaaaaacaggagattgtcaagcaggtggttgaattgaaaaaggaaatgggaggtcgaagcagctgagaaggcaactctcgaagaagatagaatcatgaatcttgatcgaaacaccctaagtggtccgcaaagggcctactatgaggctcaacaatgtcgtattttgcaatgtgtttacatactttgtgagcgttatttatgttcttacatactttgttttgaattcatgcattgcaaacatttatagctggcttcgtccaactataagcttgtatttgtgagactcagttttgtgacaaattaagtatttcgaacgatggcaactatattgcatttgaat

SEQ ID NO: 27954 - DNA, 1738 bp, Zea Mays
ctcaataaaatatgtactcggaatcggaagaacctaccttacttttccatccgcggaacgacgcacgcggacgcctccttgttccgggtcctactcccgccgccttcgcctaaagaggcctcgccctcccccctccggcgaaaaccgattcccttccccgattccctccggcgtttcctgggtccctctccatcctcaccgctttcttcctctgcaggtcccttagtgcaagcaaggacaccgctcctctagcgagctctgttctgaagcggcaaggtttggccttacctgtttgcctcaagcttgccggcttggctgcctgggcaagcaaatccttgccaatttaggcgagccaaattttctctcctgcatggacaaggtttgctcacgcgctcgcatggccagctgagccgtcactaaattggccactccatgctgttgctggatcgggatttgttattgctgaattgatggccatcactggactcagatagtcaggtttgccagcacggcagcaccaaatcgacctctgctaccatcagattgatgttcctaggcactgaattgaccctcatcactgttgaatcgagctctgttattgttggatcaagctacagtttgaggcaaggcgagcgatggcaagggaagaaaacacctttggaagattaccttcctttgcctagcaagaaagatgattaatcttttcaaaataaagggtcaaaagaaagaagaggcagcaagtgctgctggaaaggcccctgttaagaaacagtctgctggggagctccgtcttcataaagatattagtgagctcaacctgccgaagaccacatcaatttcttttcccaatggcaaggatgatctgatgaattttgagaccaccatccgacctgatgaaggatattacatgggcggcactttcgttttcacctttcaagtgtccccatcttatcctcatgatcctccgaaggtcaaatgcaagaccaaggtgtaccatccaaatattgatctggaaggcaatgtctgtctgaacattctgcgcgaagattggaagcctgttctcaacatcaacactgttatttatggcctgaatcttctttttacgcaaccaaacgacgaggatcctctgaaccacgaagctgcagttgtccttcgcgacaatccaaagatgtttgaggcaaatgtgagaagagccatggctggaggctacgtcggccaacactatttccaaagatgtgcttgacttgatgtggtggtggcttgaaaacgatcaacagagcccctccccctgtatcagcaccagcgcgcccagctttgtgtgcggaaagtgcttctggaagcaaaatccaaaccgttcatggtgtgacatctgtttgcccgcctttgtgatgtgtggtatagtggtggtgcataatgacagggaaatgcttctctaactgtatcattcattccataaatcctaaacgaggaatgggaagtggattgttaagcagattccttctgcagatgttgatgtcgtattcggcgtgtattcattgtcgcatcttccaggtcgacgttgacatgcacgtctagcttcggatgccgttaccagatgcctcttgcaacttatctgcgccagaagcaatttatgatccaatttgatatctttgtcagcaaatataaggatttgtataataagtagaagcaaatctaaccattttagtgttcctttttttttctgcaggtgatttgcgtg

SEQ ID NO: 27955 - DNA, 1992 bp, Zea Mays
ctgaatttggatgcttgtccaaattcggacctagaattgcagttttttttgggacggaaggagtacttataaattaaggttcatcgtgtattgttagacatagtcaatgcctccgcaaatgccacaccaggactcggaaggtatcctccattcaagcgtgaggttgttgcaatagcatcaaatgcattggataccttcaaaaatgatgccaaaaagatggtcgtcgcgcttgttgatatggaacgtgcctttgttcctccccaacatttcatccgcttggtgcaaagaagaatggaaaggcagcgtcgagaggatgagttaagaaaccgatcttctaagaaaacacaggaagctgaacagtcaacatctaagagggccttcagtccccaaacagatgctgagcaaggtggtggcagcttaaaatcaatgaaagacaaatctggccagcaagataaagacgcaaaagagggatcgaatttgcaggttgctggtcctgctggtgaaattactgcaggttacctcttaaagaaaagcgcaaaaactaatgggtggagtaaaaggtggtttgttcttaatgagaagagtggaaagcttgggtacacagagaaacaagaggagagacattttcgtggtgtcatcactcttgaggagtgcaaccttgaggaggtagaggaggaagaaccatctaaaagctcaaaagactcaaaaaaggcaaatggatcagaaaaacccccaagtcttgtatttaagattactaacagggttgcatacaaaacagtcttaaaagctcacagtgctgttctgttaaaggctgagagcatgcctgacaaggttgagtgggtgaataagatcaaagctgttattcagagcaaagggggttctttcaagggtccaagtactgagggtggttcaatgaagcaaagcaattcggatggcgctttagatgctatggcgcggagaccagctgatcctgaagaagaacttagatggatgtctcaagaagttcgtggttatgttgaggctgttttgaatagtctggcagcaaatgttccgaaggctattgtgctgtgccaagtggagaaagcaaaggaagacatgcttaaccagctatacagctcgataagcgggcaaagcaacgctaagattgaagagcttcttcaagaggatcataatgctaagcgcagaagggagaagtaccaaaaacaatcatctctcctgtcaaaacttactcgtcaactcagtatccatgacaacagggcatctgtttcctcgtattctaatgacagcactgaagttgagagccctcgaacaccaagccgctcaggtgaggactggaggtctgcctttgattcatcttcaaatgggcctgttgctacaagcacaaacagtgaatcaaggtcgagaagtgctgatggtcgcagccggcgctatgagaacggggatgtgagctcaggtgccaactctggcagccggcgcacaccgaaccggttgccaccagcaccgccaaaatactaatcgtgctgattggtattcatgaacattatgtattcttgcctggcacacgccccttgcttgtcatatgggttattggagcgtatttcagatcggccgctagagattgtgttgtagtggagtctggtgattgcgtgaacattgtgttcgcaggtcgctgcgactcagatgagttgtttatagaaatatataggtaaccatggtctctatctttactgtttattatctccgcacatttcctggccctggtgccgtccctgccataggattttgttcgggcgatcgatcttgctttcgcacttggtcgttctgggacggcggctgtcagactaaaagatttatgttgcccctcccgcgcatattgttcggtaaccctgatgatccttactagtggatggggcgcgctcgatgttgaaatgtggttgtagattatagaatcttctatgacctttggagaggaatttgtaagatatatcccat

SEQ ID NO: 27956 - DNA, 4173 bp, Zea Mays
gctagcgatgttcatgtgactttgccatactaatgtatgttgagctttggtgtgaggaacaattcaataggctggtattaggacctccagagttttccaatgaagagttgttgccacctcatgttgatctgttggttgctgcatttactcgtataaatgaaccagacagcatttatgggctcacactatctaatgagatagcgtctcagcttattaggtatgagcatgaaggtgattggagtagcgcacttgaatactatgatttacttgtaaggtcaatgccaaaggaacaccttggcactttaactgggtcggtgttgactggaccatctaccgtgtcttctagagcagaagatacaatgttgaactggaaaatgcacaaaggtcttatgagatccttgcagaaaactggatgtagtcatgtgcttgatgtctactgtgaaggtttatctcaccaaaaggggtgtcttcaacaagacgcggagtttattgatatccaatatgaagctgcttggagggcaggaaattgggatttctcctttttcgttccatattcttcttggtcttcaacccgctctcgaagtagctgtcttttcaatgaaaatttacatagttgcttaagagctctgcagaacggtgattctgaggagttccatgcaaaactttgtcaaactaagatggatcttgtcttggctttgtcaaacactagcaaggagagcacgaaatacatccactctaccatccttaaattacagattctagatcatgctactatggtttgggacctgcgttggaaccttaatcccaatcaaacttcaaaatctcctgtaaccaaggaattttctcacatatctactgtccctaaagggatacagttggagttgttggataaagagtggaacttaattatgttccaagcagaacggaatcttgatctatttgaaccttttctggcatttaggcgtgccctccttaagattttaggttgtgaagaacatcttgtaaaacatttatttcaatctgcttctgcgctccggaagggattaaggttttctttggcagcggcagctttatatgaactcaaagaactttgttttcacagagatgagagcactatgacaaatacctatttgcttgcacggcttgaagacgctaaattgctcagagctcaagggcagcatgatatggctattagtcttggaaaatacatactacagaagctttctgacaagaaaaacctgtcagatgtctatcgattagttggcaagtggctggctgaaacaagatcaagcaactcaagaactatcattgaggactatttaagaccttctatagatctctctgaatttgagaagagtacagataaaaggtacatgtccaggcagtgtcgaacacatttccatctagcacattatacatatagtttgttcagaagctatgaggaaagactctcatctaacgaatggcaagcagctctgcgattaaggaaatacaagactagggagttggagatactgattaaaagactgagaagttcatctaagggtgtgaagactgattactcagtaaaaatccaagagttacagaaacaacttgcacttgacagagaagaagcagagaaaatacaggatgatcacgataatttcttaaatctagcacttcaaggctaccaacgttccattgttgttggtggcaaatatgacctacaagtggtttttcggttggtctcgttgtggtttagtcttttctcaagggatcaagttgtgaaagcaatgttgaaaaccacaaaagaggtccaaacctacaagttcataccactggtttatcaaattgcttcgagacttgggagcaccaaagatgctcaggggtcatttaactttcagattgaaagaacagtacatgtcagggaggcactgtccacccggtgaacagtgcctccgtgacagactgacagtacagctctggtatcatgggcagattgcgttagcttctcttttgaagaaaatggctgttgatcacccatatcatacaatattccagcttttggctctagcaaatggtgatcgtgtcaaagacaagcaaagaagtagaagttcttttgttgtagatatggagaagaagcttgctgctgaaaatttgttaaaggagctatcttcctgtcatggacctctgatttgtcagatgaaacaaatggttgagatctacattaagttagcagaactggagaccaagaaggaggacactaacaaaaaaattccgctgcccagggaggcccgcagcattggtcagcttgaactagttccagttgtgactgctaccgttcctattgatcctagctgtcgttatgaggaaggctcctttccacatttcactgggttggctgactccattatgatcatgaatggaattaatgctcccaaagttatagaatgttttggctcggatggtaacaaataccgtcaacttgcaaaatctggaaatgatgacctgcgacaggatgctgtgatggagcaattttttagtttggtaaatacattcttgcaaaatcaccgagatacttctaaaaggagattgaaaatccgtacatataaggttgttcctttcaccccaagtgctggtgttgttgaatgggtaaacggtactgttccactaggcgattatctaattgggagtactagaagtggtggagcacatggacgatatggaattggggactggacatatcttcaatgcagagagtacctgatgagtgaaaaggacaaaaggagggcatttcttaaaatctgcagcaactttaggcctgtgatgcaccacttctttcttgaaagattcttgctgcctgctgattggttccaaagtagacttgcttacacaaggagtgtagcagcaagctcgatggtaggatatatagtcggtcttggggatcgccattccatgaatattctcatcgaccaagacacagctgaggttgtacacattgatcttggtgttgcatttgaacagggtctcatgcttaaaacacctgaacgggttccatttcggttgacaagggatattatagatggcatgggtgttactggtgttgaaggtgtgttcagaagatgttgtgagaaaactctctgtgtcatgagggcgaataaagaagcattgctcactattattgaagtcttcgttcatgatcctctatataaatgggcactctcaccactgaaagccttacagcgtcaaaaggaaacagttgatactgattcatgtttggatgactcccaagaaccttacgatggcaacaaggatgcagctcgagctatacttcgtgttaaacagaagttggatggatatgaagatggcgagatgagaagtgtgcagggccaggtccaacaactcatacaggacgcggtggatgttgatcggttgtgccaaatgtttccaggttggggaccttggttgtaagctccattgaaagggatgtaaattttgatcgaaggcaagagcaacttttttcactgcttatgaggttttattctttggtgtgtttttttccctcaccaccctgtcaacattcctacaaagtacagcaaacggcttttggtaccctgtaaattgatgggaaggcaaggacgacatttgagtgcaggtgggttgtaccactcctgttttagagcatgtccagactagaggatgggtgattgcatagtgaggccacagttttctttttttgttgagcttcattaataccccctctgtctaaaagtcctcatcgtttaagcgtcccgcaccaagaccaaggatgcccctccgcattgcagccgctgtgaagttaattatctggcgccgttttgtattttcaaaacacgcatatgtaatgtcgcaaaaattcagctgcttcgatggttggccggccataggggcggtatccatacatcacaccatcgtgcagcgtacattcagctgcttcgacggttgcataccgtagtttttgttcaggatttactttgtaaagaagtgaggctgttttgtcatgtatgtaaagggcttgtttcgatgtagcatgaaatacgaagaattatgatgcatttgaatataccgtgctcccctgagcaaaaaacaaatcaacagaagctaccacctggccgccacgctcagagtcgtcttggctgaaggatttcttgggtg

SEQ ID NO: 27957 - DNA, 2341 bp, Zea Mays
cacgcattatccattccgtttggacccatgagatttttcgctgggatgaccgtgcacgagacgaatcccgttcggtaaccgataccccaagtcaaggcggatcatccgtcagtccgtcaccgcagtccagggagcgagcgacgacgacgccagggtcgtggtgctagttgcggggtcccggcccgtcgagtccgcctccggttctcccccttctcccgttgcggcgactccggcggcggagacagaggagcctaagcaggaggaggcggcggcggcagcagcagcaggtgtgcaggccatggctgtcacggtagtgcgggacgtcgagacgggcctggacgcgagcaccagcgaccgggacggtgacgccggggacaacccttcctggttcacacctaagagactacttgtcatgttctgcattatcaacatgctgaactatattgatcgaggagcaatagcaagtaatggcgtcaatggtacccgcaaaagttgttcgggtggtacatgcacctcaggctcaggaattcaaggggacttcgatcttaataatcttgaagatggtacattgtcctcagcatttatggttggactgttggtgtcttcgctgatatttgcatgccttgtaaaaagatataatcctttcaggcttattggtgttggcttgttagtgtggactatcgcaacagctggttgtggggtatcatttgatttctggtcaattactatatgccgcatgtttgtgggcgttggcgaagcttcatttataagtcttgcagctccatttattgatgacaatgcaccagtagctcagaaaacagcgtggcttggtatgttctacatgtgtataccaactgggattgcattaggctatgtttatggcggactggttggaaaatacctgaactggcgtgttgctttctggggagagtcaatattgatggttccttttgttattcttggttttgttataaagccactagacctcaaaggatttgctcacaacacaggaaaagaatatggccagatgcttaatcctgaggttcaagatcagataaataataatgggacaaaaaatgttttgcctagtcgaatcgaggatctttcaggaaaggtccagtttttgccatgttctcatgactgaaattggtcgcttcagcaaagatatgaaacaactattacaagagaaggtttttgtcattgttgtcttaggttatatctcctacaacttcgtcattggtgcttattcctactggggcccaaaggcaggtcaagagatctacaatatggcgagtgcggatattatgtttggtggaattactatagtgtgtggaattgttggaacactagcaggaggtttcatccttgacaagatagggtctactattcctaatgctttcaagcttctttctggtgcgacatttgtaggggcaatattctgctttggtgctttttgtttcaagagcctttatgggttcataccctcctttgcagttggggagctttcagttttcgcaactcaggcacctgtaaattttgtatgccttcacgccgtgaagccacatttgcggccattggcaatggccgtatccactgtttcgatccatatatttggtgatgtcccttcttcacctcttgttgggctgcttcaggacaaaatcaataactggagggagacagctcttatattgacatccatccttttcgctgcagttgtgttctggttcattggcatatttgtccccagcgtcgaccgtttcaacgaagagagcgaatatggccttactgccgctgagagatcaagtatcaggccactgcttggtgaaaacgagccacggacatctgactaaaatctgcgcaatccataaccatttattacttggaagggcaattttaggatatgtttgttttcctcctagattatatgagctggattatagtgaaaataagctaaaataagctcgcattgggtaacttatttcagttgcatgccagttgcaatcttagggtacgaggttacaatatcactttggaaggctaaaataagttatcataatccaacttatgtaatctagaagaaacaaacagggccgtagtccgtagtattatcctctgtctgtgccagcaacatgtgaaatgtaaagttgtatgcccaacatgtgaaatgtaaagttgcatgccagttcaatgtagatgtacatatacgaggtctgtttgccttgcgttttttatctctacaggctacagaaacaagcgagagaacgttacaatttatttttacggatgtaaaacattttggattgtgacatgatataacttactggctacaatattactccct

SEQ ID NO: 27958 - DNA, 1180 bp, Zea Mays
tccaaatttatcgcttgcaacgtccccaatccggtgaaagccgggaaaataacgccatggctatcctcgccgttgcctctccgttcaaaaccctaaaccctagcccgccggaccacagccgcacccgcaggcgcctcccctcctccattctccaccttccgctaccggtgccacgatgtcgccgcctccggtgctccgctaagtacagtgaagcggcggcgccgtccgcgtcgacaacgacgccgcggccgtctgagataccttggagcaaggatatctgcaattcggtgcggctcattgggactgtgggcaccgatgtcgagctgcggcagctgcccagtggctccgctgttgcgaggggtcgcctcgccgtatggaagtcggccaccgagactacatgggtaacactacaattctgggatgatatggcaattgtgtcctctgagcatgttaagaagggtgaccgaatatttgttgctggacggcttgtgtcagatactgttgatgaggggcctgagaagcggcacgtttactacaagcttgcagttcaacagttgaatttcatcgagtcccagccagttcgattatatgaatcagatgcaagccaggatgccccagaagaacccaaggtatccagacttcaagcataagcacactggtgaagcgctatgggttgatgggaggaacaaccctaactgggttacatctcagctggcagttttggactcaagaatgagttctctgcaagacaatgagagaaaaccagtctcttacatgtatgctgacgagttcatgacattggaaggcaatcgataatctttatgaacgaggaagcttcgcagcccccattttttgtgcagcttggctggctgttatgacgattgtgatgtcggagtagctaaccttgctgtctcagttttgttgtacatatctgagcggctctggagggttgttatgagcgtacgtagtatcatgtattcggtagactgtaaggtcgctatgagcctatagcaggcataaacaaatgggagaaacccttgcttcttctgactctgttagtagtattatctggtttgtgacatggtttttaactatgctgttacgtcgagcggttatggtatgtaaaccgtggcctctcatgaagtttttccttttgtcttcggaagaatttggaaataaa

SEQ ID NO: 27959 - DNA, 4205 bp, Zea Mays
cagaaacggtcccagaatggccgccacagaagatgcacgcccattgtcaaaatttctcagtggacctttctctccaagtctcaaagatgacggccgctttgagccgcccacccactgtcttcggctcccctctttctcttcccaaaccattgcctactcttcctcttcctcttcccaacccatcgccgtccccgtccggccgtccttcacaaaccatctttctcctctccatcaagtgaagtcctatccctccccttccctcttccttccttcccccgcctcccttcctcccccagttcacatcacctttgctttgctttgctttgccttgctttcgtgccgcccttcaacgcaagaagccaacaagcacaagcaagcctccagtatcagcaagacaagaacgtcgcgagagaaaccgttgatcccaacaagccaaggagaaatccggctgaggattaagctgcgagaagcgaagaaacacaggaactcgccgcccccgtcgctgaagaagaaagcagcagccaccagccatggtgcggagcaaggaggcgccgaaaaagaagcccaaggacccgctcctgacgcccccgtccaagcccaggggcggcttcctggacgagggctgcccgtggaaccgcggcggcgcggccatgtccccggcgccggcgtcggtgcccagctacatgcggggcaccagcagctctgacgccaaggccgagcgccgtgggcggcctgcggcgaccgtttcggcgtcggcgtcccccgcgaggtggaggcccgcggcgtcggtgtcagcgtccgcgtcgcccgcgccgcggcggaggcccgcggtgcgggtgctgaccaaggggaaggttttgttcgcggaggaggaaccttgctctggctccggcatgggccgcgccacgtgctcctcaaccatgaaggacaccaagttccccgaagcgctcgacctcgcaccgggctccaccgacgccgagggccccgcggcgctgcgggtgtgcccctacacctactgctccctcaacggtcacgtccatgcgccggcggtgccgctccggagcttcctcgcgtcgcgccgccggctcatcaagacgcagcagagcatgaagctcaagggcgtctcggccttccgcaagaaatccgaggagaggaccagcggcggaagtggcagtggtggaggtgcaaagatcgcgcctttgatcgacgaggaggcggtcggcgacttcttcgtcgaggtgtacggcggcccgagggtgagctcggacatgagctgcagcgacatgtctctcgacgagatggatgccacggtgcggaggatggagttcgtcgtgttcgatcggtgcggcgcggacgaggacggtgagaagggcaaggatcttgcggtttgcgatgatggtgaacctgagcctcgcccggtgttgcaacagaagcatggtgccttcggggacagcttgtcggagtgcagtggggtacacatcgacaacgatttcgtcgaggagttgccatggttgaagtaccatggatacgagtatgatgatagcttggacgatgagatcttggaagaacagagaattggggaacaggaggttgttggagcagagttttctgtggagcaagaagcagagcaaggaacgtccggtagatcctctgatgaatacaaagaggatgctgctgatgaggagaatacaacgaatttggtccgtgaccaggagatcctctcagatcaaggtgttgcttgcagagtggaggcatgcgaggagctgggtggaagagatgaagacaacatcctggaggcgtctgctggacaagggaaggcagaagagaagctctctgatgatatctacaaatctgagatacctgatcaagaaataacagcaaggacatgtgctactctggaaggtagcttcgaagaggatatttcatcggaccaagaggcaaatgatgatgatgaagatgagtgccatgtgaaatctgatggcgaatcagaggacactgaggagcaagatctggaggatcaacagagcatgccagatgatgtctctaaaatggagatttctgaggacactatctctggtgatggatgcaaagaggatttttctgaggaagtaacctcggcagctgtgttagcagatgatgtgtttgaacaatatgagaagactgtggatgatgtgcatgaacaagatagcagccctgctaaggctcaaatggaattgggtaatccaacaagcaaaaaggaagacacttctgaagaaactgctattttgcaacaaatcaatcaagacagcaatgtggatactcaaagggaattggagattagggcatccatattggaagaatctggtattgctcagcaaagcaaccttgatggtgataaaatggaaccagagattattgtgtgcaagctggaagatgtttctgaagaatctggtgcctgcactgaaagcaacctacatgataatacagagtatgttatagacgatgctgaaatgagacaagaaattactttatgcaagcgggaagatgcttctaaagaaactggaattgatcaagaaaccttagaagatgatagctcaacatgtggtattgttgatgacagaaacaatctggagatcaataactgcaaatcggaagatgtttccatagaatctgttggcactcaggaagctgatcataatgataactttgcaaatttcagtaatgatgttcaagggactgcagaagatcatgactcacatctcattgatgatgctcaaaatgatatccaaatccctggaggcaaatcagaagacacttgcaaagaatttgataccatgaaagaaactgatcagagtgatagctctgcaaatgtcagatatgatgctgaagaaactgtagaagatgatgattctgtgtgtgtcagtgatgatgctcaaaatgatctgaagaataccaagtgcaaattggaagatgcttccaaagaatcttctactgctcgcgaagctgagcggagtgatagttctgcaaatgtcattgctgattctcaaaatggatctgaacttaccacaaatgagttggcagtcattacgatcagtaacgacaaggaaaatgaatccatgcttttcacatgcaactcagaagatggtttcaaagaatctattattggtcaacaagctgaccatgatgatagctctgcatatatcagttatgatgatcaaaatgaatgtgaagttactgcatgtcattcagaaggtgctcaaggggaatcaaatgtagttcaagaagaatgtacggatgcaaaagaaccttctattgatgacatatgtggcgcgttcagcggaatgaacctcaagggtgatgtatattttgatcctgctgagtctgccacatgcccgaggaacaagttgatcatctccaggaggagaagaacacctgaagaggaggaatacttgcgaggtttcaatccacgggcaccgaattttcttcctctggaactggatccagacgcagagaaggttgacctcaagcatcaaatgatgggtgagcggaagaatgctgaagaatggatgattgattacgcgcttaggagggcggtgacaaacttagctcctgctcggaagaagaaagtggagctccttgtccaggccttcgagactgtcctaccacatgacgaagatgacaagaaaaatgtctcaccctcaaggcctgtccaagcctgcaactgataacattagagttagtggttacactgatgttgatgtcgacgcgcaagctactaactcggaggttgctgcaatattatcgcgagtgacctgctccaagtttgaatgagagagcgctacttactaatttgctagaggtaactagagaattagagatctctagctgagctgtgacagaggagctcactcctgctccacaaggaaggataactactcattagtcattactgatcaaggtatccctatccagttgctgagttgcaaagaggatgctcccggcttgagttatgtaatttaaaagtgtgtatacatgtctcgtgtgctaatgttgtctgatattgtgctggtggatctgtgaggattggaaaatgtcaatggtgatgaggtccatgctcctttggcaaagatcaataaaactcttcttgagtgctcaattgttgttactgaggttgaatctgcgtcacaatagcacccatgcacacatgtttatatttgtaaatcctg

SEQ ID NO: 27960 - DNA, 2349 bp, Zea Mays
gacgctgcggccttgcggattccgtgcacaccagtgcgagaaaccccgcggccactccgcgtccgtccgatcaacgaatcgaacccccagcaggccgcacagcgccggtccggcatgctacgcactctcccgcagcaccggcagcacgcacggcacgacacacaatcgtcgcacgcgcccccggttctcgctctccgctcgtaaccccctgacggtggcccgtggccggttaagcccgaggcccgagcggcggtggatggacgtgcgccggctcggaggccgcatcgcggcggcgctgagggcgctcggcgcggggggctcgctgtcgctgcccatcccggcgtggatcacaaacgcccttgcgatgatctcgctcgtgctctcctcctgcgacctgctccgcctctgcagcgacagggaccgccggctccggttctcgctcggcggccgcgagttcgtcaccgtggtctgccagctggcctccatcgtgtacctcttcagcctttgcggcaccggcatcccgtctgcggaccccgagacccccgcccgccgcgaccagggcgccggctcccccgaccaaacgcgcgccgccgacgcgccggagacattgcatggcggggacgaggagatcgttgccgccgtggtgtccggggcgctgccgtcgcaccacctcgagtcgcgcctcggagactgccgccgcgcggccagtctgcggcgggaggcgctacggcggatgacggggcggggcgtcgacgggctcccgctcgacgggatggactaccaggctatcctggggcaatgctgcgagatgcccatcgggtacgtgcagttgccggtcggggtcgccgggccgctgctcctggatgggaaacagtaccatgttcccatggctacaaccgagggatgtctcgtggctagcgtcaaccgcggctgcagagccatcgcggcgtctgggggcgccgtcagtgtgctgctccgggatgcaatgtctcgtgcgcctgtcgttaagttgccgtcgataaagagggcagcggagctcaaggcgttcgtcgagacaattaccaattttgagattctgtctgctgtcttcaataggtccagcagatttgggaagcttcagggtattcagtgtgcactagcaggtaggaacctttacatgaggttcacttgtagtactggagatgccatgggaatgaatatggtgtcaaaaggtgttgaggatgtcttgggctacttgcagaatgatttccccgacatggatctcatcagcctatctggtttggttcttcccttctgttatagcaaagaaaagctagttttgcactctttcaataaaactgttcaagaaaaaaatatcagacaactaaacacaatctaccattgccaccttttcttactcgtcattgcaactgcaaggctatccccagcaggtaactattgttcagacaagaaggctgcagctgtaaactggatagaaggtcgcgggaaatctgttgtttgtgaggccacagtcaaagggggagttgtgcagagtgttcttaagacttctgtgcaaaaacttatcgagcttaatattgtaaagaatctcgctgggtcagctgtagccggagctcttggaggtttcaatgcccatgcaagcaatatcgtaactgccctgttcattgctacggggcaggatcctgcccaaaatgttgaaagctcgcagtgcataaccatgatggaggcagtgaatgatggaagtgaccttcacgtttctgtgaccatgccttctattgaggcactgttgggggcggcacttgtcttgcttcacaggctgcatgtctgaacctgcttggtgtgaggggtccgaatcgtgactcacctggggcaaatgctaagcttctggctaccattgtcgctggcagtgtgcttgctggcgagctctctctcctgtcagcccttgctgcaggccaacttgtgaagagccacatgaagtacaatcgatcaagcaaagatgtgccaggtgctgcttcttgagtatattatatgcagcagctcgtcgggtactccaaggctccaagtgacatgttttatacagcagtagcccaagcgagatcgtcgctaaacaacagagatgggcagaggcccgactgtagataagcgagcaggtcctgacagcaagcgcaacctgtttgactgttccgtggacgctatgttagcgacgtacagcacctgacagattatgcagcttctgactgtaacttttgtttatgtatgtttagcgttcggttgtaaccgttcaattttttttggtttgctttggatagcagaagatcagataaaatttgtgttcctttttgtgcagtatag

SEQ ID NO: 27961 - DNA, 1179 bp, Zea Mays
gcgccaccgggtcccccatcgatggccggaaccagcttgtaggtgcagtgtaggtcaggcatgtcgagcccgacgacgacggagcagcagcgtgtcagcttcatcgtcgacggagaggagcatgagcagcagcagaagcatgacgaccttgttagccgcgccgccgtggtggcgagggaggtgagcaagcgggtgtctcgcctggccgtcgagggaggagaaggcgacgccgaccgcaaggccaacttcgacgccggggtggcggcagcgcggcgctcgttcggtggcacgcggacgctgccgccgccgcacgcgtggctggcgatcgaggacacgaggaggaggcagaagcaacagcagcagccggaggagcacggcgacagcgacgacccggaggcggagcagtgggcgcgtctcttccggggcggcgggatgcagcagcagcagcagcaaaggcggagcagcttcagcgtggtgcggcgcgagcgcgcggcgcgggaggcgtggctggaccacgcgtgggaggcgaagcggagctggcaccagcgcaacggcggcgcccccgacgcggacacccccgtggtggtggtggtcggcacgtcgccgaggtcgtcgtcatcgtcccactcccagcatcagcaggccggtggcggggtggccatggacgtggaggaggtccgcgcgtgccgggacctcgggctggagctgccctccgactgcaccgtggagatccagtgctacgggctgtccggaggcgccggcagccccggcagcggccccgactcaccgtgcgacggcgccgactcctgccctgatgcagcaggaggaggagcggatccgatggacgtgaaggctcggctcaaggtgtgggcgcaggcggtggcgcttgcatccaccaccacccatctcgcctcatgactccatataccgccgcaacctccagctcggccgggacagcactgcactcaaacgaatcgaagcaaagtagccgagaaaacaggagtgtcgtctctagctataacgaatcaaatgtagactcccattttatatccatatacactactaagtacttactcttcgatttcgaataatgtaaacccctagtgtgagagatatctaagcgtctgtagcttgtgtgtgcaaggaattgtatcaatgtgaggttgcctttttaacaaa

SEQ ID NO: 27962 - DNA, 963 bp, Zea Mays
cttatcgcccctataaaccctacgaagaaggtaaaaaggagggcagccagcggaagaaacacccggaggaagcgcccgattttgacatctcgtatgcgcgattgctggaatcctcctcccctgattttaccgcacagcagaaaagaagataaaacacgacaaaaatctaaggaaaacgcaatcacatcttccttcgtccgctgccgtcgcctctcttcattggtagcagcttaatccaaccccagtccaacccgccgccatgcaggcgctgatggccacggacaaatgcttctctccggctagggcgatgtccccgatgccgattgtgaggccccctgcatcacccgacattgccatgagcaacagaagctcgggcccttcgtgcaggtgctcccaatctgcggcatgctgttgaatcaagagatacggagaatatcaaacctgctttctaactttggactcagaggaaatgagaggtcgccaccaattgcaagtccaaaccatatgcatccattgccccgggtgcctaatttctgtggaaacagttttggtccttggaatgagatgcatcctgagagaaatggtttacctaggggagccatgggctggcaaggtgctgtacagaaccattcctcctacattgtcaagaagattgtgcgattggaagttccaacagatgcttaccccaattttaacttcattggccgtctgcttgggccaaggggacactcgctaaagagagttgaagctactacaggttgccgtgttttcatcagagggaagggctccgtaaaagatcctgtgaaagaggaacagctcaagggaaggcctggctatgaacacttgggcgatccaacacatatcttgatcgaggctgaattacctgctgatgttattgatgccagactggcacaagcacaggagatactggaggagttgctgaaaccagtggtatacatatga

SEQ ID NO: 27963 - DNA, 1515 bp, Zea Mays
cccggctgccccctcacctcgcgtgctcgattcccatctcccccctccctgcgcacagccgcacaccagtaccaccaacaccattcaacagacgccgccgccgccgccgccgcccctcatccctgtcccgtcccgtcccgcgcgcggccgccgcatccgtccgggcctcctcgtctccccagccccgctgccgccgggttcatcagcagaagctgcttgctccgccgccgccgccctcttcctcctctactggtggtgcaacttaaaaccacttccaggagctaatcgactgataaaacatttaaagactaacggggtgcctactgctttggcttcaaactcaccaagatgtaacatagaagccaaaattttcttccaacaagggtggaaagagtctttctctgcaattgttggtggagatgaagtagagaaggggaagccatccccgaatatatttttggaagctgcaaagagaatgaactgtgctccttcaaattgcttagtaatagaggattccttgtgttacaggtggaaaagctgcagaaatgcatgtcatagctgtaccttcaatacccaaaaagactgctgagttcagttctgctgatgaggtgatcaattccctccttgatgtgaggcctgaaaagtgggggttgccaccatttaatgattggattgaaggtaccttaccaatagaaccatggtttattggtgggcctgtgatcaaaggatttggccgtggttctaaagtactaggaataccaacagcaaatttacccgcggagaatttttccgacgtagtgtcagaacatacatcaggggtatactttggctgggcaggactttcaacgcgtggtatatataagatggttatgagcattggctggaacccatatttcgacaataccgagaagacagtagaaccttggctgcttcataatttcggcgaggacttctatggcgaggaggtgcgccttgccatcgttggctacataagacctgaggccaactttccttcgctcgagagcttgatagagagaattcacgaggatggaagagtagcagagaaggcactagacctgccaatgtatgccaagtacaaagactcgccttatctgagaaacccttcgaagcacgggagtagtactaccggtgggacccagtctgagatggattccaagtgacaacccccctacagggccactagataatatgttacttattttctctatggtaaatgcgtcggtgttgatgcagaaacaattggactctctgtgagctaactcgcttcttaattttcggaagtagatagtattcctcgaagtggtgtttttactttgtaatatagaaaaaaataaagtggggttgttgaaacttgagagtcaaattccgagacgttatgcacgttttgatttctgaattaatcgattggtatcacttgtactgtttttatacgatgatgcttgaaccattcatttgtcattttaatttgatatacttgaagtcaacaatatgctt

SEQ ID NO: 27964 - DNA, 608 bp, Zea Mays
gtttagggaccgaggaggtatagcattcttttcataaaacgaccccaccccgaaaatctccccgctcacaaagcagtcctcccaccgcacgcaacgcagcctcgacctcgacctcgccgtcgccatggtgagcaagcagacccgccgcctcctcgtccttgccgccgtcgccgtatgcctccacctccccgccgcctctgtcgccaccgacgtcgattactgcagtaaaaaggagtacccggtgaaggtgagcggggtgcagatcgtgcccgatccggtcgagcccggcaagcccgccactttcaagatctccgcttctactggtatagtacttgacttattggttgcagcctccgtgtttgctggtgttacttgccgctggtaggagtcctgactcctgagtagttggttattttactccgcgatgaatttgacatacgtacgctacgaagagttagtaattaccaaccaaatgagttttgcgcaggactgaatttagttcgattttttttttccgctgtgttatttaagttttgtagggggtacttactagtacctttgggtgctgttgccggatgtaatttcttgtgcagcatgtcgtgcgctac

SEQ ID NO: 27965 - DNA, 2152 bp, Zea Mays
gttcgcagcagcaggagtcggcaaagcaagcttccttccttgcgaacgcaactgaccgctccggattcgccggcccccgccgccgcttcgccttctctctccctcgtccacggcaaccaactaaccgtcgagatattggcggggcgccgatgctccctgactccccgtagcgcgttgcggatgctgtgggcctgtgaggctcgctgccgccgctttgggatctgggctgctgccggagcggcagcggcggttgtgactggcgccggcgatggcgatatcggcgaaggagaggaagctgagcaggctcgggagttgtaagggcggtgcggcggctggaagtggcagcggcggcggcggcggttcgcctgctgccagggcccaccggtcggtggcggcggcgccgcagcggcgtgtcttcgctgcgctcttcgcgttcctgtgcgccggcgtagtcgtcctcggcggcgtgcacgtcattggagcaacgttccggccagtgctcaggacggcgtggccggcggcaaccctgaacgccatttcctccgatgccagagcgcggcgaggtggcagcagcgccgacaccaccgtgctgccgtcagtccaaatccggcacgcggtcgccatgccggaccgtgtactcctgatcctcaaggacgggccgttgctgccatctcccgagcggttccagtgcctgtactcccccgccaactcctcggaactgcgccgccaccgacccctcttggccgcctcctcacccgatggacccagcctcgtccactgccctgccgagccatcgtgtgtggacgtctctctgtccctgtccctgtcccctccggtggcgccgctgcagtgggacaggcttgtgtacgctgcgctcgttgacagcagggacaactccaccgtcgtgttcgccaaggggatgaacctccggccaggccggttgggtgtggcgtcgagaggttttccggtgcgtgactccagctcgcgttcgccggcacctcaggatgacaactgatcccaacggcaatggcaatggcaatgacaagccgatgttggtctccatcagaacgaaggggcagagggactccacgctgccctcgatcgctgaacctgagccacttcctcctcggcacaactacaggcatcatcgacgacggccaaaggcgcactcaatgtgcgtgtgcaccatgctccgcaaccaggcgaggttcctcagggaatggatcatctaccactcgcgcatcggcgtggagcggtggttcatctacgacaacaacagcgacgacggcatcgagcaggtcctcggcaccatggacccgtcgacgcacaacgtgacgcgccacctgtggccgtggacgaagtcccaggaggctggcttcgcgcactgcgctctgagggcccgggagagctgcgagtgggtggggttcatcgacgtcgacgagttcctccacttccccggcaaccagacgaccctgccagacatcctgcggagctactcgaacaggccgcgggtgggcgagctgaggacagcctgccacagcttcgggccctcggggcggaccagaatccccaagcaaggcgtgacgacgggctacacctgccggctcgccgcgccggagcgccacaagtcgatcgtgaggcccgacgcgctgaacccgtcgctcgtcaacgtggtgcaccacttccacctgagggaaggcgcgaggtacgtgaacgtcgggcagggcgccatgctcgtcaaccactacaagtaccaggtctgggaggtgttcaaggacaagttctccgggcgcgtcgcgacctacgtcgccgactggcgggacgaggagaacgtcgggtccagggacagggcgccggggctggggactaggccggtggagccggaggactggccgcgccggttctgcgaagtgtacgacaccgggcttaaggatttcgtgcagaaggcgttcgcagacccggccactggaagccttccatggtagatgatgggggtatacatacagagagacagggaattaagaaacaagtaaacgaaaaggataggtagaagagtggtttgctctctgttagtcatttgagataaaaagaaaggtaggtagtaagttatcttgacgaaaggagggaattctatatatacaaagcgggatgg

SEQ ID NO: 27966 - DNA, 505 bp, Zea Mays
aggaccacccaagactggcccccgatcaaaccattcctgagaagcgccttgacagcctcggcacgccgacgccggacactgttggtgaaggtgtacatggaaggcgttgcgatcggccggaagctggacttgctcttgctggatgggtacgacagcctcctagcgaagctccgccacatgttcaaggcctccatcacctaccgggatggagactggatgatggttggggatgtaccgtgggagctcttccttggaagtgtgaagaaactgaggatttgcaagaacagataaatgctagtacgttagcaaagcttattattcgtgcgctgcatggactctatttctttcttctttttatttatatcggttcatacagcagaaagattttgctggccacagagtggacatgcatgtgataccgaggctatatatactgatcgtgtacagtatactgaagaaaagtcaatcttgataccttccctagaaattaaattttggtattttt

SEQ ID NO: 27967 - DNA, 1962 bp, Zea Mays
cgttcctggagcacgcatcgcagctcgccttgcgcctgtataaatatagtatgtagcagggagagggagggtacggtgtaggctgtagctgtagccgtgtaataaggtccttccggcctcctccgcattcctaattgcagcgcgcggcattggcacagtagatgaactagagttcgttcgcgtccctgctggagtgctgggcaccggcgggacaacgacgatgggcaggaggctgccagcgggcggcggcgctgtgcggtagcgcccgggcggcggcgacgcgggtgaggaagaagcgggtgcagcggcgggcgccgccgtcgtcgtcctccaagctccctgcggcaccgcccagcggcggcggcaaggccgggagcgcagggaggaggcgcgtgctacgtcaacggcaacggcaacggcgagctgatggtgggaggtcgtcgtcggcagcggaaagggcggcggcggtgggcggcgggtcatggtgctgggccgacggccgcgccgaggccgccggcgcgctccagtgggcgctgtcgcaggccgtccggagcgacgacaccgtcgtcctcctcgccgtcgccaagccgccggtcgcccgagacgccgtcagtgattcctgtgtcaggatgctggggaccaagagccagcaacacctcgccgccctcaggaccgtctgtgaatcaacaaggccagaggtacccacaccacgcagatgcatgctactagtacatgatgatgatgaacagtgtaattaatcccccactaaaattattactaggataagataggtagtagtttggaatttcaaaacaatgtagtacatagtagtatatcctagctttccaaaaaaaactgttagtccaactgtctagaatacatgtaattaaattattaaacgaggctaaattgtttccgcgggatgcgcaatgatttgttgccgtccagtccagtccaccacggccaaaagcaacagccacttagcggattttgtggggggcgtggccgtggccgtggcccgtggcaccgcaccgcactggcgccaaaagaaaagaagaaaaaaacaaaataataatggtggaggcgtcgggatccgaggccggctctcaccagacgagatcatcacgcacaaatgcaggtgaaggtggagacgtgcgccgtggaggcggaggagcgggcggcggcggtggtggaggcggcgaggcggcacggcgcgtcactgctcgtgctgggccagcgcccgcggcggcacgccgtggcgcgctggctgcaggcgctgtggcgttgccggcgcagggctggcggcggcgtggtggagcactgcatcgagcacgcgccgtgcgtggcgctggccgtgcgccgcaggagctccggcggctacctcgtctccagcaagcatcgcagggacttctggctcctcgcgtagcagtcccacgctggttatcttcgatcagtgtcccctcctctatctctctccctcatttttgtccaccagttcgaaactattgtctgctgtaagttaatcacagcgagtttgcctctgctgctgcaaagctagctatatgaatccaaacggtgagcaatcaaaacttcagcttgtttcagaaaactgttcggtgtggaagaagatggccaaatatacgattctttgcgcgaagctagaatgacaactgatacgaaacacccttgtcaaattaattatgtattacttttatgacagactgtttttcgatattattaggacttctttttgtgaagtttactcagtttattttgaattatgtaaagcgatttaatttgagtattgaactacccaagccatgatcatgaggctaatcgtctgacaattaagtaaacagaatacctggatgattcagatagtaaatcgtaacactattcacacaaactactgcttgctgggatttatacaaagataaggtaaacagtttcgctgaaaagttg

SEQ ID NO: 27968 - DNA, 315 bp, Zea Mays
tttttaaccaaacataataatctttatagagatcttcctaaaattaatgagagagttgttaaatggcatcgctacctgtatccttttacacatcagccggcggcagattgctccaaaaaccgtaacctttgggtgggagaaaatcgaaaatactcttcttctgctaacaagaaagatgaccaacaaactaataaagtccacttcctatccaaaagcttaaacctttattagagcttctagatagagatttggagcaacagcccaaatccgacgcggaaacgcatcttcctttaaatatttgccgactagtgtttt

SEQ ID NO: 27969 - DNA, 1916 bp, Zea Mays
acccgtacgtgcggtcagagagctatctggggtggcattggagttggagccggcctgacagcaccagagagagggttgccgacatgggagaagcggcagaccgcgagcggccgccgtggcgctgcacggtagccgtgcaggccgcgctctgcctcgcgctctacgcggccttcagcctcggcgagccgcagctcatcccgcggggcggggtggacgcactcgggcggggcgcgcgcggcggcggcgtcgccttcctcagcgtcgctggcggcgcgcgcggacccatcgaccaggagaggctcctgaggcagatggagaccacagcaaagctttatgaagtcaagttcgtgctggatgttactcaactgggagcggatgatccactctggcaaaatggttccatgtacttccaggctctgaacatcccgtggtactccacttcatcacatgggcggacggttggtaactttttgaagaaagtgaagatgccctacgatcaggttctagatattattggtctgggcacatggcctctgcaggaacctctacatggtggcaggataagcacttcttacaagggacaaattaaatggttggatcgattactagcactcactgaaagcaattggtaagtgcttactagcacttgtccctgtgtttgtgcaaactctttgtattgttattggatatgctagtttttttagataatgggaattgaaagttcccgacttttgtctcaaagagactacagccgatttattacaaactcagacaacataatatagagctgagaaacgaaactagagacaaagcctaaatgcagatccccatccatgatgtctaaaaatatgcatcaccaattcttccaaactacaacatgccttgtttaaagagatgcactgagttagcgggactgagttagcattgtatagtttagtattgaagaatgaaggtaccttgagaaactttaaacatccataagaaatagtaaaataaccctgtttagttgaatttatgccttcatgctgcatatggagatttatgcatgtgttactgtctgtaaccataatgctcacattctttttgttttaaaaaaggaaaatagttgttggatataatccattacttgtttgcaatgggaaagaaacaacaaagctcgatgtgccatttcaacatatttttgcaaaatatgaagtgaatgcatacataagcatgggcgggtcttgtggctacttccatcgagacaactcgatactgtacattggacaccccaggagccctggtggtgcccaaacaagtgtagatggttttttcttgcacagagttagacccctcgagatggagtcaatgttgataaatgtagaaggcaagctagttcagagatctgatgttcagcagcatggaacgggagccatgtgaacctcacaactttcagtttctgttccattatgtcgtagcgccgaacaaaggcgtgacataatgttgtgttgtattgtattcattcagtttaaaaaaagctgcattagatttttgtcattttgcctgtttcaacatgtttgagtttgtaggtagtctttatcattatttacaaacatacaagagttcactatcacatgcagagtgctgcccaagcagggacgagaagttagttaatacattacttttctttatctgctggttctgtgccagttgatctctcaaccgatacagtccgattttgtttcagaaattttagatgatggttgcaaggctgtaactatcgttttgatgattcctacggcccactacatttcattttatcttttacaaaaactaaattcagaactcagaaagatacggttggtggtatagcagtttctttggagacttgctgactgacaaagagtctgtgaaattgtgaattcgcagctccaaag

SEQ ID NO: 27970 - DNA, 2651 bp, Zea Mays
caggaccctcgcaagtactgaccagccagtccgggtctttcgccgcggccaactcctcgtgacgtcgccccggacggccccgatccaccaggtcccatgttggacggcggatctcgtccccctgcgctctccgcacacccaccgttttccttttccgccccaggcaccctgcacgatcgcgccttgccttccattttcctgccatcgtcggaagtcggaacggcggccgcccagaaaaccccaactcccgcggcgcaaaaccctagtagaggttgcgcgggacactgctgtggttccggtgatggagggggaaggcgacgccagtggtagcgatgaggtggtgcagctggaggacgcggtggagctgctggtggagcacctcgtggtgccggtgctgccgcgcggccaggtagaccgggaggaggccctgtcgcctgaggctcaggaggctgtggcgcgtcaggtccacgcgacggttctcctgtacaactactaccaccggaagcagttcccgcagctcgagtttgccaaccccgaacggttctccatgtctgcctccctcagcgtcaccaacaaaaatctgctcatgtacctgaaccaggcgcagaaccgcctcggcaacggagtgggggccgggctctcggtcactgacaaggcaatcgtcgacgcctgcgacatcgctgaggcgctcgaccccacgaaggactcccccgagatgaccacgtggccgatctccaaggtcgctgttctgcttctcaatcggacaaagaaagagtgcgtgctcgagcatggctccgaaaccaagggcgtctggtcgatgtttgagaaagagatcacgacggcattgggtggttcgctcagcagtgacatgccagtgcaggggtcgagtaataaatccgtgggacttccttcggaaccgtacgtgcttcagcagattgcatattcagaggtggaactcaaaacaggtatgaagcatacaaatttgcgctttatcgaagaacatcgggtgtactcactgagtaagaaggggacagctaccatgttgttccttctgcactatgatcagactgtcgatagcaagcttaaggaaatgcctttagatgccctgatcgaaaggatgagtggtcctatatttcaaagtggtccgtacccaacaacgacatctgtagttgaatactatcatttactgccatataaggaggtcttgttaaacgtcctgaacagggactggcctttgtgttcttcactgagcgtgccaaaggagcaggtatttcaaaatgggaaatcttcatttccctctgaaatagaagaaagtttgaaggaacaagaagctaatagtaatagcaagactaaaatgaaaaaaatgccaacagacgtttctactccaaagaaaaataagcaggtagtaaaagcagttcgtgacagtggcaccaacgaaagcagcaccagcaaaaacaaaaaaggcagcaacacgaactgcaaaagaacatctgaagcctgcaagactaaagttgctacctacgcagagcatggggatggtcagagccctacaaaagacttacaagccagtgcccaaatggacaagagcagaacagagaagaacactaaaagtagaaatgtgccccaaaatatctttctgacaccagatgttggtcctgtaaataatgaccatgccttgaaaagccaaaaggagaaagtcactgataagtctggtggcatcacaggtaacatgaatgttcagaagtatgcgactctgcaattactttggaagatgcgagatgatacactccatgagcattttatgcttggagatcgatgtgctgagtacgaaatggacattcaaacaatcttgacagaaacagagatgacacctaaagtaatgtcaatcctaaagaaatatgagaatagttggaaggcgatgaaagttgccaatccaattagctctggagaaggatgccaaaccatgaacataaagaggaagaaactgaaagaagccatacttctacgcaacagatgccaggaactggatgatatatgccgtgagagcaactggattcttccaagatacagagtacttccttcagttaccggtgatatgtaccaggccagtgtccaccttatgggcccagacttcaacttgagtgtagatggtgatgtgagggttacccctcacgaggcacgagactcagcagcgtccaacatgctgtctcagcttcagcagaaggcaagggaaggctaggagagcggcatgtctccacagaacccttaatgctgcatccttgtgggtatcgacttgcatgcgacaggaaagaacagccatcacagctcagaaatgaacatgctggttgtcaaaacaaaattctatctatctatttgaacttaagaattctgcaggtgtggttctgcgttttcttgttgggcaatctggattttcacttgctatcttgacttgaccatgttctttttgtttggctacattctttttcgttcgcgcatggtagcctgctgtgctaagaaccgcggcccggagaggttcattggtctttaagctgttggctgcaggctatatacttgtcacccacccaccctgccgttgctgggagtccaaactcatagggatgaaagcggcgtggatgcagctgaatatggag

SEQ ID NO: 27971 - DNA, 1548 bp, Zea Mays
atggagggcggtaacatactgttcaagggtgaacactttcccccgggtgaacgattccctacctgggacgggatttctactcgttggcttctgtacacggaacaagcaccttctgcatggctgaattttgcattgtgtggcttggtggggatcgtcacagcatatgcttttgtttggatttcgaagtattacacggattataaacacgagccagtccggcttttagctctttcgagttccacaggacatggaactaatattattgctggagtaagcttgggaatggaatcaacagcactaccagttctagtgataagtgttgccattatatcagcatattggctggggcagacctctggcttggtggacgagtctggcaacccaactggtggtctttttgggacagctgtagcaacaatggggatgcttagcactgcaggcctgaaagtgtgagggaaatcacagatgttctagatgctgtgggcaacacaactaaagctactacgaaaggatttgccatagggtcagcagctctggcttccttcctcctgtttagtgcatatatggatgaagtagcttcttttgctcaattgccattcaaggaggttgatatagcagtcccagagatttttgttggtggtttattaggctcgatgcttatattcctgttcagtgcatgggcttgctcagcagttggcaaaactgcacaggaagttgttaaagaggtcaggagacaatttattgagaggcctggtatcatggactacaaagagaagccggattatggacgctgtgttgcaattgtggcatctgcatccttgagagaaatgataaagcctggagctctagcaattatatcacccatggccgttggcgttgtcttccggattttgggccactacactggtcagcctcttcttggagctaaagttgtagcctccatgctgatgtttgcgacggtcgctgggattctcatggcactcttcttgaacactgctggcggcgcctgggataatgcaaagaagtacattgagactggcgctcttggtggcaagggcagcgagtcccacaaggctgcggttactggcgacacggttggagacccattcaaagacactgctggaccgtcgctgcatgttcttatcaagatgctcgccacaatcacgctggtcatggctccgatattcttgtgattaaccaaccactcatcaagcttgctattaaccctgcggagatgtacctatgcgaccaggtagatgaggtgtgtgtgtgtgtgtgttacctgcatgtgatgatgtaacggtccaatcggtttgtgtcacgacatgctgtacccagagaaagaagcggcgatctatacccatgtctcacggtagatattatactgatgatgcaaatgccgtgttttgttactgaattagtggcctgaaagttgcgcttgttgattgatgaaacattatggtagcgtacttgtatgctgcatcccacaatggattttatgatgtggaccccgaatgttttgcttatacaatgtttgctatgcataca

SEQ ID NO: 27972 - DNA, 1805 bp, Zea Mays
ccctcgtggcctcgtgggtgggacaccacacgtcctacactgcgagcgcgaggcaagaggagggggagaaggcgacgcggcgcgatcatgcgagcgacggcgggcgtttgagctaacccgcgccaccccccttcctcggagtcggagcgagtcgaggaacggctcgtctgcctctcccgttctccttcctctcctccccagaagatccgatccatcatcgaggactcgccgggaagaatcaaggatatatagataatatacaaacaaaggttcctccagagcccagagcaggagggaagtcaccggccgtcggcggggaggagatgtcggacggcgcgggctcccggacgggcgtcgctggcgcgctgggcctctcggtcacctcgtcggtggccatcgtcatctgcaacaagtacctcatcagcactctaggcttcttcttcgcgacgacgctgacgagctggcacctcatggtgaccttcttcacgctgtacgttgcgcagcggctgcgcttcttcgagccaaagccgatcgacgcgcgcaccgtcatctccttcggcctgctcaacggcatctccattggcctcctcaacctctgcctcgggttcaactctgttggcttctaccagatgaccaagctggccatcatacccttcaccatagtcttggaaaccctctttctgagcaagaagttcagccagagcatcaaggcctccctcatggttctgctgctgggagtcgggatcgcgtcggtcacggatctccagctcaacctcctcggctcgatcatcgccgtgctcaccatcgctgcgacatgcgtcgggcagattctgaccaaccaaatccagaggaggctgaaggtttcgtcgacgcagctgctgtaccagtcgtcgccgtaccagtccgcggtgctgctcgtcaccgggcctttcgtggacaagctcctcaccaagcgtgacgtcttcgcgttcagctacaccacccaagtcgtggtgttcatcctgctgtcgtgctcgatcgcggtgtgcgtaaacttcagcacgttcctggtgatcggcacgacgtcgcccgtgacgtaccaggtgctgggccacctcaagacgtgtttggtgctctccttcggctacatcatcctcaaagaccccttcagcgcgcgcaacgtggtgggcatcctcatcgccatcttcggcatgggcctctactcctactactccgtcgtcgagagcaggaagaagaccgaggacgctagctcgctgccggtcgccgcgcagatgagcgagaaggactcggcgccactcctcggcgccaagagctcgccgcggacagagaacaaggccgaggaaaccttcgactacatgccgaggacggccaagagcgcgttcaccggccggtgagcgcgtagcttgtaaggagtacgtatctttctagagttgtgggtagacgacgagcaacaaggcgggaatgtgttagtgaaagatgtaacggcggcaagtgacattccaattatcatttttgcgatttctcctctagggtggtctgcgtggtcatggtttaccagagcataaacagcagaatgtgtggtctactggtcttgaccgagcttgaaatagtagattggattggtgataatacaactatacaagacgtgcgaaatgtgtaaggtttgtgcccgttaggccatgttcgggtggggattagaggaaattaaaattccttctgttcaattttaaataaaaaataatttaatctcctccaatcccctcaatttattcctagttgaacaacccctaaagtcttgttttgtt

SEQ ID NO: 27973 - DNA, 2773 bp, Zea Mays
ccgtgaatcactccctgccccacaacccccaagcaaccctagctctccctccccctccgcgtcctacagccatcgtcgctctgccttccgcccccgccgtcgccgcagacgcagccggccacccaccactcgcgcctcccccaccgcgtcgcgtgtgggccacagctacagctgcctcctcgagcaacccacactcctttcttcccctgcctgtcgtctctcttccaccttccaccacaagcgccgtcgcagccggtgcctgctccttcccgatccccgaggcaaagctgcgactccgcaactgccgccatggcgttcgagaagatcaaggtctccaacccaatcatcgagatggacggcgatgagatgaccagggtattctggcagtctatcaaggacaagcttatcttcccatttctggacctggacatcaagtactatgatttggggatactgcacggtgaagcaactgatgacaaggtcacagtggaggctgcagaggctactctcaagtacaatgtggctattaagtgtgcgaccattactccaggtgaaactagaagaacgtatgaagctagacttgttgcaatttatagacatgtaagagaggatggagttgagggacaacctatttctgtttcaacagaacaatttgcagtaagtcaaatcacctcttgtactataatcttgcaattgtttctttctctctcttttctaagaataactattgcattagcatattttactaacttgtataaattgttattttcaagagattttatgtaccgtttctttacaaacaatgctaatgccacatccacaatcttgcagaactttgaatggcaaccagttatctggatctttgcctgatgagattggttaccagatgaactttaacagattagaaataaaatataacaacatatcaggcccatacctaacacttttgccaacttaacaagaattaaacatctgttagtgtcgagtatctttattttctgcccatccctgatgcttctgatttgtaaaattagtaaataattctggttccaattttaccttttagtcacatgaataataactcattacaaatcccatctgagttgtccaacttgccttaactccttcatttccttgttgataacaataattgatctgggcctcttccaccagaattagtagatacacgtagtcttcttgctatcttgactgctgataataacaacttcagtggaagctccatcctgctgaatacaacaacatacaaacacttctaaagctgatattagttgtcaaatattttagtactaatattgagggggatggcggagggcattgcgctgcggggttacatcgccgtcaccttcgacatgcgcgacataggtgggtccacagggcgggtgtcgctcacgtgctccatcaagaacatcgagtgaggtggtgtgctgctgctctaaagaagggaggagaggaagtagcgacaatgtcgccaagaccacctggcgcgatgtctcctaccagatcaccaagatcaacatgtacaaggtgatccagtccgagccctctccctgcatgcttccattgattttttatttcattccaatcgatttgccgtgatatatgcaatgcaggatggtcggcatgtacaagatatgcttaagcatcagaggctccataaagcagctctgctagaattaactgattcactgtcaaggtcaaacatcactatgatattgctgagatggtccaatcagtgacaatgctggtggtattgttgagatggcaggaatgagccacaaaatctgagagaacttatgctcttggtgctgctgacaacacaactgttgctattagaaagggatttgccattggttcaggtgctcttgtgtccctggtgctgtttggtgccttcgttagcagagctggagtgaaggttgtcgatgttctctcctgaaggttttcattggtttgattgttggagacatgtttttgtactggttctctgtcatgaccatgaagagtgttggaagtgtcgccctaaagatggtggaggaggttcgcaggcagttcaacaccattcttgggttgatggagtgaacaagcaagcctgactatgcaacctatgtgaagatttgcactgatgcttcttccatcaaggagatgattccttggggtgctctggtcatgctgactccctcattgatggaacctctttggcatcgagactctctctggcgtttttgctggtgccctggtttttggagtgcagaacaaggccatctcagataaaagtagatgtagctttcataggacttaattccagcaaagcaaaggttggcagtgcaccaaacaatagcgtttatacttcattcttatggattggagaagcctatgcaacatgtcaagccagatgacatgcagatgagaaggttctgcatcaatagaaaccagagaaaaatctgtatgtgtctgtatgacatctcagataaagcctgatgatcagcatgatgaaaggtggggagttctatagctggtttaagctggagctagcttctgaagtccggtcaggtgtctgtatgtgttgcccctttttatttcatttcatgagaaaagattgttatttgttccttgaactgtacttggtcgtacttgtgaataaatattttagcatggttgttcgacttctcataatgtttattcgacatcagttcatgatattagtgttacgtgatattttatcatatgaattttgaatatcatagtgatgtttatc

SEQ ID NO: 27974 - DNA, 236 bp, Zea Mays
cttggcagttcttcttcaagacggggcaacctgatatacttatgcgctggagggaggacggcagatctggtaaagatgctatgttggggcaacaccctatagaaagactctccagatttgagagggattttagattttttggtagggactccacattttgcaataccaaaatcccaggcacttgacagatgagagatttgcaggctcttcaaatgaaactgacggctctttgcaat

SEQ ID NO: 27975 - DNA, 2188 bp, Zea Mays
acactctcatccccgcaacaaccgcctaccggcccgcgcgcgctgtagtctccggcagacaccaacaaggctcgtcactcccctacctccctcggtactcgctccgtctctcgtctctcgctcgcgcatcggctgggggcacggagaacgggaggcgcggaaggtcagaagcggcggccggcggcgcatcggcctcgcccaggcctagtcccgcacggtgctcggtccttctccgattctcccacagcctcgccccctcgcccctgcgcccctgcgcccctgcgcgtccagcgccccaaccccagcggcctgcggcactgatccacagtccacagacccggacaccggccgggcgaggatccgctgaccacgcagcctccaacgccgcatggagatcgtgcgctcccagaggcaggtcgccgccgcagccagtggcggcggcggcggcggcgcgggggccctgccgacctacaaggcggcgccgcagctcgaggtgcggctggaggagttcgagctcttcgccatcgaccgcctccgagttctcaaggggatttcggatggactctcgcgtgggaagaggccggaggagatggagaaactggtcagtgaattgtggaagacacacatgaggcaccaggatccagcagagaatttgaacaaggatataatatcgcactttgtgctccgtctagtctactgcagaacggaagaattgcggaagtggtttctctccatggagactacactttttcggtatcgctttcggcttgagagtcctgaaacacagaggatgcttatgactgagtttcaattgccgtataaagcactgccatactcagagtttgaggctgtgaaagacaaattgagccaagttgcacgttccattggtcaatctgccagtgttgagcatgtgttcttcaaggtacctttcgaagaagttcctgatcttgttgctggccgtcgggtatttctttcaaaaggctatgcttatgtggccatgagccaggtggtttctctagtggttactcaattccgctgcaatatctcaaaggcacttgctttaacaaacagaaaatggacagcaactattaaagaacaagaaaaggacaggttgactcctattgttgaagcattaagcaatgcgtattttggacctgattactctcagccaaaggatgctgttgacatatctctaaaggatattgaccaactggctaaaagttctttccctctttgtatgcggcatatgctagataagttgagagaaaaccaccatctgaagcatggcggcagaatgcagtttggtctttttcttaagggtgctggactaaagttggaagatgctcttgcgttttggagggcggaattttctcaaaagattggttctgagcggtttgacaaggaatatgcctatgccatcagacataattatggaaaagaaggaaaacggacagattacactccatattcatgtcaaaagatcatttctgcaacacctggcgttggagatcaccatggatgtccgtttcgacattttggtgaagaaaatttgcgggcagcactcaacaaaatgggcgttggtgggcatgcattggaagaggtaatggataaagtgaagaacaggcattaccaggtagcttgcacattaacctttgaggccacacacggtgtctcctgtgattctggaatcaaccatccaaatcaatatttcagtgaaagccagaaagttctgcgagccaaaaaccaaacaatggagagccaatcgcaatcagcaacctaaattgtgtcagcagctggagaaactatacatttccaaaaaacttaccagcagctgctggcttggcctaaaacgaaaacctccaggctccagctgctagctgtcataccctacaagtgatggcaccgcactctacactagaattgttacctagtgctgcgaacagcagcaggtcaaggcgtctgtagactctgtacatgtaattctcgaaagaaccaagacttctgcatttaatgtaggatcagctgtgctgtgctcttagacctcatccaccagtttatctataaatttatccaaaatactgtctttcattgttctatattgtaaaccgcgttgttcgcgtagtagggtttgaaatggggatgataatggataaactgttggagatagtattattacaagataaaaaaa

SEQ ID NO: 27976 - DNA, 210 bp, Zea Mays
atttccgtttggatttgttccacctgagcctataaaacgtagtcgcccactaaaatattgccagccccgcagtcgagatggccctacgcctctagctcgtgccgttgggtagcagagatatccgaccgccgtcgtgggcgattcttgcccaagccgccgatccggcctcaagaggagagcagagagggagtgcttcgatgccgctgacac

SEQ ID NO: 27977 - DNA, 772 bp, Zea Mays
gtggtaccaagggaatcaccgcaacatatcccctgaatggcttagaccacgatgcgtgtcgccggagtttccacgggaaaaaaaaaacagcttcggttccaccctcacgtcattttccccgcgcgcctcgtggagccaacagccaagctcgcacgcccgccgcgaccgttgggagagcgtggtgggcggctggctgggctggctggctggctgtggagacaggatcgagcccgccagcgtgacgcccggctttgtcctggcctcgtcttgggcaagtcctaggcggaggagggcgcacacgggtcgcgctcgcgctccatggcggaatccgcggagcagggcagggcgaacggaaggcaaaagagaacaaaccggcctcgtcaggaacccggtggcattgacgccttgctgccgctattttgtactaaatgctgctttcggcgggtggcggcactggagatcctgctgctgtgatgggcaaaaaaaaaaaaaaaaaaaaaaactctccgctccgcaggcctcaagtctgaattcgactcggctgccggctgtctgatctgaatcccgtctggtcggtgctctacctgtgtgtgttggcttcaatacggaagctcgattcacatactgctctatttggtagcaatttcataacgcctcgtttagatcattagaattgaatttcattctaataatagtaattttggcatatatcaattaagctaattcagttttatacaaaatatatttgtatacgattattagcaagatgtcg

SEQ ID NO: 27978 - DNA, 2155 bp, Zea Mays
ttcctcctcccttttcccaccttgcttcctctcctcgctttgctctctctctctcacacgcacatgcgtaggaagggtaggctcgaggtcgagctactaccatccatctctccccattgcatgcgaaacaagaaagcaagaggccaagaggagcagagtgagtgagtggcgtttggtgtgaaatgtggacttggacctggaaggaggacgaagcgggtcatggaatggtgatggacctgctgcttgctcccctccctgccgatctctaatcactttgcccctagtgctgggaggagaaggacaaggtctctgatcagctcagcttgtctggtcaaagctgagagcctcgttgtgctgtgagtgcaagctcgaccgacaggacccctgccactgtgaagcacagcgtcagcggcgacaagacgaaggggcggaagctgccaagccgatagatctacgcaaatggagaccaaggacgtgtcgccgctcgccgccgccaccaccaccaccgcggcgcccgtgcctgcaccgacctctcaaccgcctccgccggccccttcttctatggcgccgccgcagcaccagcaccagcaccatccgccgccgccgttcgcgcagcaggcggccccggttccgtcgcctgccgcgtccatgcccggcggcatgcggctctcgttcgaccagatgtccgggaaggcgcccggggagcagcaccaccactccgcgcccatgctgtacacggtgccaccaccgcagtccgccgcgggcgcgggcgcaccgggggccaatgtgctgggcatgggcgagctgatgcgcaagaagcgcggccggccgcgcaagtacgcgcccgacgggagcatggctctggcgctggcccccatctcctccgcctcagccggcggcgccgcagcccccggacagcagcagcacggcggcgggttctccatcagcagccccccgtccgaccccaacgccaagcgccgcggccggcctcccggctctggcaagaagaagcagttcgaagccttgggctcctggggcatcgccttcacccctcacatcctcaccgtcaaggccggcgaggatgttgcttcaaaaataatgacattctcacagcaaggccctcgcacagtctgcatcctttccgcgaatggtgcaattagtaatgttacacttcggcagccagccacatctggtggactagttacttatgaggggcgctttgagataatctcgctatctggttctttcctgcttgcggaggatggtgatactcgcagcaggactggtggcttgagtgtcgcacttgcaggatctgatggccgagttcttggagggtgtgttgctggaatgcttatggctgcaactcctgttcaggttgtggtggctagctttatcgcagagggaaagaaatcaaagccagcggaagcacggaaggttgaaccgatggctgctcctccaccgcagatggctacctttgttccacctccgctggccaccagccctccatcggagggaacatccagcgcatcatctgatgactctggcagcccaatccaccacagtgcgatgccgttcagcaactccagccagcatcaacaccctcaccagcaccagcaccagcacatgccgcctgcctacgcatccgggggttggtccctctcagtgcaccagcagaataggcatgattctgacatgaagatgatgtcgaactaacagtgctcaacctaggcgtcccatttgttggttgggctggagaggaaggaagctgctgatggttggtactgccgctatgaaatggtcttcttgcgccgtctgtcctgatcagtgaccccgtgttgctctggtcaatgacggtgtgtctgctatagctaagatagctaggaaggattagagtttatgggctcacttgctgttgttcccctgggtaagattaatttaatttgaattagccgctgttgtaatgctgtagccagtgtcctgaagtcgcttatcagtcagtccctgacgcgagctgtgatggttgcctgatgagatcttcacctcctagtcctaggctagttaaaatatcatttctctagtactatgaatcatgaatttacttggatgcttcggtttgattcaggaatttgatcgtattatgtttcgttttgttctc

SEQ ID NO: 27979 - DNA, 3490 bp, Zea Mays
cccaagccacctctgcttctcctccgtctcgtcgtcggccatgacacccgccggtggcgccaaccactccccggcgccgcgtagcctggtattcgccttctacctcaccggccatggcttcggccacgccacccgcgccatcgaggtggtgcggcacctgatcgcggacgggcacgaggtgcacgtggcgacggccgtgccggagttcgtcttcaccgccgaggtgcggtccccgcgcctccgcatccgcagggttatcctcgactgcggcgccgtccaggcagatgccctcaccgtcgaccctctcgccacgctggataagtaccgtgaggcggcagtgttaccccgcgagttcatcctcagggccgaggctgagtggcttagctccatcaaggcagaccttgtggtctcggatgttgttcctattgtgtgcaaggtggcttcagatctgggtgtccgctctgtatgcattgggaattttagttgggacttcatatatgctgaatacatcatggaggctggatatcatcaccgatctattgtgtggcagatagcagaggattactcccattgtgacatattacttcgactacctggatatggcccaatgccggcttttcgcaacgtcattgatgtgcctcttgtggttagaggattacgcaaatctagatctgaggtgaggaaggaactaggaattgaggagaatgctaaggtgctcgtttttaattttgggggtcagccagcaggatggaaactgaagcaagaatgtctccctgatggttggatttgtttggtctgtggtgcctctgattctcaagatgttccaccgaacttcattaagcttgcgaaagatgcttacacacctgatgttatggcagcatctgactgaaaaattggatatggaactgcaagtgaggctttggcctgcaagctaccattagtgtttgttcgcagagattacttcaacgaagagccatttttgcgaaatttgcttgagcactaccaaaacagcattgagatggtcagaagtgatttccttgctggacactggaaaccgtacctacttcgtgctctcacacttcaaccatgctacaatggcccaataaatggtggtgaggtggtttcccagattctccaggacactgctattggaaacaaatgtatttctgataaagctagtggtgcaagaagattgcaagatgccatggtctcaggatatgtacttcaaagggttcctgggagagatgcaggcattcctgactggtactctgtgtccgaaaccaaaactggtggcggtccgacctcacaaaatgttgctacaaaggaaagtgcagcattatgtattgaagacattgagatactccatggggaccttcaaggattaacagatacagtggactttttgaagagcttatctgaacttaatggaaatgatttgaagagccctaagaagcaagacctagagagaactgctgcatctgttctttttgactgggagacagaaatatatgtagcaagggcacctggacgtttggacgtcatgggtggcattgctgattattcagggagtcttgttttgcagatgcctcttcgggaagcttgccatgttgctgttcagagaaaccatcccagcaagcagaagctttggaaacatacaaaagcaagacagcttgttaacggaggcttggtacctgtgatacaaattgtatcatttggttctgatttgagtaaccgtgcaccaacttttgatatggacctgtcagattttatggatgatggtaaaccaatatcctatgagaaagccagggagcttttctgtcaggatccatcccaaaaatgggctgcctatgttgctggaacaattctagttttgatgactgaacttggtgcccagttcactgacagcattagcattctggtttcatctgccgtgccagaaggaaaaggtgtttcatcttctgcatcagtggaggttgctacaatgtctgctatcgccgcagcctatggtttaaacatcataccaagggatcttgctttgctttgtcagaaggttgagaatcatgtagttggagctccttgtggagtaatggatcaaatggcatctgcgtgtggagaagctaacaaactccttgcgatggtttgccagcctgccgaagtgaaggaattggttagcatacctactcatatacggttctggggtctagattcagggatacggcatagtgttggcgggggagattatggatctgtgagggtaggcacttacatgggacgaaagatgatcaagtgtacagcatcagatttagtttcagaatccttgacttcagggtcccctgctcagtctgattgttataaagaaaatggtgtgggcgtactgaaatctgaagctgcactggagtatttgtgcaacctaccacctcacagatatgaagctgtttatgcaaaagacattccagaggtgattagtggagaagcattttcagagaaatatggagatcacgatgacacagtgacagttattgatcctaaaagatcttacagtgtgaaggctcctactagacatcccatatatgagaacttccgtgtcgaggccttcaaaacgttattagaggcaggtaatacagacgagcagctgtcagcccttggagaacttatgtaccagtgccacaacagctacagcgcatgtggcctcggttctgatgggactgacagactagtcaacctggtacgagaagtgcaacacaggaggacatccgaaggcggaagccctagtctgtttggcgcaaagatcaccggcggaggctccggcggcacagtatgtgttgttgggaagaactgcgccaggagcagtgaagagattgcagagattcagcacagatacaaggctgagaccgggtatctgcccattcttttcgacgggtcgtctccaggagctgggaagtttggttacctgaagatccgacgtcgttgtccctagtggctgattgggaaacgaagaacttcagttcgagctttgtcacatatcactcaattgttaagaacctcactccaactctccaagccattgtagaacatagaggcgtattgccacttgcgatgattcgtcgttcacacacaaaatattatcatgtgctacaccaattctggaagctactagaggaaaatgtgaggaatataaagaaactcttgttgagcagatgtagtctagtggtctccgtgtgcttgctgcagtgtaaccaaactccaagtagatgtgctctgggctctggcatgtggtatgtgatgaagtcgaggatggtttcttgccgtttgatgaccagtgtagtcgttggttaacttgtcagtcgtaaactgatgttgtcagttaggagcggataaagtttgtgtgtgttgtcagtgtatctgtgtgtaagtttattggacagaccgaaagatacaccacgaacccagatgaagtaggtaatagtcgtatgtgaagtttttatcatta

SEQ ID NO: 27980 - DNA, 1256 bp, Zea Mays
acaccgcgcaggaacaaccaccaggcacagccaacaagcttgctagtgtgtggtttctctcatcaggtcaggaggagcatggccgaccataaggaggagcagtctgtgatggacaagatctccgagaagttccacggcggggactcctcgtcgtcgtctgactcggacgacgagaagaagaaggggtcttcttcggcgtcggcgacggaggccatgaaagccaagatctaccgtctcttcggccgcgagaggcccgtccactctgtcctcggcggcggcaagcccgccgatcttgtcctatggaggaacaagaagatctcaggcggggtactcgctggtgccacggccatctggctcctgttcgaggttatggagtaccatctcctcaccttggtgtgccactgtctcatcgtctcgctggccatcctgttcctgtggtccaacgcctccagtttcatcaacaagtccccaccaaacattcctgaggtgaaaatccctgaggatgtgtctgttaatgttgcactgacactgagatacgagatcaacaggggctttgctaccttgagggagattggacatggacacgatctaaagaaattcctaattgttatcgcaggtctctggctcttttcagttcttgggagctgttgcaacttcctgacactgttctatattgtctttgtggcactgtacactatacctgttctgtatgagaaatatgaggacaaggttgatgcttttggtgagaaggctatgatcgaactgaagaagtattatgccatcttcgatgagaagtgcctatcgaagattccaaagggcctcaaggataagaagcactagattggtagtaagattgcaaggcatttcacgaggcctctcaataaggaacaaatggaggcaattatggagctggcaatgcagggaaaagaaaaggaagggaacaagaagaagggcagcaaggtgacacctctcaaggctcctctcatagaggctgttccgaggacctgagttgtttttaggagatgtgtgggtaggtctggtgcagaatgttagcacacatgtgtactagtctttgggtcgcccaactgcttttgatgactgctttgggtagtaggttgtgggcgaggcaatggtgttctttcttgtggcttgctctgtcggtagttcagtctgttgtaattctggtggtgagtcgcatgatgtctccggatggaagcgtgctgttgacgctggttggctggtcgagtcctgttttt

SEQ ID NO: 27981 - DNA, 2258 bp, Zea Mays
cccaaccccatctctctctctctgcctgcgttctcctggtgctgctctcgctctcctcccctgctttgacctccccgcctttccccgccgtttcttggatttctaggatccagacaaccgcccttgtgagcctgccttcctgcctactacctgcgtacgtacaggagggtccttgcttgggtgatccgggtgcctggtttctcggttccgcggcttccgctgctgttggattcgccgagccggagccgccggagatgaccgtcgacgagctgaagctgcaggcgagggccagcggcggccacggcgccaaggaccagttccccgtcggcatgcgcgtgctcgccgtcgacgacgacccgacctgcctcaagatcctcgagaacctcttgctccgctgccagtaccatggtatgccacgctcctctcgctcccctctctctctctcttcccctggcaatgacaacgatgattcgggtaaaaagttgcaggtggtgagcgctgaaggtgacaatggcggtgttaatcgcaacaagagaatttcacgcaagggtagggatgataatggtgatgacggtgatgattctgatgacaacagtaatgagaatggagactcgtcgagccagaagaagccaagggttgtgtggtctgttgaattgcaccgaaagtttgtggctgctgtcaaccagcttggcattgacaaggctgttccaaagaaaatattggatcttatgaatgttgagaacatcacaagggagaacgttgcaagtcatctgcagaagtatcggctgtatctgaaaagactcagcgcagatgcaagcaggcaggctaacctaactgctgcatttggaggaagaaaccctgcttatgtgaacatgggactagacgccttcaggcagtacaatgcatatgggagataccggccagttccaaccactaaccattcacagccaaacaacctccttgcaaggatgaactctcctgcatttggtatgcatggtctgctgccttcgcagccacttcagattggacacaaccagaacaatctgagcacttccctagggaatgtcggggggatgaacaacggcaacctgatcaggggtgcgcatatgccactgcaggatactagcaaatgctttcctactggcccttctggtaattcgttcgcgaacatatcaaacagcacacaactggttacgacaaacaacttgccattacagtctcttgagccaagcaaccaacaacaccttggtcggctgcattcctctgcagaccctttcaactcatttgttggtgagcccccccagtttgcagatcttggaaggtgcaacaccacctggccaaccgcggtctcatcatccaatgttcaggagattggccagaaggacaggatcgtgaataggcccaagcttgagcctctctcaagctttacagaagcatccagtcagatccctttgctgggaagtgaaatgcagagccaccaagtagcatcactagccagcaacggtcttccgatgccgttcactcaggaagcggtgcccttcgcttatggaagcagcacgaactcgagagagatgctgaataacaaccttgcgcttagtaattcaggcgtcaactctacattgccgaaccttcgcatagacggttctgttgttccagggcagacactgggtggtagcaattcaggtggttgtgttgtcccccctctgcaagatggcaggattgatcaccaagctgtcagcagtcatctaaactacaacaacgaactcatggggacaggtaggctgcaaaggggacttagtggtggtctggatgacattgtcgtggacatgtttaggccgacgatggcgtctccttcattgatggggactgggaactggtctagcaagtttcagttctctacatcaagtctgccttcgtgtgagattttccgcatttgtggttgtggaggggttcggcgcttgattggtccaaagttgtttatagtagcaagattgcatcacaaatgccctttgcatttggtttttcagtttagcgaccaggttccagtgtcacgtccgaatatcaactatgtggtatttgctaccttaactcgtatggctatgttttcaagtcaggtgttaactgtggctatcgtgatatatacagcatggttatgagccaaggaatgctgtcctgtttcctcttggaaatcgttttgctgttccctttgttgattgtcactggcaatctgttccagaaagatcccagcattcgtcatt

SEQ ID NO: 27982 - DNA, 2658 bp, Zea Mays
gacggactgagggagagccctcctcgtctcctccgcccctcctccaggtttgcgtgagatcggcgagcgaatcacgcacacagctgtaggatggagtggggatttgctgtctctccctcttgattgcagtttaatcctttccatttcatccgtccgttcctcgtccacccgagtccgttgaccgttgaagtacagtgggacagggagcaaccgccatcatccctgttcgtcatctctcccaccatcaacaccaacatgggcagcaacacggaaagggccaggaaggcgttgggcgccatgaagctgatcggtttctctaagaagcaggccatcccagtactcaaggaactcctcaaaatcttcaacaacaactgggagcccattgaggatgagagctaccgtgccctcgcagatgccatcctcgataggcaagacagcaagcaaacccctccctcccaacagggcacccaagcagcccatgcggacttggagcctcttagatcaacaagggacgatcggcaacaatatctttctgctagccttgatgacacatgtgaagatgataatgaaacacccctggtcaagaggcccaggatgggcaccgctaatttcagaccagagctgcagccaccacagcaatccagtgtttcaacccaaggtgctctgcctgcttcaccacaaacgagtcgtcggcaaactcggtccttgactgtagagccacacgctgctggccatgaatatcctttagctgtcaacgatgctctagttgtgaaagaacccaaaccagaaccacaaattgatagagcagaagattttgtggctggtcctaatgccacacaactcaatgatggatcttcagaacaaacttcgggttttggtgcaagaggcaacatagttcaccaagctcaaagtcttggcaggagcctgcaagcagccgcagtgtgcaagaatggggtagggtctacagttcaaaatactcatgagacttcgattgtggaggtggacgttgcttcctcagccaatggtgaggtgaagatgtcattgaaatgcagcttgggttcttcaaatttcagcattagtatggaggaggttttcaaaatggtggaggagaagtgccttcactcatacaagatgctaccttcagatctttctattggcaagctgctgagtgaggtatgccaatctgttgtgcagttgggcactatgcattctgaggttaatagggacagtggcagcttgcataatgaagtagttgttccatttgtgaagccaatctcttgtgaggctgctgtgggcataagtgatgatgtggctggtgggtcatcagtccttgaatcctcagaaccttgtttgcagaattcacttgttgcttggaatcctgagttggctcactgtaatcaaaagacaacccatgatactactgatatatccaaaggcgaagagcggcgccagttccatgttcttgtgcaagaataacagggggcgagttctcctatacacttgagggcctgcttaagacagcattccttgatgaatgtacctcagtgaatcatttcctacaagagcaccataggttctactgtccagtttgccctcttgaaagatctaagaacgaaggctcacctggtccatgtaaaggtcatattgtcagaaaattcattaaagaatgctggagtaaatgtggatgtggcatgcagtgtggaaaccgtgtgattcagcgtggtataacatgcaaattacaggtgttctttacacgtgagggtaaaggctggggagtacgcacagtggaagatctcccaagaggtgcctttgtctgtgaatatgttggagagatactaacaagtgctgaattgcatgaaagagcaattgagaatgcaagaaatgtcttttgtctgctactccgctatgtttttggtaacgaacatatgctatgactagatgctacaatgcaaatttagttcagatccctgtagaagttgagacgcccgatcatcattatcaccatctggcatttttcacgaacaagaaagtggaggcatttgaagagttaacttgggattatggcatcgattttgatgacatggaagggcccagtaaaccgttcagatgcatgtgtggaagtagatactgccgcgatccgaacaatccaaggaggatgggtagagcagctgctaagcgaaagtaggcagggagcgcggacttggttggagttgagcacaccaacttttgctgtgggggggtctggtttcgtgtttgatgtggagtaatgcagtaccatcacctcagctagtattaagtgtagataggtgtggatgattttggtgaatggtgttatggacggaaatgctgcaggctgagcgacctagtaacctatgccatgtagtggcatctaaattagcctgggattgtgtatgcgtaaaaagaacgcctaagacttaaccatgttattatgtcagcttggtacatggtgataaaaagaatctgaccatttcatgtcagccacaattcttgggacggtcggagagtgaactagtatgtcgctggtgcgttgcaggcctgtttggttgtatgcatattgtctaaaattagttgctcaaattgttgtcacatcttagcacgcgtaagtgaatcttcctttatttttaaaattcactgacg

SEQ ID NO: 27983 - DNA, 331 bp, Zea Mays
tggaatgtcctcctgccttaatttatccagattctttgagaaagagtacttaatgagaaatggaaaggtccaaccgatacaattgaatagttacccaaaaggtgttcttattcctgagtcccttagctgagggtgaaagggctataaagccaagaagaggaagaaggggtgaagaattcaggttttcggaagcaatactgaagactattttttggtttctctttgcaatatgctctattgggattggattttcaatcactgttattaataatctaacacaaatatgagttgttgcatgtcatgtcgacacaaccatctcactctctgcctt

SEQ ID NO: 27984 - DNA, 1131 bp, Zea Mays
ggctgtctccgtccggttgtagcgaagtccgacggcgggatccgattgtggcgaagtcacgcccgtgcagtgcgcccacagcaaaaagctccgcggcggtcgcgtgacgtcgcggcaaacggcaaacagcgaattcacagcagcaaacagtgtgaatcctgcaatctccaaacccaagcccggcggcgagatccgcgcggcaggcggacggggccgctcgaccgccttcgtgccttccaattcatgacggtgcggccggggtgggtggtgagggtggcgcatggctcggcggcggcgtggcagcgcgtggcgtgcaacccggagacgctcccgcctgaccgcgtcctcgcgctcatctgctgcgcgccactccacctcctcgcgcgcctcgccgccttcctctgcgtccccttcctccccgggcccgcacacaccccgctccgcctccaccgccgccgcttcctcgtcctccgccccccggagtttgcgccgcaccctttcgcttactccccctcgtcttcctcttcttcgtcggatgaggaagaggacgacgacgatggggacggcatccacgaacacgtcgattgaggtttgtaggccaaaaaggaaaaatggagataactttctcagaacatatctattcatgtgtttttgctacaaggttttgggtcatacctttgtgggagcacaatgtgatcctgatatcctctgcgtctctaattggtcatagcatgctaacttatgggaggttgcttgaggttaaggctcagaaaaggagaatttggggttgaggagggaagaatgaacattggcatgttgtgctggatgctgaactgctcgcccttctatgattctatctcgtagttctcaggatatggcattatgacgacgctcattataaaaagccaggtcagaagctctgcaaaaaggataccaacggatgaaactggtttgagttgtcattattgttgctgttgtttaaacgaactactgatttttttttttatattgaaaagaagaaagtggatgaggttaaaccttggtaaagaggatggttgtgttagacttggcgagtcaacgttaaacttagtcattttaatagtaatggaatctgaaagaaattcattgtgg

SEQ ID NO: 27985 - DNA, 1406 bp, Zea Mays
gtcaggggtacgtctatctcccctccagacctccacacgccgcgatggcctccgccgaaatccccaactccagccctgatgccaccaaccccgccgccgccgccgccaccgccaccgccactgccaccggccccgacatctcctcttcgccgccactcccgccgcggaagcgccgcctttcgccttcctcatctcccacgcgctccgcgtcacgctctcggtcgccccgctcccgctccccgcgcggccgccgctcccgctcccgcagccggagccggagccggagccgcagccgcagcccgcagtacccgcccgacggcaagcggcagcggcacaacgaccttaccgtggaggcgtgccgcgacttcctgcgcgataggtgcacccgctccgacctcgagtgcagatacgcgcaccctcacaactcagcttccgtcgaccgggacaacaaggtgacggcgtgcgcggattctcttaggaacaattgcttccgggggatgacatgccgttactaccacccccctccacaaatccaggagcaattgctgagatcaattggtatggaagatccaaatgtgaagacgatctgcagagattttacacgtgggaagtgttcaaggtcagcaaatgagtgccgattcttgcaccattcatctgttgaagatgctgcaattgtttgccaagattttttgcgtggacaatgcaatcgcatagcatgtaggtactctcatgtagtagcacatccggtgccaccaatgagccatgttcctatgccataccctgagatgctttacatgccaccaccaccaccaccacctcttggagtaccaatgatggggcctccgccttcaccatttgctgataataagaacagggttgaagtttgtagggacttcttgaagaacatgtgcaatagagaatcctgccggtttttacaccctgggacacatacagcggctgcgagcgccaatgttgaagtatgccgtgattttaaacgaggagaatgcaatcgacctgcctgtcgctttttgcatccatatacaagttgaagttttctgttagctaaagtaaagtaaattgtaccttgttttcctcttcataatacaaatggctgccaaatacatatagatgaaagaacgctcccctaagaacacatagttatagagttaacttcaacgtcaacttgtggatcttttgtccattcaaaccagctagagcaaaatagattttaattttggtaatttttgtcatttgggtaaattaaggtattttcaatgaaatgcaacttttatctgatctgaacaggcatgcgaatgatcatgttggttctctaagatttccaattggctaagatagcatgcacttgttgaagtgatccactgtttgaccagcttcattatctttta

SEQ ID NO: 27986 - DNA, 1079 bp, Zea Mays
aggcagaggagcacacacacacacacacggccactccgcccccgctgctctcgcgttgccggccccgacagagacgaggcacggtcggctgctctcggttccccgcgcgcgcgctagctagaaggacgacctgcgctggtctcgccatggccgccaagaaggtggtgctgaagctggacctgcacgacaacagggacaagcagaaggtgctcaaggcagtctccactctccacggtactcctctcctctcccctgctctgctcccctccaccgtcactgtcatggaggccgcgcgcctgcaggagcatcgactccatcgcggtggacatgaaggagtccaagctgacggtggtcgggctggcggaccccgtcgacgtcgtgggcaggctgcgcaaggtcggctccgccgccatcgtctccgtcggcccggccacggaggagaaaaagaaagacggcgacaagaaggaggggggcggcgacaagaaggacgctgacaagaagggcgacgacaagaagcccccgccgcccccggtgtacccgtacccgtacccgtggcacgcgtacgccgccgccgccgccgccgcgcagtaccagtaccacccccggccgtacccgccccagtacgtcgtccacagcgccgaggaggaccccaactcctgcgtcatctgctgatctgatgccggcgtggcgcagcacagtcacagtcttcttttttgcacattcctatatttgttgttgttggcctgctctgcttgcctacctgctcgatcgaccgccacgtcgtcggtgatcgccgggaccggggcgggtgtggtggttggctgctccgctcgtctctatgctggcggtggggttggtcgttggcccgtgtccgcaggtcgttgcaattgcaatcatgcaggcgatccatccaaaagtacttgttgccttgtcggggttctcaggctgctgaccagcgtggtcgcgtagtgtgcatgcggttttttgtccttggctatttgcctattcggggtgtttgaggcatgaaactatatatatagagagagatttataaagattaattgaccttgtaatgtaaa

SEQ ID NO: 27987 - DNA, 2117 bp, Zea Mays
aaaagcccaggcctttctgttcttgtgtcgttggaaattccctctttgactgggaacatttttagccttttccttgcaagattgcaaaccaaattccatgttaggttttgttactcccttttactactactgtttttcaagtgtgcgggacaagctcagggagtcccttcctctttccatcccccttttcgatttggggaaaaagagattcgcttgtggatgcaaaaggctgatacacttgcttgagaaaaagcacgcagctcctttcttgggggagcgagctctagtgtggtggttgcacagctggaggcctctctcgtcagggctcagaaagtgggtgctgaattattgggctcgtatctgtagtagtgtttggtggtggttgagttgtaagtacgctctgcttctctccacaagctcgaatcaccagatgaaccgcatgtgtagtagtatgtgacatgtcctcactcacctctttaggcgcgtaatctgtcaattgcatagaccctaatctgagcagcaaggaagcaaccgttctggaaactgagatggtttggcctggacacggggttggagcagcctgatgtcgcaccaagtttatccacggacatgatacagcagtttgtgcccaacatccgttctggtagcttcgccgacattgggcctcggaggtatatggaggacgagcacatccgaatagatgatctttccgcccatctcggctcgatgttggtctgccctctgcctagcgccttctacggggtctttgacggccatggcggcccggacgccgcagcctacatgaagaggcatgcgatgaggttcttgtttgaggaaagcgagttcccacaggcgtcgcaggtggatgaggtgtacctcgagtccgtggagagctgtgtccgcagagccttcctgcaggcggaccttgccctggctgatgatctggacatcagccggtcctctggaaccacggcgctcactgcattagtgtttggaaggcaactggtggtcgcgaacacgggggactgccgcgcggtgttgtgccggaaaggagtggcgatggagatgtcccgcgaccaccgcgcgaaccacgtggaggagcgcgagagggtggccgcgtcgggcgggtacatcgaggacgggtacctgaacggggtgctgtcggtgacgcgggcgctgggcgactgggacatgaaggcgcccggcgcgtcggcgtcggcggcgctgatcgcggagcccgagttccggcgggcgacgctgggtgaggacgacgagttcctcgtcatggggtgcgacgggatctgggacgtgatgacgagccagcacgcggtgagcctggtgcggcgcggcctgcggcagcacgacgaccccgcgcgctgcgcccgggagctggtgatggaggccaagcggctggagacggccgacaacctgacggtcgtcgtggtgtgcttcgcgccggagatggggtcgccgtttacaccgcagcaacagcaggaggaggagctgcccgcgaggcccaggagctgcaagaagggcctgtcgacggaggcgctgtgcagcctgaggagctggctggatacggaccaccggtagagggaggaagagctggggggtgtgtaaatactggagtattatgctgacagcaacactggttgattatgagcgctgggccatctgttgaggattttacgtaggctggttcagcagccagcagttttgtaggtttcgttcttccttttcacccttgttatctagtcgtttgttgtacatacatgtatggatgctgctgatgacatctgtgtgctgcgctccattgccaccaactttctttttaccgagagcccagtgagaagaggatagcggagcaggcacagccactgcatttgaccacagttttcaggcacagcgacactgggaaagatcaatcaatcaactttgtcttgagccgagcaggtagcagatgggagtggactactactagtagtgccattgcggcgacaaaccgggttagacaatattattataggagacagacaggatatgatcggctgcctaatcgacaattattttgatgtttcgatttttatagatacaatgtttttactctacaaatgtct

SEQ ID NO: 27988 - DNA, 1666 bp, Zea Mays
ccccaccgcacactcacaggcgccagcctagcccacgctgttgttctcctctctcagtcgcctcgccccaccgtgtctccctcccctcggtgtcgtcaatcaccgcacccgctgctgctagcccgcaactccctcgcttcctgcacccacatccccgcggcgctacctgcctacccagatcccgctcgccggtggtgccctcctcagtcctcactctcccgccgctggcgccgccggagcgagggggactgcccataccctactaggacgagcagtaggaggcggaggggcgagatccggcggaggccgccccgatgggggacttcaatgtggcactggtgatcgtggcggcggtggtcagcgtgctggtgctgctcgtcagcgtctaccttctcgtcaactaccagcaccccgacgacgtcaaccaggcctacttccccaagctcgtcgtcgtgctcggcctcaccgtcgccgtcctctccatcctcatgctccccgccgacgtcgccaaccgccaggcatgccgcaaggccgtctacaacggcgcctgcagcctcacgctccccatgaggacgctctggctcgtcgtttacatcgttgacgccgtcctcgtcttcctcgtcatccccttcgcaatgttctactacgagggcgaccaggacaagtccgtcgggaagaggctcaggaccgcgctcatctgggtcgtcgcgtccgcggtagtgtgcggcctcgtcctcggcatcctatacggacttgttggtaaagtggacttcactgtcaggcacctatcttcctcggtccagacatttccaaactcattttctggattctcaagtggccagccgtgcattagtccattgactcgtcagtgtgcggcttctactgcaccggctaactcgcaaacaacttggacaatgcgtgctaccttccctgaatatgtggttgctcttactacaattgttggatctgtgcttttcacgatatttggtggtgtcggaattgcctgccttccattgggacttatattctcatttgttcggcgtccaaaagctgtaattacacgctcacaatatataaaggaagcaactgaattggggaagaaggccagggagctgaaaaaggcggctgaagctcttcaccaagaagaaagaagtgggaacaagggccggaaatggcgaaaaaacgtgaaggctgtagagaaggagttactacttctggaagatgacatgaaggctctagaagagatgtatcctcaaggagaacaggcagaggctacttgggcattcacagtccttgggtacattggaaaacttatatttggtgttgttgggttaattgtttcaatagcttgggttgcacatatcgtcatatacttgttgattgatcctcctctatcttctttcctgaatgaagtcttcataaagttggatggtgtttggggtctccttgggactgctgctttcgcattcttctgcttctatctccttattgcagtgattgctggggagatgatgcttggtttgaaacttgttttcatcacaattcacccaatgaaatggggaggcactttaatgaactcctttttgtttaatgttgggctcatactactttgctccatcagcttttatctggaaaggcagtcatagtcatagaatgctcatattgg

SEQ ID NO: 27989 - DNA, 2397 bp, Zea Mays
gtgatattggtgcaagaaggtatctacgaaaagtttgcaaaagcattcatccaggctgttcagagtttgaaggttggtaacggtctagaagagagtacatctcagggtcctctgattaacgaagctgctgttcaaaaggtggagaagttcataaatgacgcgacttcaaagggagcaaatgtcatgctaggtggtaaaagacacagcctgggaatgtcattttatgagccaactgtagtagggaatgtcagcaatgatatgcttcttttcagagaagaagtttttggtccagttgcaccccttataccgttcaaaactgaggaagaagcagttcatatggccaacgatacaaacgcaggcttagctgcatacatatttaccaagagcatacctcgttcatggcgtgtatctgaatctcttgagtacggcttagttggggtaaacgagggaattatttcaacggaggtggcgccatttggcggagtaaagcagtctggtctagggagagaaggatcgaagtacggcattgacgagtacttggagctcaagtacatctgcatgggcaacttgggttgagtcctgaagtcggcctctagctcgaaacactcggcagatgatgaacggagaaaccaggcgtgcttagaagggcgtgagttgcgtttagctgcaagatcggtcatgatggattgatggctgtgggagagcagttttagaataaatcgaataagccgcggagcattaaataaaagaagtggaaatgagatgtaaatggcgtggaactataaagtatggcttcaccttcgaacctgtatacggcctgtttggattctcttctaccgtcgcttcagccaccaggcttcccaccgaagccacccccgcaacggtccgatagaagcgggcttccgtagaaagctgggctagctgggcatctgtccagtccttggctctcgccacgctagggtttctttggtccccgctgcctcgcatcgctcctgtctcgccttctaggcggagctgggattcttctcaatgacgacaacgagattctaagttcttcacgacgattctgatcccttcaaacttcatcgatagttagcatttgttatccatgatttgtcgtagtgaattgaagtttttggatcgagttcatcggattccagccgatgtacaccgagagatcccctttcatactttccagcataggtacttctccaaagatccagttcaagttggtgtccccgcacaatcgagttaaccaagatttcatgccctgtcagagtttgatcagaagaagaggagctgcaggaggcgtctgtctgatcacaatgcccgccgccggaagcctcagccagatgcattcgcctttgcctctgcaaggctgccttcgtcgtcgttcgactttccaggacgaaaacgaaggggcctcctccggaaagataaaagcatttctttgtttccagatttcccaagctgctatttgcacaacaagtttagtaatatgataggaggcaaataagttttgtctggaataaagctcctgttagccatcctttcacttctccatgggacagctcatctgagctccctcatgcaaaggaaataagagaggtgtcaacgaaagttgggacaattactggacaagttcatttggataaatcttacgtgtccaatgctgttccatcacttacccatggcaaagatgagccttggccaatgaaaggtccggacatgtctatagctgcttcaaaattcgatggagcaccggatcttcagcgtgctctctctcttctgtcagttggcgcctgcggattgcccgatcctgtacaccaaacatcttgcgtcatccaattcactagtgccagcgagaacagtggcgaccttcatctatcacatggagcgaactctggtctagcgtcatgcggtgatggacagcatatagcttctcagcctcaggctcagctggttcggtttaccatggataccagcaacagtgtctatgagcccagtttcttcagtgtaaaccagataaattaagcgttgaagacacacgccacttggtcatttggataaatagccctgaagatggcctgagcttgtgcaagaagttcttcaaccaaccaccggacataaggatctatctgttaatgttatctgtgtatttattagccatacctgaattaagttgaacccaatctaggccagcttatgtgcaatatgcagttccaacctgtgattgacccattttttctgttgtttctttgcccgtgatgtgactgctctggaacttaagtgtgatactgttgtagttacactttactgccctgacaatcatgtcaaacggctggatatctttgaaactgtccttgatgaatctggacgtgtattttgtgtgtgtgt

SEQ ID NO: 27990 - DNA, 2184 bp, Zea Mays
cgatcctcgccattccgacgccgcactcgcagatcttcccttcgtcctccacgccccacccctcgcgtcgccgctatggccgacgaggccctggaccagccgccagacgcggccccgtctccgtctctggccccagcgacgccgccggcccccgccacctcgtcccccgcggcgctgctccgcccgcgtcgggaggcgttcgagcatgggctcctgcccatccccaagctcatcttcccggagggcatgctagcgcagaccctcgcccagctcaaggagaagctcgccgcctcagtccccgacgggcgcgtgcgcgctgcggccctggctgaggcgctgcagatcccgcaggagcaggcggcgctcgccctcggcacgctcgcggcggtgctcccggccgaggaccccgtgcttggggacggcgccatggatggtgctgccgccgacatccgcgacgtgctgctcttcctctatatccagtcttacaagcgcctcgttccgcggagcgcgcacaaggactcgcccgccgtggcggacgtctggccgtccacctccgcgttcgatgggtacctctccgcgctctccccgatccagcttgttcgcagcaacagccgccgttttatgccttctcaagctgatgaagaaattcatcagttgtcctttctgcaaaagcatatggcgaatattcttactctcttggcagattctgttgagggtgagggtgacgattcactggtattgacaatggagacttttgagcaccttggatttctagttcagttctcagaaggaacttccttaagccaggctgctacattttttgcaaactcagacccagacatgcctgctgtgcctgtccctgctgctcaggttcttgattggatgtcacagaacatagctttttcgctggaatattcttctgagaggtccgtagctaaggaaagcaaccagcaaaccatgtctgatcttgatgtgaccatggctgaggccaatacaagtcactcacggaacagcacaccaagtgctaatcctgcatactacagaaatgtaacgtttgtggagggcttttccaaaacctctgttgtcaagcatgcatctgatgtcaaagggaattcaataaaggttttgaactgtcatgattctgttatctacatattagcaccactgaagtatgctactgtgtatggttgttctgatgctacggttgttcttggtgctgttggtaaggtagtaaaagtggagcattgtgaaagagtgcatatcattgcagctgcaaaacggatttgtattgccaactgccgggagtgcatcttctacctaggagtaaatcaccaacctcttgtattgggggacaaccataaattacaagttgctccattcaatacatgctacccacaactgcaggatcatatgatgcaagtgggtgttgatcccagtgtcaacaaatgggaccaaccttttgtattgggagttgtggatccacatgattcattatcccatcctgctggggttgcagatgttaaagctgaatcagcaacatgtctggatcctgatctattcaccagttttttgattcctagttggtttggggatgaagggcaagagcctataaactgcaatcctttcccactgcctgaaatttatgaggcattccaaagcaaaaagatatccaaaagatgattcgggagctacagcttgacgagaatcggaaaagggaattggcagctgcccttcatgctcagttcaaggattggttatacgcttcgggcaatatccgccagctctactgtctacaaggtgattaatggtgcaatttacaagactgattatcctctgccgactcctcaaaaacattcgacgattgtcgaagctgacctcttccttccatggaaaggactcccaccctgctcacctgcggtatttacacaagtatgtaaaaaatgaagatgtactattgcctattttttacagattcatttgcgtatttctccaagtcttctctttgctgcgagttgggtattaattaggatgtgatattgcttaatttcccccctgtttctactcattttttggcccttgataatgtccacgagtatgtaatagggactaatgaatcaaacgttgttaaataaacatttcattccgttttgctaaatggctcatcatgtcaaccctctatggacc

SEQ ID NO: 27991 - DNA, 105 bp, Zea Mays
cgcggagcggtcggcccgccttccgctccccgggcagcggttacaccttaatcgacacgactctcggcaacggatatctcggctctcgcatcgatgaagcacggt

SEQ ID NO: 27992 - DNA, 963 bp, Zea Mays
atggcgagcggcggcggcgggggcctgggtgcggctggcgcgggaggccggatgcccacgtggagggagcgcgagaacaacaagcgccgggagcgccgccgccgcgcgatcgccgccaagatcttcgccggcctccgcgcgcacggcggctacaagctgcccaagcactgcgacaacaacgaggtgctcaaggcgctctgcaacgaggccggctgggtcgtcgagcccgacggcaccacctaccgccagctagctggctctagcttgcagggtttttttttctcctccatttttttgatgggtgggtgggttgggttgggtgtcgcacgtggacgatgcgcaaaaggtacgggatgccagtctggacgactggaccgcgcacgggtggtgtggggtgggtggagtgattgacgcgtccgtggagaatcccctccaccaagcttcagactcccgccggagatggtgctcgcgagattctccggggattggtaaggaggctggctggcatggattgattgggcatccagttctgcttgcgctccgaccctccagctggccctgcttctccagcatttcgatgttggtcctgcaacgctgtttcgcgcattggattggataagcaaagatgtgttcaatttagttttggtaccggttcagttcattacctgttagggtctaagtcatgtcgctactcactaggttgtgtcgtgtgtggactgtcctgaggcatagtttcgagtatatcttacttgcttggcacttgtgtactgattgatgctcttccagctaaggagactgaaaaatatttgatttgcagagtgagccttgcacaagctgttgcttatgtggtggttaactgaactgttttgggcactactttgtcatcatagatattactagtattggcctttctcaactatgttgttcgacctgcacaaagagccttttggtttctctgtcaca

SEQ ID NO: 27993 - DNA, 2111 bp, Zea Mays
ggctataaataacccttaaacattattttataagcctcttgattacataatttgattatgaactcactaatgaaagtttttaacatgcaatacgccaccagcacagaactcaaagcatcctggatacattattgaatcgtgtgatgaacaaaagatgttagaaataaaaaattaaaaagaaaaaaaggcccatctaaaagtccattacttgagaaacccaatttccaccagaccctaacctttccattgttccagcgaacgcacacagccgccgctgtttcttcatcttcctcgcagcgccggcgctgaggctcgggctctcagcgacggcggcagcggcagcggcttcccctcccgcctctcgccagtcgcctcgcgccctcgcctccggtcctccgcacaccggtcggtgaccctgcgataatggctcatcgtggacatctagatggactgactggccaagctcctgctcttatgcgccatggttccttcgctgcaggcagcctctctagccgctcacctttgcagtcttcatccacactggagatgctggagaacaagcttgccatgcaaactacagaagtggaaaagcttatcacggagaatcagcggttagcatcaagccatgtggtcttgaggcaggacattgttgatacggagaaagagatgcaaatgatccgcacccacctaggtgaagttcagacagagactgatttgcagattagagatttgttggagagaatcagattaatggaggtagatatacatagtggtaatgtagtgaacaaggagcttcaccaaatgcatatggaggcaaagagacttattactgaaaggcagatgctaacccttgagatagaggatgtgactaaagaattacagaaactctctgcctctggggacaataaaagccttcctgaattgctttctgagctagataggctacggaaagagcatcataatttacgatctcagtttgaatttgagaaaaatacaaacgtcaagcaagttgagcagatgcggacaatggaaatgaacttgataaccatgaccaaacaagctgagaagttacgtgttgatgtggcaaatgctgaaagacgggcacaagcagctgcggctcaagcagcagcacatgcagctggtgcacaggtgacagcttcgcagcctgggacagctcaagctaccacggtttcagcagcagcagccacagactcatatgcaggtgcatataccagctacccccctgcatatcagcagggagcccaggctggggcatatcagcagggtgctcaggctggggtatatcagcagggagcccaggctggggcatatcagcagggagcccaggctggggcatatcagcaggggggccaggatggggcatatcagcagggggctcaggctggggcatatcagcagggagcccaggctggggcatatcagcagggagcccaggctggggcatatcagcagggtgctcaggctggagcatacaactatgcttatgatgctggcacggcttatgcatatgcaggttactctggctatccagttgcaggctacgcgcaaagtgcagtgcccaactattcctatgctgcacctccgcagccaacaagcagcggtgcagctacgaacgccgcaggaggccagtatggggcagttggtagtgctggatatcctactgggcaagttcagccgagcagtggcactgcaaatgcagcgcaagcacctcctcctccaccaccaccggcagcaccatatccccccagcacatatgaccaaaccagaggagcccagagataaaatctgggatgtaaaccagatggatgtttgccatgcacatttgttgagcagacaaatatggtgaaatctgggatgtaaaaccagatggctgtctgtgcctccatcccattgactagggcgtattttcaccaatattgtgcctccagtgcaatttcttctgtgttatatatcaccaccatttgttgagcaccgtagaaatgagttccagacggccgggacagcaacaccacatgtgtctttacatcaccaccatttatccacagcgcgtaatgtaatggcatcaacatcaatatatatggttcctggct

SEQ ID NO: 27994 - DNA, 3688 bp, Zea Mays
ccagacagcctcctctcctccggccggaaaaaagcaacctcgcagatccgcggccccccctcctccgctcacaggttcaccgcatcgacgccactaccgtttccactgccgcctcgaccccgctccaccaattcttggtcaagccgctccagctaagagacggagagccctgcggaaaggggagacgaggggagggtgcaaaccctagccgtagaccgcgggctcctcctcctcgccggcggcggcggggatggagatggtggtggcggcgccggcgctccccgccgaagtggagagggctctcatccgggacataaccgtcgcggctgatgcccacgccaaggagggagacactttcttcctcatcaccaccaggtggtggcaaagttggattgattacctcattcaagatttgactggtgcaacaagtaatggttctcatcatcatgagtttggttcaaaaactcctagaaggccaggagctattgacaataccgatttaattgatgatgtgccacttgaagtctccaacatggagattgagatacatgataacttggttgagggtcgggattacatactgcttcctcagcaagtttgggaaaagttgcatggttggtatggtggaggaccaacattaccaagaaaggcaatcaatactggcttttctcaaactgatttggcgatagaagtttatcctctacgactgcagttaattctaatgtcaagaggagagcgaacctttataaggataagcaagaagttggccaactccataaaatggcctgtaaggtttttgacttggcaccagatgaggtatgcatttgggactattatggtcgaacaaagcattcattgatggatagcttggacaaaacccttgatgatgccaacattcagatggatcaaaacattctagttgaggtaaccactgatgcaagtggtagtctggatggtttggttaagcgaaacaatttttttgagagtgatgctccgaaatcaggattgccagatgagaattttgcagccaacaactatgcttccagaagctatagctctagtctgacaccaagcatctacctgcgatcacccaatggtgatctggataatgtgcatggttctagtggcatgatcacgaggggatcgcccttaggtcttacagggctacttaatcttggaaatacatgctatatgaacagtgccatacagtgtcttgtgcacacaccacagtttactaaatacttctgtgaagattatcatcgcgaaataaatcggcaaaatccactgggtaatgtgggtgaacttgcattagcttttggtgagctattgagaaaactctgggctcctggaggacgtgcccctgtttcacctagaccattcaaaatgaagctttctcggtttgcatctcagttcagtggatacaaccagcatgattcacaggagctgttggcgttcctattggatggactccatgaagatttgaatcgtgtgaagcatagaccttacataaattcaggggatgctgatggaagatcagatgaagaagttgcagatgaatattgggcaaatcatattgccagaaataattcaatcattgttgatgtatgccaggggcagtacaagtccactttggtttgcccagtctgtgggaaggtttcagtgacttttgacccgttcatgtatctttccttgcccttacaatttgcctcaacccggagcgtgactgccgtggtgttttcttgtgatggtagtgttccaccaacaccattcactgtgaatgtaccaaaacaaggtaggtgcagagatctattacaagcccttggtgctgcatgctcacttaaaaatggggagaaacttctaattgctgagatacggaatcataagatctaccgttttattgatgatccagtgcttcagctgtctacaataagtgatgatgatcatctggcagtttataagctcccaaagttggaaaagagggtgaattacattcagtttgtgcatcgtcatgaagatctggaccatggaaacaataacagcttgacatcttggaaaccgtacggtgttcctcttcttgcacaaatttctcgcaatgaaattgtcacgggttttgatatccatgagttggtccataaaatgcttgtgcccgtgctaaggaatccggactctctgcatttggctgttcaaagttctgtttccacaagaactcatagttatcataccgacagcagcaaatgtcagcttctgttggttgatgatagcaacacagtcattgaaaaatcaaatgatgctatcaggatcccacaatcttcacttgcaactgtattttttatcaactggcccaaggcagatctgaaaaagatagacactcatcatttagagtaccttccagaggtgtttatgtatgctccgcctgcgaagagaacccgtggtgaagctctgtcactctatgcatgcttggatgctttcttgagagaagaacctcttgtacctgaagacatgtggtactgtccaaggtgcaaggagcaaagacaagctagcaaaaagttggatttgtggagacttcctgaagtactagtcatacatctaaagagattttcatttagtaggtcaacaaaacaaaaactagaaacttttgttaattttccaatacatgacttggatttgacaaattacattgccaataagaagacttcagagcgccagatctatgagctgtatgctgtgagcaatcattatggcaacatggcaagtggacattatactgcacacattaagcttgtggatgagaatcggtggtacaacttcgatgatagccatgttgcttccattgatgaagatgaggtgaagactgctgcagcttatgtgctattctatagaagggtcagagaacaagacatagcaaggggaactagtaatggatctcagttatatgcaaaaagaagtcacggatatagccataggtaggctgatgattactgtggttcggtgcaagggggattctggaaatgacacccgcacgcctttagtcattgccaggagtatatggcttgctggaaaaaatgctcatcacgtgcagtcaatgcaccgttgtccagttgtcacagaagatatttcgtgcagtgctggtacaagatgggaattttgtatgaggtgagttgaaggagtaattgactctttatgataactgggtagcttcaacaggaacgccggggcttggtggcattttgttcgtctgttttcttctagaagagaaacaaggggaggcaagaaaacatttaggaaacaccttttcgttaatttgattttttatttccatttttagatttagctagtctgtacactgttgttggaaatgggtccgctgttgttggtcgatgcttgtggtggccaataatactacacccaactataccaggctctgcaatggcgaatcatggtgcacattatggtgctctgttgcgggaagaattgtagctgatgttgtacttatatactggcaaaaaggccccagaaatgtaaaaatgtatcgatatgctgacatcttaaaccctattttggattcgtgctctttcctatggatgaaggtgtgcgccatttaggggttgtttgtttgaagaatcaatccattctaggtaggtgattatcacgagaccatttcataaatttggtgaaatgaattcatttt

SEQ ID NO: 27995 - DNA, 957 bp, Zea Mays
aaaaccacagccgcgacgccgacgcgcaccgaacaacagctccgagaacgtatcgcccacaatcctccacgtctaccgcaatctgtcactatagcctgcgcattcgcatccgggcatccggcatcccaccccacccacctccttcctcttcccgcccgctaaaacccacgccaccgccgcgcgccgccggcagcgcaagggacgcacgatggccatgcaggtggtgcgcaacctcgacctggagcggtacgcggggcggtggtggtgaacgagacgtgggccgacgggcgccgcggccacatcgagggcacggcctggcgcgccgaccctgccagcgacgaggccaagctcaaggttcgcttctacgtgccgcccttcctccccctcatccccgtcaccggcgactactgggtgctccacatcgacgccgactaccagtacgcgctcgtcgggcagccctccaggaactacctctggatcctttgcaggcagcctcacatggacgagtccgtgtacaaggaactggtggagcgtgccaaggaggaagggtacgacgtgtcgaagctccgcaagacggcgcaccctgacccgccgccggagagcgagcagagccccagggacggcgggatgtggtgggtcaagtccatctttggcaagtagccttgtggtggtgggtggcagcgcgggtgctgccgtgccgagcaggcgagcgcacgcaagagatgcctgtgaccgtcggttccgcgtgtacattcagcactagctggggattaagttggttcgttgttgctgtcgcgatctgcaaatggcgaaaagtgtgcttgtttcttgcccgtctgtattgtatcgaactttgagcgaatgtttcagtttgctgcatcatttgtttgtcatgtgctgaattccctgcttgaccgagttcgtaggcaatcctccatgtcgttctgttcagttgtg

SEQ ID NO: 27996 - DNA, 682 bp, Zea Mays
gcacgacttcgcgtaacaacctggttcgattcttgtgggagtcaatctccacaaccccggatgaattggccgccttgatcgtggtgcatataagttgcgccccagaacctctaatcccacgtcggaatcacgtagaaccaccgcgagggagagagagagtcgatcatatcgtcgcgatcaaccagagtaatagcgaggggagagggagagccgctgcggcaaactcgggtgattgacctccagtctacgccaggctgctgggggaggcgctaggatcaccaccgaacgaagaagggcccgagattccgaggatagttcgtcggcgtggaagcttcgccgccgcgccaccatctgcgtttgggagccttcttccactgacccgctctctggtaagacctccagatagtctctacttgttacaaggatggtgtagcgcatgtccgggggaggaatcgtgcacccaagggccagattgacttgctccggcaagcaaaccatcatgggtgcgggcgccgccgtgtcgggattgctggaggatggtggcgccctctgatcgttgatatgtagatgtgcggctaagattagtctgtcttaccggtttggtgaggatgaagtttatgttgtaaatttagagaaataagtgacatgctttctacatatttatatatattaaatattttaa

SEQ ID NO: 27997 - DNA, 1098 bp, Zea Mays
tgtgctttcaacctgaaaccagatattctccattttggaaagggttttggacttactccatctgttattgacattataacaatatttttcacatcttttgaggactgaaagtaaaagaaagaaatagcttatagagctccagatcccagtcatggctttaagtatgtccgttacgttgttcagcagcacccatattctcttgccgcatggaattcctactataaggtggtatcaagaatagaggacaggtttccacatcatttcaaatatctccttcggacaagagaagcgaatcctgactgtgtgcctccaataatcatatccgggcatcgatttactgctataagtcagcatcagtcagctgcccgggattaccttgaagcttataagctggacccagaaaaccctcttattaatctatgtgtaggcactgccttgattagtttggcccttggcttcaggcttcagaataagaaccagtgcatcgtccaagcttttgctttcctgtacagataccttcgcctttgtgataacagtcaggaagcctcgtacaacattgctcgagcgtatcaccacattggcctgaataccttggcagctgtttactacgacaaggctttgtcaaccgaggagaaggatcatcccatccccaagcttccgtacgaggctggttcacgtgcgccagaggatctgaggccagggtattgtgatgtgcgaagagaggcagcgttcaatctgcatctaatctatatgaagagtggagctaccgatcttgcgagacggatcctaaaaacttactgcactgtctaaaagctggtatcgggcaatgttgttgggatcggatatcagatccttcaaggctccttgcattagcttaggatcaagctagtctataaagctagaacattggtgtaatatgtcactagtgactttagatgtgtagctgaagagttaacaacgtgcttgatccagatttaaacgtatattctggtttcacaatgctgtgttatagtcaaatggttcagcgatgctttgcttcatgtgatttattggcaattcattattatttttctctcaaacgcacaggagaacgcatag

SEQ ID NO: 27998 - DNA, 4263 bp, Zea Mays
attcattcaataattgatgtatatgttatgtaatgtgtctagattcgttgccattcatttgaatatagacataaaaagaagacctaaaacgactactaatttggtacagagggagtagtactgttggatgtagaagggcttctttttggaggaaaatatatcttttatctcatcttacttgttcttgatattcctttcaagttgctaactttttcatgccttcacatgaaacaaagatatgccaccaagagtacaaccagccaacatgtatattccttggtgttcaagctggattgtctttgttgacgtcagagctgactatgggatatgctttgcaacagtggtacctaatctgctaccatatgctatatcccacctgggaaagaagatggaagggacaataaatgcctgcatagcaggatttgcacttcttagttatgtgcttggcttattggttagccagccacaaattcctctcacgatgaatgtaatattccccaagatcagtggtgagagtgcttactctctgatggcgcttcttggtgcaaacataatggcacacaacttctacattcattcatcagttgtccagggtcagaaaaagtcatctgcagttggtcttggagccttatttcacgaccaccttttttcaatattgttcatttttactggaatctttatggtgaactatgttctaatgaactctgcagcagcggaatctactaatactcttctcattaccttccaagatgttgtagagctaatgaatcagatatttgtaaaccctctggcaccaactatatttttagtggttcttctcttctccagccacatcatctcgctgacatctgctatcggtagccaagtgatttcacaccatttattcggtataaaccttcctctttctggacatcgtctcctactgaaggtttttgccatagttcctactctgtactgggcgaaagttgcaggagctgaagggatataccaattattaattatatgccagattattcaagccatgcttcttccatcttcagtcgtcccactttttcgtgttgcttcatcaagatcaataatgggagcccatagagtgtctttgcatctggagatactggtttttcttgcatttctccttatgctattttcaaatatcatatttgtggcagaaatgctatttggcgacagtgggtggatgaacaatctgaaaggatatactggaagccctgtggtgctcccatataccgttttagttttagttgcacttatatctgtggctttttcactgtacctggctgttacaccattgagatctggaagtcatgaagctgaatcccatgaatggtctgtgcattctcagagagaactcttgaatacttctcaagaaagggaagatgttaaggtggacaatgttacatatgaggaagatcaaagatcagatgttgtcccttctcccagggatgtgcctgacagccatccggaactggccttggactatattgatacttctgacactgctgtagaatctgatcacgactctcaacaatctactgcttatgcatccactgctcctgaaacctgctcctccccgtcgtttactcgcgaggagtcaaaatcagttgttgcagtcaactggccggagcctttggagaaggttcctacttctactgtgatggaggaaagcacagtagaaaatgtggtctctaggatcacgactgaaagagatgttttagtagaaacagatgttgtctcgggcaaggataaggaagatatccgtactttggagtctgagaagtcaattgttgatagcaccccatatgtgtctgatgacggtccgccatcccttactttcagcaggggaaagggctcagatgcaggaaatggcagtggtagtctctcaaggttatctggtttgggccgtgcagcaaggagacagctagctgctactcttgatgagttctgggggcatctgtttgattaccatggtaagctcactcaagaagctagcaccaaaaagtttggtatcttgcttgggatagaccttagaacacctagcacatctgtaagaacggataaacaagctgctgaaatacttaagagcccactggtgagagactcaatgcggggggcagcttttttgtcaagctcagtggacatgatgtcccctaagaatgaaacgtcgaatttggaacttgcatatgggcttcagaggggacctggcatgggattgtcaagctggtctcagggtatgcagctaccaaatacacagctgcagagctcaagcaatagcctacttgagcagagtgcaagattaaactcaaattttagttcatcttattcagacaacaatcagttctaccaacctgcaacaattcatggataccagctcacatcttacctgaaacagatgaatgccagcccaagcctttactctagcatgccgctggacccacaacggcttccaaaatcatctgtgtctgctgtgccaaactatgctgattccatgatgcatgctcgtaatcataacctgcttgcttcactgggtggtactactacacagcttcctgcaacatcccgcgtaggctcaatgatgcctgaaagatcgtattatgatccttccagcgttgatgggaatgaaaacgctggttcacctgcttactcaaaaaagtaccacagctcacctgatatgtctggaataatcgctgcaagtagagctgcactcttgaatgaagcaaagttgggtgctgccattggaccacagtcatacctcagcaggctggcggcagaaagatctcaatatgcaagctcaacagccaggcccgcggctccattagcatttgacgagctttcacctcctaagctccagagtgatatcttctcggcgcagtcaagcatgagaccaagtgctagatccctttgggctaagcaaccatttgagcaattgttcggcatgtcaagtgcagagctcagtaaaggtgacttcaatcttccaggcagatcaggtggcgtggccaaggatgatttctcttataaggaatctgagacgaagcttcttcagtccctcaggctctgcatcatgaagctccttaagctagagggatcagggtggctgttcaagcaaaatggtggttgtgatgaagatctaatcgaccgagtcgctgcagccgagaagctattgatgcaagggactgccgagaatcaactgctgcttcatggtggtgatctccagcaacattcttccgaccaggccggcatccagtacatgcgcacgcttcccaactgcggggaggactgtgtttggcgcgcgtcactcgtcgttagtttcggtgtctggtgtgtccgccgagtgctggacatgtctctggtggaaagcaggccagaactttggggcaagtatacctatgtccttaaccgtcttcaggggatcttggaccctgcgttctccaagcctcggggtgctctgacaatatgcacctgccttcagaaagacaccagagtgcgcaatagcccaccccacagtgggctaacagccatgggcccggtccccacaccgatccggggcgccttcacgaccgcaggcgtggttctggagatgatcaaggacgtggaggctgcggtctcaggccgcaagggcaggagcggcacggcggcgggcgacgtcgccttccccaaggggaaggagaacctggcctccgtgctgaagcggtacaagcggcggctcgccagcaagggccagtagcgcgcgggtgtcagacaggcaggcgatcgcaagcaatgttaggaggagcctgactattgttctccaggggggctgccactggcgccggcctccctgagccctggattttttcgttgcacgacgttcctagggaccggtggttgcccgatggtcgtcttggtcccttccagcaggttttttttttccttccctctttctgttggtttctttttgttggctttgtgatgttttgtaaggggcaactagggtatgtgctcagaaggactcaagatgtacacgcgaagatgtactagtctgctgatgcagcgttgtaaagtccacactctgcaggttaaccctttttggggccgtcaagtgttagtgcgtgccctatgtatgttaatcacccctgcagagaggttgcgaatactgaactactcacagacctgcacctgtcgagatcgtttgtaatatccgacgtcttgttcagaattgttctcactcttttttgcccgttgtgtaatttaccctgaagggacttcaag

SEQ ID NO: 27999 - DNA, 2669 bp, Zea Mays
cgagaccactcactagacaaggcccaggcccaggacgccagaatggagtcgtacaacacgctcggcccatgggctaagactcagatctcggtgcgattaatccatgatgacagcagggacgagaggcggggcccatcggcagaacccctctgacggcgacgatggaggaagccaagcggctgcacgcgcgcctgctccgccgtggggagcgccgcctgcagccgctactcctgcgcgtgctggcggcgggggaactgcgctacgccgcgcgccttctcggctcctgccccgcgtctccgccctccgcgccgctccacaaccgcctgctccacgcgctggccgccgcgcgccacccgctgctgctcccttgcttcgcgcgcgcgcaccgcctccgcgtcctcaccccgctctccttcacgcttctcctctcctccgccaccgccacggccgccgcgtgcgcgcacgctttgctggccaagtccggccacgccgcggcggcgcccggcgacccgttcctcgcgtccgcgctcgtctcctcctacgccagggcggggctgctggcggagtcccgcagggcgttcgacgagctgcctgccggggccggggccggggccgcggccgcgcgcaacgcgatgctgtcggcgtacgcgcgaggcgggcgcgtgggcgacgcggagcggctgttcgcgggaatgcccgaccggagcgtggtgtcgtggaccgcgatggtgtcgggctacgcgcagaacgggaggcacgaggaggcggtgcgcacgttcctggacatgtgggacggggccggggtgcggcccaacgagctcaccgtcagcagcgtcctgcccgcgtgcgctgcgctcggggccctcgcgctggggaggaaggtggagcgctacgccagggggagagggatgctcaggaacgtctatgtcgccaacgccttggtcgagatgtacgccaagtgcggcagcatccgccgggcttggaaggtgtttcggggcatggggacgcggagggatctttgttcttggaactccatgatcatggcgtttgccgtgcatggcctctggacggaggcgctggccttgtttcataaactgagggggcaaaaccagatggcattacatttgttggagtcattttggcctgtactcatggaggcttggtggatgaaggcaagctgctcttcaactcgatgagaggggagttcggtcttaagccaagaatcgagcactatggttgcatggttgacctgctggggcgtgctggcctgttaaaagaagctgacagtctgatcgcgagcatgccaatggagcctgacgccgtaatttggggagccctgcttggagcctgcagcttccatggcaactttgaactagcggaaatagcagtggaaaaactaatgcacctggagccacacaatacagctaacctagtgattctttcgaatatatacgcgtcatgtggcaaatgggacggtgttgcccgggtgtggaagctgctaaaggaaaaagatcacaagaaatctgctgggtacagctttattgagttagatggtaggatgcacaagttcctggttgaagataaatcgcatccaagatctgagaaggtatatgacgccctggatagcatcacgctggccatgaagcttgtcagcttggaaaatcctgaagtggaaagctgattttaacgtcaccatcttctatcccttttatttatgggagaagaaactgagaaaaccatttgagattggtcatggacttcttgctcagatcctccatatcaagtgaatgcaccacctgaatatcaatggatttttcctctactacgaaatggtcatttctcttgttcttacaatgaataattcagaggtgcaagtgcaccagacagatagaagcatatcattgcatgacatacccaaagcagatcatcatggaagacactagaggaactttcagactgtggggttatgcatgagattggttggaactatgacgcaggaatgaccggggttgtataccatattctcatggttgccttcacttggcagccgtggtttggagcgcaccctcatattgggtgcagccttggaagcaaggcaaacatgccccccgtccgcctttgcagtatatgttttggcatgcttcattggatttaccgtgttccttagttttcttttatatatatagctgcggctcatatgttgaacaagtttacagcttttatctgagcacttcatttgtgcactatggatcagtctggattctatcaaacttggaaatgactgctgcttcttaaggtgtgaacgcaccggcacaaacaagcagaaagatctgctcagactggacacttccagaaggacactggtcaacgttcagaaattgccatgtgattgtggaagaaaagaacaatttcaccgggtcagtttcactttaggagcataaccataacgttagatgcttgacgatgacttgtaaatgctgacgaaatgaacatgacgcagcatcttccttctacttttgtcgctgtttctcttgttgaaataaccggggtaatggtcttgtttcttgtccttttgcattttaaaagctgggtgatcctggaagttagtgctctggatgcttggtggcgctatacatgtccaaatgggttgggcttgccgagcggcccga

SEQ ID NO: 28000 - DNA, 2638 bp, Zea Mays
gtggactcgaggatcactctcgctatcgactacgctatctcaactgccacggacaatcgaaaccaacagtgaatcagccggcgccgcagcatgcctgtacctctcggctctcgctcttatccccacccacctcgctttctcccctctacaagaaagcgaccaccgctgtgaatcagcagagctgcagtgagagcaagtgagaggatcagaggaggcatccgtgaccaaagatcgagtagccaagaagaagagagatgaacgccgacttcggcgcgcccaaggagctcgcgggaggcctgcagcagcggcgggccctgtaccagccccgcctcccgccatgcctccagggaccgacggtaagggcggagtacggtgacgcgaccacaaccatcgatcccacctgtgcccaagccgtcgcgcaggccttcccgcacacctttggccagccgctcgtcagcttcgtcgcgccggccgccggcgccggcgccgttgaggagcgccacccgatcagggtgggcgtggtgttctctgggaggcagtcgccgggagggcacaacgtcgtctggggcctccatgacgcacttaaagcctacaatcctcagagcttgctctacggattcgtcggtggcacggagggactgtttgcaaacaagacgttggagatcacagacgatgttcttgcttcctataagaaccaaggtggtttcgatttgctcggtaggagtatcgatcagatccgcactactaagcaagtgaatgctgcaatgacaacatgccacagtctgaacttggatgggttggtcatcattggaggtgtgacctccaattcagatgctgcacagcttgcggagacccttattcagaataactgtaagaccaaggttgttggtgtgccagtttcattgaatggtgacctcaagaaccagtttgttgaaacaacagttggatttgatacagtatgtaaggttaattcacagcttgtaagcaatgtttgtcttgatgcgatctcagctggaaagtactattattttgttcgtctgatgggacgaaaagcatctcatgttgcctttgaatgtgcacttcagtcacacccaaacatgctcatcttaggcgaggaggtagcattgtcaaaactcacactgatggaaattataagcaagatatgtgatggagtacaagcaagggcagaattagggaaatatcatggtgtgcttgttattcccgaaggacttatagaaagcattccagaaatgtatgctcttattcaggaaatcaatatccttcacaacagtaatgttcctgtggctgagatgtcatcacaactgtctccgtgggcagctgctctgttccagttcttgccacccttcatcaggagagagctgctgctccaccaagaatcagataactctgcgcagttgtcccaagtttgtgattctgaatgcccaacaacaactcaatcaaaacttaatgtaattattggtgttatagtgtcctattgttttcagattgacacggagcaactgctggcccatctagtagaaacagaaatgataaagagaacgaaagaaggaaggtacaagggaaggaagttcagttcagtatgtcatttctttggatatcaggctcgaggatctacaccatcaaatttcgactgtgactatgcttatttggattgactggctacatggcaactgtggctaatctgaaagaccctgttgacaaatggagatgtgctgctgctcctttaactgcgatgatgagtgtgaagaggcatttacgtggccctggagcaatccctatagggaggccttccattcacccttctccaattgacctgaaagggaaggcttatgagttgctgcgagagaaggcttcaagcttcctccttgacgacttctacaggactccaggaggcattcagttcgaagggcctggttcagatgcaaagcccatcacgctgaccattgagaaccaggactacatgggtgacattgagatactgaaagagtaccttggcaaggttaggaccatggtgaagccagggtgctcccgggagatcctgaaggcggcgatcagttccatggtgtcggtgacggatgtgctgactgtgatgtcccaccccctcaacgccgagctgcccctctaccatttcaagtgagcgagggcatcagtctggttgttattcctagagtgtttttgaaacagcagaagattctgcttcatggctgccggtcttctttttttttaatttgggtgagaattaagcaatgggttgtactaataaacactgaaacagtacttgatactgaactgagtcgcgtgctagttgtattattggtggcagtattccagttttcaagaggtctctagaatatccaagattgataacactcatctttcagcctagcaatatagtagtagttctttctttacttactattaatgcactttctctcctcgcaaagttaagaattgcccaaccacctcttcttcctcgctgccctccaaggtggccaagagccaacagatcgatgacagaaactacaaattaaaaacaaacaaataaaaaggacatgcatgacctgatcaccacccatctcatagagagttttttttatcaccacctgaccaccaacca

SEQ ID NO: 28001 - DNA, 437 bp, Zea Mays
tcgtcatctaggtccattcattgccagaacaaagcatcatcatggtaccggtgtttctagtatgaacatttgggacctgccactgatggtgtccaaataaaacaaatatgaccatacattacagattttgatatccagggactttctggggttttctaattagcctattggaatcttaagataaatcttgtagcccctgtccagtgactcagagtaatattgttttactgtcttttggtgtaagcagaggttagcattaacaaaacaatgtgattggtctgaacttgtgcgatatgaagcaatggattcagctcaacttgacttcaccgactttaccaagttcttaggaagaaatgcattaacatctatagatctaaataaatgcattatcaagacatgttcttaatgaagaattttataaaaaagcaatatgatat
